United States Patent Application Publication US 2014/0325702 A1 - sequence listing, part 27

SEQ ID NO: 40635 - DNA, 1134 bp, Heterodera glycines
  unsure (1)..(1134): unsure at all n locations
tttttatagatttttaaatgtttggaatttttttttggcttaccaaaactccatcgaacctggctctttttaaacatgccaaaaagtttaggcttaactttttntaattaaactgatcagaagcgcaccagattttgcaagggcatcaaaaagacaaggaaaagcaccgctatgatgctaacgccagtaactcttaatttaaaaatttttattaatttttaaaacttcactattttatttttttaatagatttttaaatgtttggattttttttggcttaccaaaacttcatcgaacctggttctttctattctctttcaaatcgccccaaattttttttacagcttaactaggccctattaagcttatttccagaaaatctcgcatgaattctcatttttaaattttttatagatttttaaatgtttggattttttttggcttaccaaaacttcatcgaacctggttctttctattctctttcaaatcgccccaaattttttttacagcttaactaggccctattaagcttatttccagaaaatctcgcatgaattctcatttttaaattttttatagatttttaaatgtttggatttttttttggcttaccaaaacttcatcgaacctggctctttttaaacatgccaaaaagtttaggcttaactttttttaattaaactgatcagaagcgcaccagattttgcaagggcatcaaaaagacaaggaaaagcaccgctatgatgctaacgccagtaactcttaatttaaaaatttttattaatttttaaaacttcactattttatttttttaatagatttttaaatgtttggattttttttggcttaccaaaacttcatcgaacctggttctttctattctctttcaaatcgccccaaattttttttacagcttaactaggccctattaagcttatttccagaaaatctcgcatgaattctcatttttaaattttttatagatttttaaatgtttggattttttttggcttaccaaaacttcatcgaacctggttctttctattctctttcaaatcgccccaaattttttttacagcttaactaggccctattaaaattatttccagaaaatctcgcatgaattctcatttt

SEQ ID NO: 40636 - DNA, 900 bp, Heterodera glycines
gccaattggacaattttaataagccatacatccattaggaaaaacgattaaaaacaaattacgattagccaaagtcaatgctaaggaccaaaaaggtgaaataataccaaagacaaacagaagttatgaaatccaaaaataatttcagctaataaatcctatttcttaaatggttccatatttccttgaatgaatctttccattattttcttgcgcttccaatggtttgtctttctttcccaaaaaatgtcccccaaatcccccccccccggcaatgtctctttatgaaatgccgacccgatttgtgccatccccccctttcctttccctttcattttccctttttctcccaattatttccgtccatcggatgagcccattctgcgcacaccttgcagctggcgaacgcaagaaatgacaacaattattcttttcttttgtgtgtcgccactcgtaattaaaggccaaaatagccattaacgaaaaatcaacaaaatcagaacaaaaccccaaagtaaaaagcatcttttggggacgaaatgtacgtcgtttaattttcgcaaaatttcccgaatttctccccccccccctccctttgtaattttccccttgttgctttaggccataaatttgttttgtccggaagaaagggaagaggaagaaagaataatgggaaaaggaccgagaaaggggggggggatacggtaacacttttggccattggggaaaggcaacaatggcattggcattgccacttgtggccatttgaaatggttgtgaaattttggaatcagtgccaattgctctgtttggcgttggcatttcacgcggtcacaaccgaccgtttctggcgcagctcgcatcggatgtcccgtgccgcccgcctcttgcgagccgtcg

SEQ ID NO: 40637 - DNA, 1270 bp, Heterodera glycines
  unsure (1)..(1270): unsure at all n locations
aaaaaaaaaanatcggactcaccaccatccgacgttttgtcaagggatgaagcggtgccgccgctcttttcagcctcgttgcaacattgtcctccttcttcgtctgcttccattgtttgcgtttggccccgtcgcacgtccatcggttcctccttcaactcctcctcttcatcaacaatttgtcgtcgttgtccccctccatcaatggtggtgccgtcggtgttggcattgtttttgttttttgatggcatttcttggtcaccaccatcgtggtgttcaacagcatggacaaccagcgtagtgtacagagtgtcggcattgatttcgaccgggcccaactggttcagtttggcagtgccactgcattcactttcaaactccgacatgcattgaggcggttggcctattgtaggaggaaagcgagtcaaatgagtggttgttttttttaatagagcaaaatttcggcattttttgatttttttttttggggggggggctgaaaatgccaatttttactaaaataaatgatgtcaaatgagtgagtttgatttcaaaaaatgagctaaatttggcgttttttgactttttggaggccgaaaatggcattaaataaggagaaaatgctaattttaatataactcgtaaatgcaaaacaaaacaaaaaaaaaatacttgaattaatttgctggaacaattcccgatcaaaaccagtgttggcccaatcacgacggagcagaacagcggcacattcttgaacagtgcctaaaatttaggggggggggaatggtgcaaaaaaaattagatttaaaaattgataatacttttatttggttgaaaagcgcataaaatgccatggcattgggcataatgacgtcgcaatgagacaacggagcagcagtcgttttggcacaaatcgcaacgaatacgggtgaacgggaaattgccagccaaaaaaagcacctccacattgtcaaacacctaaacacaatggttttagtcgttttatctttaaggctaaaaacggataaactcgttcagccgcctctgacgaagaatttttctagcggttttttcaaaatttataatgaattactaagttttttttaaaaaaatttttcctaaaatcgctataaaatgcttccaaaaatttttttcttgtaattttcttagatttttcgctcaactgatatgtgagatagcgaaaccgcatgcacctatctctcacgcgctatagccctattttcttctcaaaataattatgataccagaa

SEQ ID NO: 40638 - DNA, 742 bp, Heterodera glycines
agtttgttatggcttcgcatcacccgcttcaacgggtgctcagtgtaaatatcgactggccattcaaattctgcctttccagccttatggaaagatattatggaacttttggttccatctcagttgtcaacgccgcgactgcatcgttattatatcagtcgatagaattttcgaatcgcttttaaatcgtctcttttgcgtcccttaatcttcactctgagccgagttactgcggtctaaacacgtttttggtagaattgcggccagaatttaaaaatacagtttgctatggcttcgcatcacccgcttcaacgggtgctcagtgtaaatatcgactggccattcaaattctgcctttccagccttatggaaagatattatggaacttttggttccatctcagttgtcaacgccgcgactgcatcgttattatatcagtcgatagaattttcgaatcgcttttaaatcgtctcttttgcgtcccttaatcttcactctgagccgagttactgcggtctaaacacgtttttggtagaattgcggccagaatttaaaaatacagtttgctatggcttcgcatcacccgcttcaacgggtgctgagtgtaaatatcgactggccattcaaattctgcctttccagccttatggaaagatattatggaacttttggttccatctcagttgtcaacgccgcgactgcatcgttattatatcagtcgagagaattttcgaatcgcttt

SEQ ID NO: 40639 - DNA, 1057 bp, Heterodera glycines
  unsure (1)..(1057): unsure at all n locations
cacagcatattccaattgggcgcaatgngcgtcgtcctcgcattggacaagcccatcacatcattccgataaatcattgttattttgttgttattattgggcatcgtccccccccccatttcctttaccatttttctctccccccccccccctccgacccaatgatccctttacagggggtaataaataaatggcgtgcataaattaaacacttgtggcgaattgcaacacaattcccaatttgatatttgtgcagtattttgcatgtttctcttacaactagtcggattaatatgttcagaaatgattcgtaattcttttcgattctttttatgtaattcccaaaaaacttccttccccctttctttctgctgctgtcgttgtccttgagctgaaattcttcaagaatctcgtcccccgcccctttttacctcactctttcctccctttcctccgtgcctttcttctccctctcaaacgccaaaagttccccttttttgttttgcttatcggcacccaaaatctctttggcattgagcgcggcaaattttaagggattgaattgtgcgcaagccgagttattccttcctctaaatagatttttagctgtaactccctccgactttggccttgatttattttttggattgccgaactttttcggagattggaatttgagtgggtaaaatggttttaataattaaagacaaatggcaaatgctttggttaatacccatctttcgtatcacttcttaatttgtccatttcatttcttgcacttctccatttgttaatctgactagccccaaagcccacaaatccattgaccgtcctttaattagtgtaatcgccgcagggttttcttcttctgatgggtgccgtttcagcccaatgttctccttcttatcactcatcagaatgggcggcacttttcaaagtgcaaaagacacagcagcaaataaacgcttcagagtataattgacttacgcaaaacttagtcgcctttgaggccttttgacaataattactccgattatgggcgggggattgagaataa

SEQ ID NO: 40640 - DNA, 926 bp, Heterodera glycines
atactatcattcatctcaccataacaataaagaattttcttaggcggtggttcaattagattcttatgatgttttaaaattcgtaatagccaacgggtcttaccactcccggtagcccctgagagaattagagtgaacggaccgcgaaacatttttaatgcctcttatttatttgatctatttatattttcatagggaacatatttcgcgcatttggggcatatccagaaattatcaaaaaatgatgtaccgaaatgcaaaagactgtgctttttacacctgctacaaatctcgtaatgacagggacagtaatgacaacacttaattttatgtgggcagttcatttttcaatttaattttattttgggttgctatttatagaaggggtatataaagggagtgaaaggaccatttgattgataccttgtatcaaaaatgcaaagaccgataatcgtaaatataattgctctcgctaatctcggtaccggaattaaactaaactctctgacgatcaccgaatgcgaatttaagtataaccctagaaaattcaatgccgcggttatcaaatgtataagccccatcaaagccacggcattattatgggaatccgggaaaatgatatgtctggggacgaaaagtctgatagactgtgaaaatgctattaaaaaatttatagaaataattaagtgctcggggtgtccgggggcttcttacaccggacacacgattgaaaatattgtttcgacctttaaattcggacatgaaattgaactgaacgaattcagaaaaaatcgtcgtgccttttatgaaccagaaatattttgcggtttaaatttcaagcggggtaaaagcatgacagcgttaattttctggaccggtaaagtcataattacgggaactaaaaacaattctgaaattgaggaaat

SEQ ID NO: 40641 - DNA, 895 bp, Heterodera glycines
cctttaggcccaaattgccccgaggcccaacagagcctctcggtcccggggagccctctctcccctcaattccttcctcccctcggagtcccgcaatgcccgacatccctcgctcgccttggtggcctcttaagaaaaagttctttaaaatatgctataccatgaacaaacctttgcccgggtggtcctcctggacacacagtgcacggcaagtctaattccgattccacgacaatgtccaatccgtccacgcctgactcgcccggacttccggcttgcccaggaggactgtccgggcctggcaatcccggtggcccaggagggccctgtgggcaactcaacattgaacagctgcaagcggagtctaaggcactttggccgccacgttcggctgaggaagagcgcttatttcgcgactcagtgaaagtcggaaaatggagaacagcccaaactctgttggaatcagccttagggggggaggagagcttaagctggaatttcgaaaaatgccttgaatttctgcgattttgccaaaatatttgaacgttccgagtcgatttgtgagtacaaaatcggcacaccgattgccaatgcgagaacactgaaaagtgcgacggagcaacagccaatggccaaaagatggaaatggtcccagcagcaatcattcgtcgtttgttcttttggcatagattcggcgatatttggacgttgctgcttcattctgcggaattgtcgtgataattaagtgcggcggcgaaatgttttagccgcttcttttaagcgaatgtttccgccgtcattcgtttcggaatccggatgataagccggtgattagcgtggtgcattcctcattcaacaatgatctaccgctaatgctttctcaaccgggcatttg

SEQ ID NO: 40642 - DNA, 814 bp, Heterodera glycines
aggggaggggcggaaggaaggtgggggggggggagagaaaagggaggaaaagagggggagaggcattgggaaagcaataaaaaggcgaaagacaaaaagagggtgcccaaagacacacccaacaaataaataaatgtacacttgtaaatgtacgacgagtgggggagggagggatcagcagaacaaagtcaaagtcaatgtcatccctcccctcgagcaacaacaacacatccaccgaagtgattgtgagagcaaaggattgggggcggggggaggaaggcacaaggacaccctttgcccccccccaatcggcgacccccgcggggtgcgcgaacaaaatgaaactgaatgaaataaacaggaggaggaggaggagggagggcagggtttgattcagcaacaccaatcgagcaactgaaattggacagattggcaaattctttttgttgtaattggattagccaacaacggcccggccgatgggggcagagaaatgaatggggggggggcaaaagacagaaaaaccgaaagatcaaaaagcatttcaaaatcaatcccgaggattcggaagattgggttcatctaatgacaaaaatgtgtttaggaggcgaattttttacacataaacaaaagatggcatagagtaagaaaattgagcaaacaaaaatcgaatggaaggaaagaaagaaatgataagataaaagggagggaacgatatcaaaattaacggatcgaaaaggaacaaaaaaaagggggaaaatgggaaacgaatgaaagtcatcggaataaaatgaaaaatgggggaggaataaat

SEQ ID NO: 40643 - DNA, 1390 bp, Heterodera glycines
acgaggccgcgaagcggccgagtgagtaccttgggcgcagaaaaattattaaggaggagggttcattatttatttatttttttacaaaattaattcataagtatttttacagaaactgctctgaaacgcaccaaaatttatttacaagttgaataaggcactctgactcttatattatcaaaaagggagatgaataaatattttaaaaatttttaattcctttttaaacatgccaaaaagtttaggcttaactttttttatataaactgatcagaagcgcaccagattttgcaagggcatcaaaaagacaaggaaaagcaccgctatgatgctaacaccagtaactcttaatttaaaaatttttattaatttttaaaacttcactattttaaattttttatagatttttaaatgtttggattttttttggcttaccaaaacttcatcgaacctggttctttctattctctttcaaatcgcccccaaatttttttttacagcttaactaggccctattaagcttatttccagaaaatctcgcatgaattctcatttttaaattttttatagatttttaaatgtttggatttttttttggcttaacaaaacttcatcgaacctggttctttctattctctttcaaatcgccccaaattttttttacagcttaactaggtcctattaagcttatttccagaaaatctcgcatgaattctcatttttaaattttttatagatttttaaatgtttgcattttttttggcttaccaaaacttcatcgaacctggttctttctattctctttcaaatcgccccaaattttttttacagcttaactaggcccaattaagcttatttccagaaaatctcgcatgaattctcatttttaaattttttatagatttttaaatatttggattttttttggcttaccaaaacttcatcgaacctggttctttctattctctttcaaatcgccccaaattttttttacagcttaactaggccctattaagcttatttccagaaaatctcgcatgaattctcatttttaaattttttatagatctttaaatgtttggatttttttttggcttaacaaaacttcatcgaacctggttctttctattctctttcaaatcgccccaaattttttttacagcttaactaggcccaattaagcttatttccagaaaatctcgcatgaattctcatttttaaattttttatagatttttaaatatttggattttttttggcttaccaaaacttcatcgaacctggttctttctattctctttcaatcgccccaaattttttttacagcttaactaggccctattaagcttatttccagaaaatctcgcatgaattctcatttttaaatttt

SEQ ID NO: 40644 - DNA, 696 bp, Heterodera glycines
atttttattaccattttcaagtgcaattccattggtgagtcaattaatagcgtaattatatttaataatccaatttaattaggtgtacgatgaaatggtagttgcatttgtaaaaggacagcaagaaattccattcagtgaatattcaaagcaaaaatatgaggcaaaccttggcattgtgtattttatgataaacaattggcactgtgacaaaatagatgagaaatttaaggaatatgaacggacagaatgccaaaaatatcgcaaatatttggatattttgtacgaatatttgtacagagagtacgtcggaattccaacagccaagccaaagtttgtatttcaaaaccaaattgaaattgacggtccaataatttatgcggtgaattgtctgaccaaaatttctcagttttatttaataaaatcggtgggacaaaaatatgaatataaattaaacaaaatgttctacttggttgacaattttgaaccaaaattgttgaatgagaagagatttaattataaatttaaattaaaagatgtatcaaaaatgccaattaatgaaatgattttgcaattagcaattgaaacagcgaatgaatggcaaacaaacgaaagtttaaacggtataatcagtcaaaaatatgaagaaaatttggaagaaatgctcaaaaaagcggaagaaagagcaaaaaaaga

SEQ ID NO: 40645 - DNA, 934 bp, Heterodera glycines
agtgatggactagcgagtgatgtccgtaggaataaaagccaaggcgtggctgcgtcccatccaacaatttcctaatgcttagtgatggactagcgagtggtgtccgtaggaataaaagccaaggcgtggctgcgtcccatccaacaatttcctaatgcttagtgatggactagcgagtgatgtccgtaggaataaaagccaaggcgtggctgcgtcccatccaacaatttcctaatgcttagtgatggactagcgagtggtgtccgtaggaataaaggccaaagcgtggctgcgtcccgtccaacaatttcctaatgcttagtgatggactagcgagtgatgtccgtaggaataaaagccaaggcgtggctgcgtcccatccaacaatttcctaatgcttagtgatggactagcgagtggtgtccgtaggaataaaagccaaagcgtggctgcgtcccgtccaacaatttcctaatgcttagtgatggactagcgagtgatgtccgtaggaataaaagccaaagcgtggctgcgtcccgtccaacaatttcctaatgcttagtgatggactagcgagtggtgtccgtaggaataaaagccaaagcgtggctgcgtcccgtccaacaatttcctagtgtttagtgatggactagcgagtggtgtccgtaggaataaaagccaaggcgtggctgcgtcccgtccaacaatttcctagtgcttagtggtggactagcgagtggtgtccgtaggaataaaagccaaggcgtggctgcgtcccatccaacaatttcctaatgcttagtgatggactagcgagtggtgtccgtaagaataaaagccaaagcgtggctgcgtcccgtccacaatttcctagtgcttagtgatggactagcgagaggtgtccgtaggaataaagccaggcgtggctgcgtcc

SEQ ID NO: 40646 - DNA, 958 bp, Heterodera glycines
  unsure (1)..(958): unsure at all n locations
tctccaagcgtgttcgcgaatttaactgaccacctgttcacctcccccccccccatgtgcgcgaaatcctctcacataacaccggtacagacccccatgtgtgcgaaaatttcgcgcactacgacggtcccgaccaatcctcctagaccccaccgacttccctcccaaactcttagtgcacgaaaatttcgcgcactacgacgttcccgaccaaccccccaaaccccctttgatcccgccgacacccaccccaaaccctacgcccagcgcgcgaaaccctttgatccgcgccgcaaaaacgcccaataccctgtcactagtgcgcgaaaatctcgtgcgctacgacggtgtggcagggctaactactcattctgtattcagatagaaatataaaatattaatatactataaaatttaaaagttcaatgtgatgactatataattatttttatcttgcttctcttttaataaattaacaatatttttatttttttaaataaatttttcgtaaatcaaatttacataactattaaaacaataaggttaattaattattaattgaattatttttttgtcttaattatcttttccttaggtttctaattatccgtgttaaaatattttccaagatcacagatcaattcaattaggaaaaactaattttgatatattttcttaaattttattcctaaaaatatatagttttttgatctctttattaaaaaaaattcaactatacttttagctttatttgttctttggattggtttctaatcatcattatattaattgtatctaaagaatttcaggaacaaagcaatgaaaaacatcaaaatgattattccaaaaaaatgaaatttctaaaatgaagatgctggcgcattatggagcgaatatcgctagttgcatactagatggataaaagaataattaggaaacccantattaatgaaataat

SEQ ID NO: 40647 - DNA, 803 bp, Heterodera glycines
tgtagaatagaatggccattgctctccgcgcccctctctcctggtgggaacatttgtatggtacaaaatttctcgcaaaaaagagatagccatttttctggcatagagaataaatttaaaaattccctgtagaatagaatggccattgctctccgcgcccctctgcccatgctgggaacatttgtatggtacaaaatttctcgcaaaaaagagatagccatttttctggcatagagaataaatttaaaaattccctgtagaatagaatggccattgctctccgcgcccctctgcccatgctgggaacatttgtatggtacaaaatttctcgcaaaaaagagatagccatttttctggcatagagaataaatttaaaaattccctgtagaatagaatggccattgctctccgcgcccctctgcccatgctgggaacatttgtatggtacaaaatttctcgcaaaaaagagatagccatttttctggcatagagaataaatttaaaaattccctgtagaatagaatggccattgctctccgcgcccctctgcccatgctgggaacatttgtatggtacaaaatttctcgcaaaaaagagatagccatttttctgggatagagaataaatttaaaaattccctgtagaataaaatggccattgctctccgcgcccctctgcccatgctgggaacatttgtatggtacaaaatttctcgcaaaaaagagatagcctttttctggcatagagaataaatttaaaaattccctgtaaatagaatggccaatgctttccccccccctctg

SEQ ID NO: 40648 - DNA, 1482 bp, Heterodera glycines
gttcaaaagaaccaggcggcacatagccatagtcattgtttgtgaccagcgttcgtccttcgacccgttgcaacaatgctgatgcttcatcgtcagcttggccggtcaacggcacaacgccagaacgtctcctcatgaaaaagataggatggaccgttatattttagaaaatgcatatatactgtaatttcctatttgcccgaattggcaattaaataatatactgtaatttcctatttgcccgaattggcaattaaataatatactgtaatttcctatttgcccgaattaacagttaaataatatactgtaatttcctatttgcccgaattaacagttaaataatataatgcttatttatctattacttgatcaaccgttgttgcatgttgagctgttggtaggaggccccgacgctttgcgcatcgacgctaccgtagcgaggaggtggtaccgtaacctgctggaccaccgccgccactgcgtcttgggcctcttttgcagcctcgcgactgtccgcttcctttaataataatcaaaaataaatataaattaatttgcttaaatcaacaacaaacctttctgcttaaatagcccacctaaaaatttatataaatttttaatttacataatttttttccagttttccaacccaagcaagctccaacaacgaaaaaaacacgaaagtcatgcaggaaagcaaccagatgtcgattgccttaacatagctgacctttggcaaatttctgaaaattttcttattaaaagcaaaattttcctgccccatttgactgcactgcatttttgacctaccgaattatgttgccaaactaaaaattcaaatggaattatattaaattgtatggttaattaattaatacatttatttatttgaatccattaattaagataatataacctggaaggtcatcgctgaaagaaatgtattaaatattaaaatgatgaaacataaaataaatttcccacccaaaagtgaattaacaccgagcattgttcgggccggaatggcctgtgtaccgagcacaaaagaaatccatgctgaatttttttttttttttgcgtgaaaactaatggaaaaaatcatataaattttaacgaacagatgaaaatggtgaggtaggtaggtaagtaggcctgcagaatgtacctgattgtgggttttcaaaatttattttatttatcattttcattggcaaagtgtgccaattatttttgcattttaccatccagcacgacgggagaaatgaaatttcatggtcaattcatgccaatagccggctgggtagggctgaaaatatcaactgtattttttgacttgaaaatttttagataattttttagggtagtcccgtaacctgaaaaaattttaggcactaggaagcggtgacttttttttttttgatcttcggtccatccgcaggaagtcaaaattataagcgcatatttagaaattttcttcaa

SEQ ID NO: 40649 - DNA, 876 bp, Heterodera glycines
atttcggggggggggggggatcttagaattttctgagtcatataattctggattttttaaataaatttacaatttcttaaattttttgctttaaaatcgctctttttgttgcgcggtttttcccaaaaaaactttttgggaacaatgggggcggggtcaggcggtgccgataatccacacaacaattagaaaaataatttatcaaaatacattaatttatttaaaataaagtaccgaaaaaagacagtaaatcccaaccgggactcaagaccgaggactctcgagcttcactacccgctagcaggaagatgtatcaaaatagcatggtagtcgtcaagtaaaataattgtttttatttggcagagaagtgctgtatcccaaaaaataaaaatttatttcctttatcattttaattggcgtatttagcgttaattgttctcactcgcactcccaattatcggttaattgcccctcttccgactaattagacagacactctttcagtttgacgacgacagcttcttggtattaatggaccactaaacactgctgggtggcacagttgttttatagcattgtcagtttgccgaagcactctttctttcttgtgataacagctaaaagtgccggtgccatttggacgataaaaatggattccgaaatttttgtaattaaaatatttctttttgaagttttttgtctccaaattcttcaataggataatacgcgaattcctcaaaatctccaagcatagcttcttgtgaatggtttcagcttggttaatctgttgtcatatgcatataattttcaaaaaaatttttaaattaatttaaagaaaaatattttaaaaagatggaattgctgcttttccgttat

SEQ ID NO: 40650 - DNA, 1379 bp, Heterodera glycines
ttattaaagtaaaaaagtcttaataatttattgtgtatacttaggattggccacatatgcctttattacggtaacaaataaatgatttaactctcttttaatacagcgtgcgagatcggcatcgcgccattagatcgaagaaatggagagtgatgtgaccgatggtctgtgggataaaatggtgctgtgtctgcgcagcattgtggcgttgccgccgaatttggacaggcaaagtgtgagttgtggaaatttatatgacatttttatatttgtaaatttgttcaaatttgattataaaaataaagacaatttttccgatgccatttcgttttaattgcataatatttcattgaagttagcataaattaagcatacacctcaatttcggcactataatgcttattttttgatttttaaaatttcaaggttaaataattacggctttttaaacctccgtaattgctgaatacgggtttcccgtaaatgacgcctgactgctccccttaataatttaaaattcaaaatgattgaaaaatattaacgaaaatttaatgcaggtttatccgaactcttcgtcatcgattggcttggccctgatcgtcagcaatttccgatttgaggaccgtgataacagggatggcacaaacgtcgatgagcagaatttgcgttcaaaatcgattccaaccttttttaaatggttttctatttttgatctatgagatatatttacccaatttttaagaaaaataagggttatagtggaaaatttttgaaaatttgtttggatttgttaactgattttgcctaattcggagatgattttttgataacaattttccatttcataggggtgtatttttctgaaatttttcggatcggttcttaggggggtgtatttttcgtgtttatggcatattggttattaattttgttgagaattgctgaagatattgttacaatcttttcttgatgacagaaacagcactgaatagcactgatgggtcatatcggcgcttaaatcgaaaagacaacaaatgatgacttgccaatatgagtagctgatctaataaaagtcacgaatagtgagaaattctcggatctcgctaatttactagttaattgaaattgcataataagaagagacttactttgtcagcattcataactcatttgatgggttgacgaaaagtgcagccctatttattgtttcgtaactgattggataatgatctcctaactttccggcactgattgatcgatgtgtcgtatcatcgcaatttacctctatcatatgtacatacacaatgacaaagcggcaatcgtaaagaatgagggtccctaatttaactttttattttaggcttaaaattcagtttccg

SEQ ID NO: 40651 - DNA, 1340 bp, Heterodera glycines
  unsure (1)..(1340): unsure at all n locations
atttttgagaattttcnnatttcttaggggtgtatttttgaaaaaattttaggtcaattcttatgggtatatttttcgttnttattgcatttttgtcaataattttgggcaaacgccaaaatagttgaaatagtttttttaaatttttttatgttttaggttctaaaaataaaaaactagaaaataggcactaataactcgaaaagtagcttaaaaacaaccgaaaaaaacatattttcgtgagtttcaggccataggaagtccagaaaaaaaaggtaaaaaactaaaaattggagtcctattaataagaaatttgtttaattaattattattcattaaaaaatgagtgcataattataataataataattaatttaaatatttactataattgatattttatgttcgccccattaatattttttaggttcgaccagcaggcagcgaacaattgtaaatttcttcgatttgctaacagagcattgcgaaaatatttgctctaccttatatcgaagaaatttttaagagaaaaagaaggtttttaaaatgtttaaaatgccaaatatttaataaaaataataaatgttcactttaaagataatagtatagtgaaacaatttaaacaccaaattttaatgatttaaaactttttgcggattataaagattttaataaaattcaaataattttttagggttatacagctccaatttatagcatagaaaattgccaaaatacgttttgaaaatagaaaatagggttagtccccctaaacccgtccgatttggaaattgcaaatgtggtcgattgcactccaaaatgctagatgtttttaaaattaatttctaagagatttttgttttttgaaaatttctgttacctatcttttctaatttttatgactagagctcccaaaagtatgcatataaaatcgcaaaatatgcaccaaaaattgcaaaatatgcatataaattttttcaaattgagaacattccaaaattcttcaaattcattgcatttatgctagaatctcgaaaaataactaattataatattacaataatttttagaagaaaaaatgtaaaataaagctaaagtttattaattttgaagaaattgagtaaaaaaacgagatttttccaggtttggacttatttttcgtcataaattttcatttaaaaaaagtttaaaatctgtaggaagcagtttaaataaatattggctaaaatctttttccatccattttactaattcattcgcattctcttcaatttctgggcatttttcttaaganaaattaattaatanaattttcnaaattttaattgtttgatgaattt

SEQ ID NO: 40652 - DNA, 986 bp, Heterodera glycines
tcaataaaaatacattcacgtgcgaaaatgggttgacaaagttattggggaaaaaaagactttacaaaataatacccctgggagaagggagtgggaaacatgatttcaaaattttcaattttttctagtctaatctactcaaaccggttcagaattcaataaaaataacattcacggtgcgaaaaatggggtttgacaagtttattttgaaaaaaagactttacaaaataatacccctgggagaagggagtgggaaacatgatttcaaaattttcaattttttctagtctaatctactcaaaacggttcagaattcaataaaaataacattcacggtgcgaaaaatggggtttgaaaagtttattggggaaaaaaagactttacaaaataatacccctgggagaagggagtgggaaacatgatttcaaaattttcaattttttctagtctaatctactcaaaacggttcagaattcaataaaaataacattcacggtgcgaaaaatggggtatgaaaagtttattggggaaaaaaagactttacaaaataatacccctgggagaagggagtgggaaacatgatttcaaaattttcaattttttctagtctaatctactcaaaacggctcagaattcaataaaaataacattcacggtgcgaaaaatggggtttgacaagtttattggggaaaaaagactttacaaaataatacccctgggagaagggagtgggaaacatgatttcaaaattttcaattttttctagtctaatctactcaaaacggttcagaattcaataaaaataacattcacggtgcgaaaaatggggtttgacaagtttattggggaaaaaaagactttacaaaataatacccctgggagaagggagtgggaaacatgatttcaaaattttcaattttttctagtctactctactcaaaacggttcagaattcaataaaaataacattcacggtgcgaaaaatg

SEQ ID NO: 40653 - DNA, 847 bp, Heterodera glycines
  unsure (1)..(847): unsure at all n locations
tttggggtaatagtgaagctggtgccccccccccccctttttggaataaaaatattttttcttctgattgtgaaaacacgttttatgggttttgagggttactgatcacgaacatgacattcttttcgaccgattccgaatcccggatctgaattcgaacaaaaaattgaaaactcaaatttttcgattttccatgtttttgttgaaaaatggtttaaaagatcttttattgaagcaataatgactttcacatcgtttccatatatttaaacaaagtttgaaccaaaatgtgaaaatttgagttttcgactttttgttcgaattcaagtccgggattcggaattggtcgaaataggtgccggattcgtgatcagcgaccccaaaagcctttggaaacacgttttcatgacaaacaaaaaatttttcgaaaaagggggggggggggacaaagcacactattaccaaattttgtaccgtgtatattatcttctccatatgtaccgtatattgtaattttgttcaatgagtactgtatgtttaattttgttctatgacaattttggacaaaagttaacaatctgttaacaaattttcattctttttggaggaggattaacaaattttcaaaaattttcctccgcggcgcctttaccaaaaaacaatttttcttaaaaattggctcaaaacgggcaaaatttggtcattttttggacaaaatctgtgcacaaattacattcaaaagctggacttttttgtaagaaaactgcttttattttacccgcantattatagaagtgaaatcctaacatttttttcattgtttatcggtcaattatgactagaaatt

SEQ ID NO: 40654 - DNA, 1282 bp, Heterodera glycines
  unsure (1)..(1282): unsure at all n locations
aaataaacttttctactcaattattttattaattaattcaattaattttnatcaaaatgacattggtttatttattaattaaaaatacacttaaataataatgcttcaatttaaacagaaaaatntagagttataaaaataaaaaatatattttaaatagcctaaaacggaattgcataatatttacaaacaaattattaaaaaaatctttatatttggtaatctacttaacaatggtttaaaatttaataaatagttagaaatataaaaaatcatgaaaattcctcattagttcttgaaatttctattcaattaattttaccaattaactcaattaatattttataaaaatggaatttttatcttttttattaaaaaaacctaaagaaaatacattttaataataatgattaagtttagttcattacaagcaaaactcagttggtaaatttaattgtttaaattaaattcaattataattcataataaaaaaatcaaacaattaattcctacatcgcgacaagtaattttaatatattaaaaataaggacatataaataaaaattagtcagttaaaaattaaagaaaaattattaggtaaaattttataatttttcgttaataaatgtattatggaattcaatcctcaattttttatgaaaatttgaaagtaaagtttttaaaatatgtaaaaatgaatttttgaaaaaaacctacttatttgattatttattaacaagacataattttattttgaatttaaaggaaccaagcaagtttatgtgcggataataattaaataattcagcacttaatgaattgaaaagcaaatatttattaatgaaagtcaaaatattatcttatcaaataaaactgcataatgaactcaataaaatatatttatttcagttatttaaatgtttataaattttcaatacattaaaaagcaataaatataaatatatttctttctttttaaaacaaagccaaattgcattcaaattattataaatttttaacaaaaatttgagaaaaaataataacaattgtttaacatctatatttttattaaagagatttatttaaaataaataactacaaattttaatttattagcaaaaaagacaacgataaatacacaataaaatgaaacaataatatgtactgaaataataattaattttttaatcaatttcaaattacattagatataatttatttatttaattaaacagactgatgacaataaatttttatattcaagcatattattcaaatagta

SEQ ID NO: 40655 - DNA, 1194 bp, Heterodera glycines
  unsure (1)..(1194): unsure at all n locations
tcatcgcaaaaaactcattacaaattcattcatttctgaccatcgtntagcaccaaccgccaccattgatggaatgcacatccaaaagtgattcatccccaatccaatccaatgaatttgactgttatcgctgttagcgatcagcttacccccctaccccttagctaattgttgattcgaatttctttttgctcggctttcatgggggggggattggacaatttacgcgacgtgtcacagcgccacccaccgcccgcccatcccgcccatggggttgtgttggggacgggggacgagtgggatgtatgcggttcccgcccattagccgcgctgcttcgccgcagggaccgcccatttgggcactgtcggccaccgcatttaagcgctgtccaatcagtgaaaaatcagtcatttccaaaatttcattctgctcctaaccaaaaagcattcaactgacaaataagctggtggaaggaaataggaaaagccaaacaaaaacatttttgaaaatcagtcaacgattaaaaaattttaaataatttttttcgaaaaccgtttcaattttttgtatttcacttaaatttagaaatcaaaaaaatttttggtttaaaagccaatattttgatttcattgttttttaggaagtgattttttcctctatttctgatcccaaatctcattcttcaaagcaacccgtcccactctcgaccgtctaacatgaacaagtggtctgcacttgtgtaagttttgtggggaggggtggggcttgaaccatggccaaatattaactctctgttcactttcagtctgttgatcgcgctgatcagcgcgctggacagcgctgttgttcgacaacagcgcgccgccgacgctgacgcatcgaaaccggaaccgaacaacgaaaagccaggcaaacttaaatgaatttaataaaaaataataaattagtaatcgaataattttattcaggaactgtggactcggacaaaataaagccggtcaaaattaaagcagggctcggatcgtaccaagtaactttccaagtacaggcgtgccaatttccaagtacataacaggggaaatttgttaaatccaattacacataaagatttanacaaaaaataaataaaaaaggataattttcctaaaattctatttttcccagaacgattttatccccaatattattatttc

SEQ ID NO: 40656 - DNA, 712 bp, Heterodera glycines
  unsure (1)..(712): unsure at all n locations
gaaaatccagaaaaattagggtcgtcgctactattccgaaaatgtggttggaattcatgtgagtgttgagcagaaaaagagatagacgttttttcaaaattttcagagccaaactcgcccagaaagaaaatccagaaaaattagggtcgtcgctactattccgaaaatgtggttggaattcatgtgagtgttgagcagaaaaagagatagacgttttttcaaaattttcggagccaaactcgcccagaaagaaaatccagaaaaattagggtcgtcgctattattccgaaaatgtggttggagttcatttgagtgttgagcagaaaaagagatagacgttttttcaaaattttcagagccaaactcgcccagaaagaaaatccagaaaaattagggtcgtcgctactattccgaaaatgtggttggaattcatgtgagtgttgagcagaaaaagagatagacgttttttcaaaattttcagagccaaactcgcccagaaagaaaatccagaaaaattagggtcgtcgctactattccgaaaatgtggttgggattcatgtgagtgttgagcagaaaaagagatagacgttttttcaaaattttcagagccaaactcgcccagaaagaaatccagaaaattagggtcgtcgctactattccganatgtggttggattcatttgagtgtgagcagaaaagagatagacgttttt

SEQ ID NO: 40657 - DNA, 722 bp, Heterodera glycines
atgttagaaatttaaaaaattatgtaatttttattttcaaataaattataaaaaattttttaaaaagttacaaatggtttaaaaattgatctaaactttaaataattttctttcatctcacatcagcatttactttaaaattattatttaaacttaacgcttcaattaagtttttttaacaatatctcagaactctttaaaatagagaaaataatttttaaataaaagtattgcaaaaatttaaatatttaaagttttattattaaacttttgtatcggattttcgctcctaccgtctttatcacagtggttattttcctgttctcaattcaatctatctttcactgcattggtctccgtctccaactctccaaaaccgttttcgtttttcaactctacctctccctctcatctccaacacgccttcaactcagtccatcgctgtctccatcgccgtttttgtttctcaagcgtctcaatttggtctccctctccaactcagtccgactccttcaccgtctccaaaattgtttccgtttttcaactctccctctccctctccctctccccctccctctccctctccctctccctctcctttcccgtttcaaaaaatctttcaaataattttaatttgtaaatggctggatatgtatgaattaataaaaaggtatctctagaaatgatttttacaattcaaaataaaagaaaaggagaatcaa

SEQ ID NO: 40658 - DNA, 1024 bp, Heterodera glycines
  unsure (1)..(1024): unsure at all n locations
tttctattttncgggggatcgctttcacgccgaacccatgtccgggggagagattatttatttgcgcagtggaacaaaaagaaaagcgcaatttcctcctataaaaataacaaattaatttaaagggagggaaacatttgtcaattaagcgtctaatgagtacactaattctttccctctcagaggcgggaaaatcagaaaatcaaaaacattcatgcggaaatcaaattgcactttaattggcctaaaatggttgtgcaaaaagaaattgtaacaattagtgggtggagtggatggtcgacgaatgagtgggtgggcgggctgctggactcggtttggttggcttgcgtttgctgtcccaaaccaatgacattttacccttttcaatgtttgtaacaattaaaaaactaattgacattaattgcaatgtttgtttattctgtttcttccaattttcaacaataaacgccaaaaatttatgttttgtgcgtcaatgaataaatacataaatatggacttgaccagcagttcaacaaaatgattgacaattgcataaacaaacactcgaacaatttctgatgcaataaaattgatttgagcattaattgcgatcgtttcgaaggacatttgggtaatcggcggagaattgaacaacaaaaagtgacaaggaaggcaaaatagcattaggaaggattctctgatttgaagacagttaaaacgactcggccattgcgaagtgaatgagttcagggcactcaattgggctaattagccccgattgtttttgcttaattactcctccatccatcgaaatttttctgtttaatcgctgtcccattcgtcctcatctgctgatgattcccgctgttcttgcttttcatctccgctcctcctttgctgctgatgttttgggggttcggggggaggtgccgtcggacgaaacgttttttggcccatttttgcctgaggggccaatggtggtggcggtttcggccgatgcagcgaagagcagaatcttgaagaa

SEQ ID NO: 40659 - DNA, 1172 bp, Heterodera glycines
  unsure (1)..(1172): unsure at all n locations
aagtgtccagaaaattaattttctgggagcccgccataaatggtgattttggttgcaaattattttaatgtttaaaattttgcgattaattttttntaatttgtcaattaatttaaataaagaaattgcaaaaaaaaacaattatagaatttatcaaatatttattcaaaatggaaaacactcacgcaaggaantgggaagaatttataggaaaaattaaacaaaagcttggcgtgactgaaagaacaattgaaaaatgggccaagaaaattaccaacatcaaaatatttcaaaagttatcttaatatttataacattttttaataattaaatttcagagcagaaggtttacacaattgtcgaaaaatggaactgaataagtaatattatcagctgaagaatgaaaataaaaatctcatcgaccggaaaattgctgaagagtagagtgcagcgggaccgggacctaaacacggacaactgagtacaactgagtaccaaggtcccggttttgaccagttttgaccgggaccgggatgttcccggcttttttcccggttttcccagccaaaaattcccgggttttcaacccgaaaaggtcccggtcccggttaagcccaaaattcccggtcccgctgcactctactgaaagtgaacattcaaccaaggtcattaagaaaatgcaaatcggaatttaaagaaatgcatatttcatttgaatacgatcaatggcaaaaaaatgccaatttgtcgtgatgaaagaaattgcaacgaaaaaatataacaaaaattcaaattttaaatatgaataatcataattcccttttttagattgctttctttaattaatgaaaaatctatttgggttttttcaccaactaaactaatcacgccctttcaaccttttagcacccttttgtagctgtttaatttgtcaataaatttggtagaaataaaataaaataaaatcaaataaatcatgaaacgaatcagtcagaaggtgggcataaaggcaatgaaatgcataaaatctgatcaaattcatttacattcggtggaatctttgatcagatgccatcagatgagaacaattgttttatttgtgataataaatatttaaaacccccttaattattgttagctcatattaattactccccaattcgttgagaaaa

SEQ ID NO: 40660 - DNA, 936 bp, Heterodera glycines
  unsure (1)..(936): unsure at all n locations
tgatttgctccactaattcctactaatacagacaacagaattttattattttgttgtttttgcatttacaacacgaattgtttcatccacaatatttattcactgctatttcagtctttaaaaggcatagcaaattgcatcatagtgataaaccaacacacgttaaaactaaatcttggcgtcaaattttaattcgaaataattcatttcatttgattcttttaaaaatcgcctctatcggtttatgcaataatcgataaatcgcaatttatattctagagaaattacaataaaactacctaaaaaacatgccatcattattaaaatatggttatttttttaaacaccgtgctcattaagtccatgctgaatatgtttttgattaaaaatatgttttaacagcaagctccatttccggggaaaaataaaataaaagaaagaacggatttgaatttttattctattttagaaatttaagcattattcgctgccaccaatgctatgttgtgatttgctccactaattcctactaatacagacaatagaattttattattttgttgtttttgcatttacaacacgaattgtttcatccacaatatttattcactgctatttcagtctttaaaaggcatagcaaattgcatcatagtgataaaccaacacacgttaaaactaaatcttggcgtcaaattttaattcgaaataattcatttcatttgattcttttaaaaatcgcctctatcggtttatgcaataatcgataaatcgcaatttatattctagagaaattacaataaaactacctaaaaacatgccatcattattanaatatggttatttttttaacaccgtgctcattaagtcatgctgaatatgtttttgattaaaatatgttttaacagcaagctccatttccgggggaaaataaaataa

SEQ ID NO: 40661 - DNA, 1006 bp, Heterodera glycines
taattttatttactttaccatttttatctatattttgctattttacaaagaatgacacagctaagaaatacatattttgatagatattccatcaaaaccgaaatcacaatttaaaattttatttccagaatcaaatgctaatatgaacttttcaacaattgtttaagatgccctaaaaattttataggaacaatagcaatttaaagtgttcttcatttttgggaagccaatgatgcatgtacacttctaacatactgtatccggtctgccccatatacattgtattggaaagtccaactggtaaattggcgtttctttccgagagggcgcttacgcgtaaaaacacgaagctgtggtaggccggcatggcagtgattggcccaacttcgtcttggatgatttttgccaaggtgccaagctcatccgctttttggttttccctgaagaaataatacatttttttcaaattatcaagacctgataatttcgacaatttttttttggttcatggaaaaccaatgtgccgcttgttgcgcccgttcgttgctctcaagttggtaacgcatcatgaaaaagttaattccatggtaaagaggcactcggtagcaacagaattctgggcacccgtaccaaatgttttccattcgatctacgtcccgcgtaaccaatacattgtaaattacactgaaatttttaaagaactatcaaccaaaaaaaaatttttttacaaagattaaaacgataaaaagagctaaaaataatataaaaatgttgatcaattaactaattcgaaatacatcgaaagcgcatgcaaaaaggccaggaaacccgaaattaaaacaacaaaccccagattaaaagactaaaaacccggatcatttactcagtaaataagcccatcttattgcttaattattacttcggcggaccacgagaagatatgtctgagttgattaaatgtgcagtccggttatatgtataaggatctgtgatttgatcgatgccc

SEQ ID NO: 40662 - DNA, 1014 bp, Heterodera glycines
cgaaatcctacgacaactctgaaagacataaatttggagcttttagaagactcaaagtaatcaaagcaaaaccctcttcagacactgaccaagaggatgaatcaaatgatgatgaagaagaaaacgaagacgaagaaattgaagaagaagatgaagaagaaaaagaatacgacagtgatcaggaagacgattcaccggaattgacctcaaatgaccaaacaaaccgtaaacaaacaccctttgtcaattatcgatcgagaataaaacttccaccccaaactctaacacacttctcaggaaaattctcccaatggcccagcttttgggacgatttcaaatcctcagtccacaatgacccaaacttagagaacatacaaaaactgaaatacttgcgaggacttttacatgacgaaccataccgaattgtgtccccttaccccctcacaaacaaaaattatcccataatcgtcaaattactcaaatcccgatacggtaatccacaattgatcagagaaaatctgcacagcgaattaagaaatttaagaaaaccaaatgaatccacaagcgaactgagacgatttatcctattcattgaccgaattatcctacaattacaatcccaaggcgaagaaataaaccatccccaaatcaagcaatccattgagactaaactccccttcaatatccgactaaaactgagagaaaaattcaaactttactcgacaaaagaattaatgaattttctcaattcacacactcaagctcgtgaagacatagaacgaatggaagattcaaacagacaaataagaaatttcacccctcaccggccacctcaaaacagaccacaaaggcaatcatacccaaactattcccaaccccagctaaaagcaaaccaccgaaaaccatcaaaatctgcctctctcgccctatcccatcacttctgcattaacaccaaatcaaacctgtccgtttgcagaatttaaccaaaacatcgcaaccccaacacaaacaaaa

SEQ ID NO: 40663 - DNA, 1240 bp, Heterodera glycines
atacatttagtgtcttatttcatgaaattatattaatttaattttaaataaagaggcaaatttttacagaaaataaatagacgctgactaattagctaacatttataaagaaagtagaaatttgattaaatgcatatacaatatacaaaatattacttttttaaatttgtataaagttcctattttgtctttgactttgcttttttttccatttatttcaatcggctagtgctttaaggttttgtctttgactttgcttttttttccatttatttcaatcggctagtgctttaaggttttgtctttgactttgcttttttgtccatttatttcaatcggctagtgctttaaggttttgtgttttgactttgcttttttttccatttatttcaatcggctagtgctttaaggttttgtctttgactttgcttcggctagtgctttaaggttttgtctttgactttgcttttttttccatttatttcaatcggctagtgctttaaggttttgtctttgactttgcttcggctagtgctttaaggttttgtctttgactttgctttttttccatttatttcaatcggctagtgctttaaggttttgtctttgactttgcttttttgtccatttatttcaatcggctagtgctttaaggttttgtctttgactttgcttttttttccatttatttcaatcggctagtgctttaaggttttgtgttttgactttgcttttttttccatttattccaatcgaccacgttaattcattctctatacatttagtgtcttatttcatgaaattatattaatttaattttaaataaagaggcaaatttttacagaaaataaatagacgctgactaattagctaacatttataaagaaagtagaaatttgattaaatgcatatacaatatacaaaatattacttttttaaatttgtataaagttcctattttgtctttgactttgcttttttttccatttatttcaatcggctagtgctttaaggttttgtctttgactttgcttttttttccatttatttcaatcggctagtgctttaaggttttgtctttgactttgcttttttgtccatttatttcaatcggctagtgctttaaggttttgtgttttgactttgcttttttttccatttatttcaatcggctagtgctttaaggttttgtctttgactttgcttcggctagtgctttaaggttttgtctctgactttg

SEQ ID NO: 40664 - DNA, 1227 bp, Heterodera glycines
ttggatatgctgcgcttcaacaaattaggcattggctctgattgggtgtcggagtacggcgacccggacaatgccacatacttttcgtacatttacaagtgcaaaaagcaatcattgggattttgacaatacgtgttgtcctgcccctctctctcttcaggtattcgccgcttcagcagctcagcgtcactcccgggaagcagtggccggcgactcttttgctctcggctgaccatgacgtgggtttgcccatgctttaatggcatggactcgggaatatttacgtgagattgttttcaccgggatttgagaccgagaaatcgaaccgagagcccaattccgagaagttctcgactcaaaagccgagagactctcataaccctcactattctgctgcttttttcaggatcttgttgatgtgtctcacacactcaaatatacggcacaactgtatcatttgttgttcaccaatgctgagagttggcagcgcaaccccgtggtggcaaagattttggtggaccaagggcacgcgttcaccggcacaccgaccgagaaaaaagtgaagcaccaattgcactaacaaaagccccattttgacattattatctttttcagatcaaagagaaggttgacatttacactttcatcgcgcgagcgcttgggctgaaatggaccgaatgattaagaacaaatccatctgtgtgatcactgatcagatcattatcgatgcaatatttttaggattttcttttcataaatttgcattccataaaattttgggacaactattcaaaagggaaaattccaataaattcaaggacagttaaaaaaattttatcatatgcgatgaaaaacaattaaattttatccaaattttttatatttttcgccggaatgaatttttaccaataattttttatttctgttggtcattcatttcaccgcatatgcacttttttgcgccgagctttttccaattttggagcaatggcgacgatctttttttttacttttaactccaccctttgtggcctttttctgaaaaactttttgggaatatgggggaggagatccggcgatgccgataggcgccagcgggaaaaattataaatttgaagaatttgttaacagattttgtccaaaattgatcaatttttaacgccttttgggtgtgtttttgaacaatattttaaaaaatagaaagagaggttccggcggtactgatag

SEQ ID NO: 40665 - DNA, 954 bp, Heterodera glycines
  unsure (1)..(954): unsure at all n locations
gagtataatgtgtaaaatatagccgtaagccgatgtcaaaaaccgaaatcngaattacaaatttcagaaaaatctcggtaatcggcatgccaaccccccaaataataccgggaattagaagatgtgacaatattattagtgttttttataatgagaccgctaattggttcgggagcccgaaaaattgctcaagcgagaataaaagaaacactctcgcaaattttcaaaggtaattagcatgccaacccccaataatatcgggaaccgaaattcaggaattcgaagatggactaattattactaacattttataatgagaccgctaattactccgtgagcccgaaaatttatcaagtcatgaataaaagaaacactctcgcaaattttcaaaggtaattagcatgccaacccccaataatatcgggaaccgaaattcgggaattcgaagatggactaattattactaacattttataatgagaccgctaattactccgtgagcccgaaaatttatcaagtcatgaataaaagaaacactctcgcaaattttcaaaggtaattagcatgccaacccccaataatatcgggaaccgaaattcgggaattcgaagatggactaattattactaacattttataatgagaccgctaattactccgggagcccgaaaatttatcacgtcatgaataaaagaaacactctcgcaataaatctctaaagtgtttgttataagcaaatgaaatgcataaaatggaaaggaaagagattttttgggagagagaaattcattatgggcggcaccttggatattattcaatcagcacttccatttttctagaatttatccttgaatgaatgaatgatgtaaagatagggaaaacaattggttttagtggggagggggaggggtggagaaattcactcattcctcgccaacaaacaaattccttaat

SEQ ID NO: 40666 - DNA, 676 bp, Heterodera glycines
tggattttaatcaaaatttcaaagtccgtttctgatgaatccgtttaataatcggcaataatcagctccaacaaactacaagtaaacaaggaaaataaactgaaatatttgttattagaccaaaacataatgtacggtggattttaatcaaaatttcaaagtccgtttctgacggcaataatcagctccaacaaactacaagtaaacaaggaaaataaactgaaatatttgttattagaccaaaacataatctacggtggattttaatcaaaatttcaaagtccgtttctgatgaatccgtttaataatcggcaataatcagctccaacaaactacaagtaaacaaggaaaataaactgaaatatttgttattagaccaaaacataatctacggtggattttaatcaaaatttcaaagtccgtttctgatgaatccgtttaataatcggcaataatcagctccaacaaactacaagtaaacaaggaaaataaactgaaatatttgttattagaccaaaacataatctacggtggattttaatcaaaatttcaaagtccgtttctgatgaatccgtttaataatcggcaataatcagctccaacaaactacaagtaaacaaggaaaataaactgaaatgtttgttattagacctaaaacataatctacggtggattt

SEQ ID NO: 40667 - DNA, 717 bp, Heterodera glycines
gttatgagaaactgcagtagcaattcccatttactaatctttttgtaatacagtacgaacagaaatatacagtaagccactgttaataaatcaaatttattgcaaaaaatgaaaagcaaagtacaaaaatatattgtattttggtgagataattgctaatttgaggggagggaggagaagaaacattcgttttgtgctcactctcctcctgcttcacactgcttttacatatgaaataaattggatgaattaattacccgtctaattggcattaaattttgggtttgttatccgtctgagcttttcctcttcatttgtttccttattcaccggcggcaggcactgtctgatcgattagcacccgttcattgtcactcattggcacctccgttcgatcagtgccaacagtcctcccctttagccccacttttcattgtgaaatgctttatgtcgtcactgatcagctcatcactgtcatcttcttcgtcgtctccgatatcaatccgttgttgttgttgctgatcagctgcggttgttctcctgctactgctgatcaggctgcttctgcttcttctgttggtcacttcccctctgccggtgccgtcgctctccggcaccattgtcaggggtgacgtctagccaaacgacgtgccaaagatggaaaagatggacgaaactactcattgcttgatgctgtccgccactgttgctgaccgg

SEQ ID NO: 40668 - DNA, 462 bp, Heterodera glycines
aaatttgttttaaataaaaaaaaggtcattttttatacaaaattttttaccaagttgtactcaaactttcaaaaatttccccggcggcgcctatcggcaccgccggacctctccccctcccctatgttctcaaaaattttttgaaaaaatacatcgcaaaaaaggcgtaatattctcttcccaaaaatattctaaaaaatgtaaaaatgacatgaaaaaagttttgttgaaaatcattgaataattttttcaagaaaatattcaaatataccaaaaacattttttgaaatcaccttttacttggttaagaattaaaaaatttagtctagtaaaaatatttagaaaatttttattatattttttgaagaatttccgaattccgacgtttttggggtcggaattccgatttccgaaattttttggggcttcggaatgccatccctggtttacaacactgggaac

SEQ ID NO: 40669 - DNA, 1127 bp, Heterodera glycines
cccccattttaccatatttttgaaaagttgatgcaaaaatggcaaaaaatagtaaatttttggcgaaacattttgcaaaatacacccccctaattcgggatttcaaaaaagcaaaaatacacccctagaaatcgaatttttgacttcagcccccccccccgaagccaagggtctggctacgcccttgattagggtacgacgctttaactctttaatttagtcatttaaaaattgtttaattttttttggccatgaatctcgcatcattaatacatacagattcaatgtttgtacataaagaacaacgaatgtttgaataaattattgtcgctgatcgcgaatttgacatcaaaatgcttttttttttgatttaacaaatttggtaggtacgcttttgtaatttttaaaatttgaattcacggagttttcacttatcactagggatgcgacttttagtgacgaaaaatcccaaaatagttaactaaaatagtgagtaaaaatcccaaaatagtgacaaaatagtgtcaaaaagtccgaaatagtgacgaatagtgacataattttcagccaaaaattgagcaaaaataatttttattcactgattgcagttgcaaatgaggtacatttccaaattttgaggcaagaaacgcatccggttatcgcataaaattgttttgtaaatagagaaagtccgctcaacatcgcaagaagtcagaggcgcgaatttgtagaatggaattacggtggggcaaacatcacaatcaacattttttccggaaagaatttggcaaaatttggcaatttgatcaaacgagggattttttgagacaatgaaagagattttttggcggattatttctgctttctcgccggctgctttgtccaattggttgtgaacgtccgcaaaaatttccatcgattcgtttatcgacagtccatgtgcctccaattttgcaatgacagggcacaaatttcccaaagttggtgtgaatgtacgcgaggtcttgccatgttgacaaagtgaagcaccactgactttctcttatgcatgatgcatcagttgggtccaacgagttgaccaccctaaatgcgtaatcctaaaaaagcttaatcttttccatacttcc

SEQ ID NO: 40670 - DNA, 1572 bp, Heterodera glycines
  unsure (1)..(1572): unsure at all n locations
cagattccagtgggttcatgtgccaancagattccttgtgcccggggggttgttcaagctgtatttttactgggacacttattggatactcaaaggcttttcagcattaaaattcattttaattggtttttttaggcctttacttttcaaatttggtcgaaaccgctcgcggaatgcttgagaatttcgcgcatttgctccgtttccgcgggttcatccccaactcgggcaacgttcagtaagcattggcacttttcgccctttttgatgcttttcgcttttccttccaaagactttcgcggcgaagtcagccgccgttgttcacgcaaatgatcgccgattattatgaggtgacgaagaacaaatcttttttggccgagtatttgccaatggcggagaatgaattggcttggtgggaggccaacagaacggtggaagtgcagcggaacggggaaaagcattcgcttttccgatacaatgtgaaaacggaagacaaacggacaaaagctgaccaaagtgcggcatttaaggccatcaccgattgcccacggcccgagaatttcctggaggattaccaattgggcatggagtccgacgacgcgactttcttctggtgagctaacaatgtgagaaggcatttgcaaaagcgcaaaaggtcttccacggcgagtgcgtgcgagtcgggcctcgacttcagctcgcgttggtacaaatggggcaccgaatcgaaagcaatgcgaaggactgccatcgccaccagcgaagtgctgcccgtcgacttgaacgtgttcatggcactgaactaccaaactttggccaaactgtacgacgaggaactgaaggagcacgggtagaaagaacggcacggcactttgggacaaagtgaacgatttaatcacagaaaggcacggaaaaacaaagagattgccgaagcaattacggcacacattgacagaacattttgggacgacgaagagggcgtttggttcgattttgacctgacggagaaaaaactgaggaaaaagttttatccgagcaatatttatccaatgttattgaagaacgacggaaaagggacgggggaaaagtgccaaaaagtggtggaatatttgaagaggagcggagcaattggattcaaaggtaaagcggcgggggatgagcagcgattggaccaattcatacgggacagacaaagggtcaaaggatcagaagagtcgtcaaaatgaataaattgaaataggcccctttaaattgaccctttgctcttgcgtaagtcatttgctctcttcccaaggcggagtgccatcgtcgttggaacggaactccaacgagcagtgggactttccgaacggatgggctccacaacaacatttggtggttctgagtctgctcaagtgccaaaatgtgtcgggcgaagctgccggaattgctcgaaaaattgccgaagcatttctcacaacgacttacaacggattattcactcgaaaagaggcgaaagtacgcttaactaaagaataagccagcagagtcggctccattattttctaaattaaataagccatgttaagccct

SEQ ID NO: 40671 - DNA, 1620 bp, Heterodera glycines
tcagaagcgcaccagattttgcaggggcctaaaaaggtcaaggaaaggcgtctctgcgttgatttagcagtagtacctatgaatttaaattttctatgaatttttaaagttttttgaaatttttttaagtgcaaaagtggtggtgtctgcaaaaaattttcaccgggtttaaaaaatctaggaaaattagtaagcatttgtagtgttccgatacgtatccctgcaaaatttggtgagcccctgatcaattacaaattatttatggacgatcaaatttttagaaatttttatttatttttgcataattaattcataaatatttttttcagaaaatgctctgaaacgcaccaaattttatttacatgctagtttaggcactctgatgctttttctatcaaaaagggagatgaataaatttttaaaaatttttaattcctttttaaacaggccaaaaagtttaggcttaacttttttttcataaacttatcagaagcgccccaaactttgcagggatactgaaaggaaaagaattaacctgttttatcacattagcttgtcatcagtttttataaaaaattttcaaaattctgagtctcctattattttatttttttttcaaaattttgaggcgggggggggggggggggcgcccaaaaaaaattttacaatgaaaaaagagaatttggaatgatgagaaacaaaaattattcagtgaagaaaaaagaataatgttaaagcaatttgatcaaatatatgcaaaattaaaaatgaaattaaatggaaaattggaaggaaaaaagaaaaaatgccaaaaaataatagcaaaacatttgggcacaaatatcagaaacatttattattggaagaaacaattaaaaagtggaaaattggtgcaaaatcaaaaaaatgatgagcaaaaaagagaaattgttgaaaaatattttaaaataaaaattaaatttatgcaaaatagaaaacattcacgaaaagaatgggaagaatttagagcaaaaattaaacaaatgtttggaatttattatagaacaattgaaaaatgggccaagaaaattggcgtttttgaaaatgtttcaaaaagtgaattaaaaaaaataattaaaaaaaaattttttctatttacagagcgaaaaatattaacaattggtgaaaaaatggaattggcaacgcaatattatcaaatcaaaaaagaaaacccaaaaatcaaagaatacgaaattgcaaaaatatttaacattccaaaaaactcattacgcaaatacaaagccaaatttggcattaaacccaaaaacaaattgcactaatggaagaacattattatcaaaagaatttttagtggcaaatttcactgaaaagatgaaaaaaaaacctaaaataaatttttaaattatttataaaagtttttttgagaatttttttttcgatattgaatttgtgataaaaattgacattttaatcatttaaagccttgctaatatttttaattaaaattgaaacaacttaattaaacattgattgacttatttatactatgttcattaaacaattaaatatgagttgataaagaaatattaataaaaaattaattcgtaaaataaaatttat

SEQ ID NO: 40672 - DNA, 1128 bp, Heterodera glycines
ttaaattcttagaaaaaaagttctggttttactgtattttatggctttgtttactgtaatttgacatttttttttcttctcaggaccccgatttttggtcaaaatgggcgaagaaggcgaacattgacgtgaactcgttgaacgatgagttctccaccaaacatttgattgtgcatgagccgcgggcgcgtaagaagcgatttgaagcggacaatttcaaagggaattccgaaagtggtgacgacggaggttcggatgaaggtgagtgattggtggtttaattgaaaatttaattaaattatttatttaattgtgtctgagactttaatttatgcttaaaaaagtactggcaattcaaggctacggtaacactatcgaatgtgggcccgccctctttacaaaaaattatttttcattttttaagacaaagctcttttatggggttttcggggtcaaaagattcaattctagcatccatttcgactcattcgaaccccgaacctggactcgaacaaaagttgcgatttcaattttcagtaaaattcacatttaggtaccgaaaaaaatgccaaatttcgtgcaattttttcagcctgaaatttcgaagctatctaacgcgccatactagtatttaataataataattttaaaaaagctaaaaacaattagagtgagtgaataattgatttttggtacaaatgtgaattttgttaaaaatgaatttgcaactttttgttaagggcctcatttttcaaatatttaactgattgttgtgagtgatcaaacaaaactcattcgtcacatattcctaacaaactacagctgatgaccgatcgcaaagcacgcccgggcccggcacatccaaaattgcggaaggcgtcaaaaaccgaagttcaaaacgtagtcgacgacgtgtcggcggtgggccccatggcggtgccggtgaagacgatgaggactacccatacaagccggacgaacttgccttcaacaaaacgtcatactttaaagtcagtgccggacggacacgattttttgaatcacgagaaaaattgcatctcttaactccgaagttttttggaaaatgattttttaaattttttgtatcacttatttttttattttttg

SEQ ID NO: 40673 - DNA, 1343 bp, Heterodera glycines
  unsure (1)..(1343): unsure at all n locations
attatttataacatttataaaaataaacgggatttctcgatcaggttcagggattttctcattagctagaaaataaagaaatcccactaccaaattttcaaattcattaaaaagaaaactaataagttgagatgagaattaaattaaaaatgaaagttttttgacgcgaacacatttttggcgtcatatatatttttttttaatggcaaaactttgttattttttggtgtgaatctgttagagaccggacgggcccggggcccggcccgagcccgggcccggtcattttgaccgggctaaaacgggcttaaatttcaccagcgaaactgcccaaaatttgaaaaatttaataacatttggcgaaatgtctttaattcaaaatttcaagatatgactttagatttttgaaaatttgtagaatttaattcaacatacctagattttgtaaaacctcgaaaattctttatggcccgaacctttatttcccaaagaatttagaaaatttaatcaataaaattttttagaaatgaatgcatcaatctggaaataggtctatttgaaaaatcaaaggatggcaaaatggcggagtgccgagaatgtaaagaaaatggaaagtccaaatatgaatttagcctgtttatgattatcgacgttcgagattaaagccgaaaaccgcagaaatgttgatatttttgaacaaggccatcccaatgttggactacaaatactgatttaattttgttggatgataaaaagttcataaaattttccataaaattttggtttagaataaagaaaagaaattacgcaatttttttatatttataaatgcatttttaaaatttgaaaaaagcccgggcccggcgggcgcccggcaaaaattttggaccgggcccgggacgcccgttaaaacgggctttttttgaccgggcggcccgggcccggccaattgtcgaagcccgagcccgggcccggtcccggcattttcaaaattccggtctctagaatctgttaacaaatcacacacaaattttcaaaacttttttgaaaaaatgcgccgtaaaaaagggttttgaaaagcagaagaggccaatttataggcttgatataattctaagctaaaataaaaaattaaacttgaaaacttttcgctttttgtaaggctaatagaacatgagaagagctttcgaatgttaccaccaatgttcggatttggattacaaagaagatagctatagtggaaaagcatggtggggcccaagcgtgaggggccagctgacgggttccgccctaaatttttttttcgntgatcaaaaatttttgattttttaaattcataattt

SEQ ID NO: 40674 - DNA, 1136 bp, Heterodera glycines
tcttttcactattcaaaaaattaatatacgttagcagaattgtaaaaaaaaattctttcttttagctaaatgtgcatccgtacagcgatgcaaacgggcgctgttcgcgcttattgcttaaccttctgtttttgaaaaaatcggtggcttccatatatcctctaatatataaaatgaacaaaaattttagatgcctacagttgtcattccagacaatgattggttccgatatcaagaagcgatcaaaaaattcacaattaagtcggatgacaatcctgagttgacgagcgaacccgcaattcaattcattgagaaattactccaaggtgcaccgggcgatgaaaaaaagtaaagagacgagcgttatatttaaaatgaaaaaaattacatactaaaagttagttgggcgagaactggattcccatgggaaacccggaatccctttcctttttttgccggtactgttaaaaatttggtacctccttattttaaaatattcaatcccgaaaattcgatttattaatattttacgatcaataaaagcaattttaatcattatttacataggtgaagtcgttccagctgtggtcactgttttatgaggcggcggaaaggggcaaaaatgttcggcggacccaccgacccatcatcaaacacactaattgatcggtcaattaaatttttcccattttttatgcatccatccattttcttcttccgttgtctcttcccggccaattatttttcacttcctttctctccctccctgcgtcatccatcggtcactctctctcctcgcaattttttattttttgatcatatatttgtgcccaattatttttcacttcctttctctccctccctgcgtcatccatcggtcactctctctcctcgcaattttttattttttgatcatatatttgtgcccaattatttttcacttcctttctctccctccctgcgtcatccatcggtcactatctctcctcgcaacggtccaaagcaatggcataggtgaattttgacaaaagtacttacaacggcatttaaaacttggagcatcttctcgaacagtgccacttcctgcttgtgccgtccgaacgtgtcgacaacaatcatttcgaagccgtcatttt

SEQ ID NO: 40675 - DNA, 1455 bp, Heterodera glycines
ttcatttcttccgctgattctcaagctaagcaattgacagattttgcagttcgaattcgacgttccatcccttataacggctcattggacggtaaattccttagtcttttcgtcttttccctctgtatgggcagctataggaaagctgttttgaaatggattgttcatttgtctgtggattttgtgtccagacatttgcgcctctgtcaaaaatctgggaaaacttacagtttttcattcttagaagtcttaaacagcattaatttaaaaacaaatctccgaggcgcaaatgtggggtaaccgtggattttgacctcatgctcagaaacaattcttcgaagtttaagactttgtcaaattgacaaaaggggctgatttaattttaattgcattaccccaacaaaatttcggccaattggtccttttgtcatcgtttcgcttcccgtgccattccctccccacccccactttttttgttgccttttctcgctgtgtttggtgtttcgacttttgcctctctttctgtccaattgattcggtcccctttttctgttcattttgctttttgtgaatgtttcgttcgcttttggtaatggtggaaataaactgaaaacaacaagtggttaattaattaattaattaattaattaattaggcttttgtccgcgttgcttcaaagaatgtgcgttttagacaagcagaaaattttggccggtgtctctgacggcgacggagccgtggcgcaacacgcgccggacattacgctgggggaaggggcgaagcctttgctggacgaggagggggaggaaagtgagtggaattggcattgggccaatcggatgtttggcattccgtcaataagcattccaattattacgataaattgaccaattcgtcgttcgttttgattaattcccccccccctttttttaattttcccttttttattgtttttcatttgttgtgctttcattgtgtcctttcgcttattggatagtaagtaccaaaaccctaaaaaaagaacactttcagacatcaaacttgacggttacaatggcgcaatccctccggggtcggcaggaagggccaaagacgacttggaagttcagccggccaagaaggaacggtcggtgcttcaagccaagctgactcggcttgccattcagattggttatgccggtgtgtgaggggggggggggggcgacggaccggcgaaagtgtcccatttgaggctcttttgttgctgcttgtacggtgcttattttgggaattcgcttttgcatccaacactacctaatcgaccaaaaaccattcgttgtcgccgactttcgctatttcgtcaactttctgatcatcggcgtcactgttctcgtcgtggcagtgccggagggattgccattggctgtcaccctttccttggcctattctgtgaaagaaatgatgaaggacaataac

SEQ ID NO: 40676 - DNA, 842 bp, Heterodera glycines
tgtttatccttcgctgtacgctcgaggaggccttcgatcgtttgctgaagcaaaacggaacgatttcaccgaattttcactttatggaggtgccaaaggtcgtctcggtgccagcaaattttgttctatttcaggctttgacttgctgggagcgcgagttgttcgcttgcaacttctcccattctccgctgggcattgaaatttcccccgagggaatgtccaaagttggcaatggcatccacgccaacagcggcgcttttctccacccccacaacctcaacagcgacggcggtgccgtgcccggcaaatcggccctttctgtccccactgcattcaattctcccgttgtgacgacggcaatacctttctaaacggcctttacaaatgaatcctttgaattggtcacttcccccccccccctcccccaattttccccaaatttcgtccatcctgccaattgattgcgattgtcaatgaatctttaattcctattaactttcccttattttattgcatttctcaattttgttttgagcataacgcagttcttaccgtcttttttgtcgcatggccttttttatttcttcaatttttaataaattggtatatgctttctttgtgactaaagtaaaaatggcacaattacaattaattaagaaaaaaaaattgttagtctttttcagcttcgacagtttcaattttacaaacctcagcaggagagagaaaagccaaatagagagaaaaagcaaaagggaaaaagagagagtctgagaaaaagagaaggggtgatagagagagagagagaggggaaatagaaacgggagaagagagcaaaagagagg

SEQ ID NO: 40677 - DNA, 1052 bp, Heterodera glycines
aacggacacttgaaaaaatcgatttttttgttttctcttgcagtccccccaaccgatgcgcccagatttatggggagaccgaatccttccggaatagcttccctatagtctgtactttaattctgcgttggatttttgctccccataattgtttgagtacaccaaacggacacttgaaaaaatcgatttttttgttttcggggcagtccccccgaaccgatgcgcccagatttatggggagaccgaattcttcgggaatagcttccctatagtctgtactttaattctgcgttggatttttgctccccataattgtttgagtaccccaaacggacacttgaaaaaatcgatttttttgttttcggggcagtccccccgaaccgatgcgcccagatttatggggagaccgaattcttcgggaatagcttccctatagtctgtactttaattcagcgttggatttttgctccccataattgtttgagtaccccaaacggacacttgaaaaaatcgatttttttgttttcggggcagtccccccgaaccgatgcgcccagatttatggggagaccgaatccttccggaatagcttccctatagtctgtactttaattctgcgttggatttttgctccccataattgtttgagtaccccaaacggacacttgaaaaaatcgatttttttgttttcggggcagtccccccgaaccgatgcgcccagatttatggggagaccgaatccttcgggaatagcttccctatagcctgtactttaattctgcgttggatttttgctccccataattgtttgagtaccccaaacggacacttgaataaatcgatttttttatttcataaatattttttcagaaagtgctctaaagcgcaccaaattttatttacaacttaattttagcactctgatgctttagtatcaaaaaggaagatggagaaaaatttttttttaaatagttcctttatattttggttatatcgttttgctttcctagtgtaggtaggaacgagtggaatcatgcgcacccgtccgatct

SEQ ID NO: 40678 - DNA, 1006 bp, Heterodera glycines
  unsure (1)..(1006): unsure at all n locations
cattagtgtttgttatttgagtttagtgtgacacaattatgtgtgtcatgtctntgataaacattagtgtttgttatttgagtntagtgcgacacaattatgtgtgtcatgtctttgataaacattagtgttcgttatttgagtttagtgtgacacaattatgtgtgtcatgtctttgataaaacattagtgttcgttatttgagtttagtgtgacacaattatgtgtgtcatgtttttgataaaacattagtgtttgttctatgactttagtgcgacacaattatgtgtgtcatgtctttgataaacattagtgttcgttatttgagtttagtgtgacacaattatgtgtgtcatgtctttgataaaacattagtgttcgttatttgagtttagtgtgagacactattgtgtgtcatgcttttgaaaaacattagtggtttgttctgtgactttagtgtgagacactattgtgtgtcatgcttttgaaaaacattagtgtttgttctatgactttagtgcgacacaattatgtgtgtcatgtctttgataaaacattagtgttcgttatttgagtttagtgtgacacaattatgtgtgtcatgtttttgataaaacattagtgtttgttatttgagtttagtgtgacacaattatgtgtgtcatgtctttgataaacattagtgtttgttatttgagtttagtgcgacacaattatgtgtgtcatgtctttgataaacattagtgttcgttatttgagtttagtgtgacacaattatgtgtgtcatgtctttgataaaacattagtgttcgttatttgagtttagtgtgacacaattatgtgtgtcatgtttttgataaaaccattagtgtttgttctatgactttagtgcgacacaattatgtgtgtcatgtctttgataaacattagtgttcgttatttgagtttagtgtgacacaattatgtgtgacatgtctttgataaacattagtgtttgttatttgag

SEQ ID NO: 40679 - DNA, 1179 bp, Heterodera glycines
  unsure (1)..(1179): unsure at all n locations
accattgatgtccttatttttgagataattatgatctaacgtcctttaaaccatttaaatcaaaaatataaaaaatgaaaatggaataatttttatttaattttttaaaattaagattgcggtttacttgttccaaacagacagctcgctgttcatccaaattgttggacattacattctgctgaatgatgcgcgtgcacttgtgatgccagcctggtttctgctctgggcctccggtgaaatgcgaaaaattgttggcaaattgattttttgtgccaaaaatgatccaaataatgccgtcggcagtgttggcgtcgcaacaatggtggtggcttacagcaatggcggcaaacccaaatggcaccagcaacagcagcgaattgtgccggcctaaaatgctgccacgtattaatgatgaattgggaccagcttttttgttttattgggaacagctcatttgtgatggttgggaacagctcatttgtgatggttggaaactgagtgtgatgaattgggtccagctttttgtggtgaattgggacctgtgggaccaaatttatgatgtgggttcagttttttatgatgaaatggtaacaatccattgtgataaattgtgaccagatttgtatgaatatttccgtagttttcatgttagccaggtccctaaccagaaataacttcataccgagtaaaacgggttagaatttttttaaatatctcatcgcaaaccaatatttatccaatgctgacttctgttttccaaaattgggcgagaacaaatgccaccaggaaaattatgaaaattttggttaatttgttaacagaattattggaaattaccgaaatatttaaccatttttctttaaaaaaaattctgcccgctccccgctcctggttacggttctgatagccagcccatttcgggtaattaaccatttttagttttgttcgaagcttttattataaccaagttttatttcaaataaatttttattacaaatgaaaatttttaggaagttttttcaaggaatttctgacactagggagggtaagggagctacttttttcaacaatttgtatgttcacaatattttanaaattaatcaagtttttatatgtataaacaaacaaattattttcaatttttcggttgttttttttcgttttatggaaatatga

SEQ ID NO: 40680 - DNA, 864 bp, Heterodera glycines
attatagatatgataaaagaaacaaacttaatttattctatctcgatcccattccaattagataaataaatttttaattcataaagctaacccattagatcttcggcactatgcttctcggtgttgttcggcacctccttagcgctcttcgatgccgatgggtcgacagcttcaacatgaccgatgtttgcagcgttgtttggcacagcggcagcgatgtcggtctctttctccaccattttcatttatttttcactttttttttactcaaataaacttttaaatcacaccaaaaaataaatatcactggagctaaaatagaacaaattaattttggctttacttgttactatacagacaaatcttaaaatatgaaccgaaataggtagatgactgtagatgcgttttcatcgcttctcgttttttttgtaggtacatacctaggtatatgtaataaaaacaaagtccacaaaattggcaaaaaaaaagactttaagtaacgacaaaaaacgacatacaaaagtgaaaggatttaaaaggacaagagaaaagtaaaaagagaggaaaagaaaaggaaaaaggcacgtgaaatttagtgacaaaattgagagaaaagaaaaggaaaagaaatggatgggatggaatggaatgagaataggaaggaaaactgtgtactcaactcagtctcaatgtacaggaaaaattccttcgaaattgcctaatgaattcaaaaaatttgctttcccaaataaaaaaatgcaattttaaaaacctaaatttttatattttgtttttcttacacttttcctgttttccttttctagaccttcttcttcttcttcatgtatgtggaacggcaattcg

SEQ ID NO: 40681 - DNA, 1200 bp, Heterodera glycines
ataattagggctgccaaaaatatgcacgaaaagtggccaaaatatgcgcataaatatgcaaataaagtctgaaatatgcaccaaatatgcacaaaaatcgcaaaatatgcacaaaaaaacttgaaaattaggggtgcaaatccaataaaaaatttttattcctcataaattttatcggtttttttttgcaattgaaaatcaataatttctcaagattttcggcactaaagctcatcctattgtctgccaaaatttacttaagggatattcaaaacggaaaatattttacgaaaaatggcaaaatatgcaaaaaatcggaaaatatgcacaaaaaatggcaaaatatgcatgaaaatgtaaaacaagcaaaaatatgcataaaggcccaaaatatgcaaatttaaaagtcccgatttttatacgcaaacacaaaaaagaaagtgtttttcgtactatttagagcatggagaagccaggaaaaaaatatgcatttgcatacttttggcagccctagtcataataaattatgtttaatcataattattatgcttttgatataatcggttttgttaaggtcaagtcctaaagcgatttggacacttcagtcccgagtctgtaactctgttcagaattgtcgccgcgccctaaaaatagtaccattcgactcccctcactgaaaggaatctattgatatatataattcatatgcgaaaaaaaattcgcagtattctttttaccttgttttagcgttttagatacaatttaaaaacaacttctaagtcttttgttatcaaattctaaaactttggatatctgaaccagcgaattaaataattgaacgagtaaaaaaataagagtgtgaaaaaattctgctttttctttgcgatttatttataaaactcacctttttccaattgaggacacgtttaaacaaaaggcagtggaacagtcgacatgacgaaatcgcatccggaacggcattttcagcagggacaaaaggcataagttcgaacaaaagttcgggcggaaggcacttgagggtcattagtaagcaaaatagaacgcagcaacagaggacaatttggtgtttaggattaattagcaatgagtaattagcatggaaagccgcagcagacactggagaatgtttttggtctactgcggcttggaatttgttgtgtttggctcgttaaagcagag

SEQ ID NO: 40682 - DNA, 1067 bp, Heterodera glycines
cggggttcgacataggtcgaaattgatgccggattcggattctcctaccctttaaacccctaatacaatcttttctcgaaaaaaatttcaaaaatttgattttttgaaaaagggggactaccatcgttactatggctataaacttgcaattaggcattggaattgaccgtctctttggcgttgtgtttccgatatggtaataattaagttcggaaaaatatggatataaaatcgcaaaattttttattttttgctttttttaagaaattttaaattcaatcagtattttcgacaaaattttgctaaaaaatgtctttttcggaatttttctgtctttaggggccaaaaggccaatttacctgatgggagccgttctaatagggggttttttggaaaaatgccaaaactggacgtaaaatatggacttaaatgccaaaatattagagtccggtaaaaaaaaatttccgggagcgggagcgggatcgggagttcaaaattttccgggacgggagtcccgaacgggattcccgtaaaaatcccgctcccgttaaaatcccgtccatttttaacgggagtcccgggcgggagcgggagtaattcgaaaatttaattaaaaactcacaaaaatatttttaatgcacaaatttaaaggacaatcaatttattaaattgaaaatatatagaaaaatttataaaggagaaatttgaaataaaaaaatcttatttttgagtcaaaaatcagaaaattttttcaaattgcttaaataaattattttttataattaattcgaacaaaacatttattaactttatatttttgactccctttattaattttacaaaattttttgcggtgtatttcttgaaaaaactttttggtgaccaaggaggaggagggaggccggcggtgccggtaggcgccgccgggtaaaaattgatattggaatacaatacattgtcagattttgtccaaaaatgaccaatttttgcaattttttgagcaaagttttttaagaaaattaaggattttaaaggcccggcggtgccgatatcgccgccgggaaatt

SEQ ID NO: 40683 - DNA, 1317 bp, Heterodera glycines
  unsure (1)..(1317): unsure at all n locations
attataatctatataatcatttacgaaattttgttctaaatttcgatcatcctatgtatccatgtcctatgtttgccaagttctgttgctttaccgtatccctacctaatgaataatttaattgaaaaattttgtattattaacattgtgcaattttccaatttcattcatcgaaaatggttttgaattagctaatcaatgatgattagcatcgccaaatgctgctcttcctttttgcataatcatttcacaaaaattttttagatattaccatccaaaaaaaaaaccctgtccttcccagtccacccattaaaagtatttttttttaattatttaattaaatttaaaaaaattaaatgtaataaaattcacttgcacacatattcagcagaactccccaagacagtagtaatgatgcgcaacgcaatgcttctcccggttgtctttgcgatgcttttttacttcagcgcacttttgcaatttggatacggtacagttactgtaatccaattttcacatattgaaaaaactgaatcgaaaaaaatagtataaataatttataatgatattaggaaaaatttaacaactttaaaatacaattaaattcttccttcgcattttggcatttttacccgtccatattttggcacttttttttaaaatccaccttctaacgattgacatttaattcattaaaaaaatacactaaaagaaagaaaattcagaaatttttggtaaaatttcttaagcatttcattttaataaaaaaaattattttttattatttttttcactttacatttttagcattgaaatgccgtgccctttacacaacggaaaatgccacggcaaatgaattaattaagcaaataactaatccaggagattttaaatgcactcgaaatgagaagaactgcggtgtaacattctgttcagctggttgatgctgaaattatttttataaatttaaaaaacaatttaaaaggcaggcgcctaaatcaaaaatatttgagagttggaaatgccatgactttttcttttcaccctaaaaaatattaaatataattttctaaaaaataaataaatagaatattagcatattttgtctcaaaatggatattttgcaaaaaaaaatgttgaaaattttagtttttgtgaaaaaatccaaaatttttatattttgagatttttctaagctatttaggtctttttgtgacatttttagtccaacaaaattnttcattaatcttttggtaaataaataaaaatatatttgtatgacaccatcaattttttaggcaaacttgaatttaatac

SEQ ID NO: 40684 - DNA, 1042 bp, Heterodera glycines
  unsure (1)..(1042): unsure at all n locations
ggttcggggggacttgccccgaaaaacaaaaaaaatcgattttttcaaagtgtccgtttggggtctccaaccattatggggagcaaaaatcccacgcagaattaaagtacaggctataggagagctattcccgaaggattcggtcttccccataaatctgggcgcatcggttcggggggactttctgaaaaaaatatttatgaaacaaaaaaatcgattttttcaagtgtccgtttggggtactcaaacatttatggggagcaaaaatccaacgcagaattaaagtacaggctatagggaagctattcccgaaggattcggtctccccataaatctgggcgcatcggttcggggggactgccccgaaaaacaaaaaaaatcgattttttcaagtgtccgtttggggtactcaaacaattatggggagcaaaaatccaacgcagaattaaagtacaggctatagggaagctactcccgaaggattcggtctccccataaatctgggcgcatcggttcggggggactgccccgaaaacaaaaaaatcgattttttcaagtgtccgtttggggtactcaaacaattatggggagcaaaaatccaacgcagaattaaagtacaggctatagggaagctactcccgaaggattcggtctccccataaatctgggcgcatcggttcggggggactgccccgaaaacaaaaaaatcgattttttcaagtgtccgtttggggtactcaaacaattatggggagcaaaaatccaacgcagaattaaagtacaggctatagggaagctattcccgaaggattcggtctccccataaatctgggcgcatcggttcggngggactgccccgaaaacaaaaaaatcgattttttncagtgtccgtttggggtactcaaacaattatggggagcaaaaatccacgcagaattaagtacaggctatagggaagctattcccgaanngatcggtctccccataatctgngcgcatcngntcggggggacggccccgaaacaaaaaaatcgattttttc

SEQ ID NO: 40685 - DNA, 861 bp, Heterodera glycines
caagaaagttggatttggtttgcaatgaaaaaactcattgttcaaaaactaggctggcgcgaaaacgacccggtacgaaaacgtcctggcccgaaactttattagatattttgcaggataagagaaaacatttagggctatcgaatgatatgaagatttaaaaatttggttgcttttgagcaaaattatatcaaaaaatatttccatttgatggtttttggctaatgtcatagaaacaaagccaagacaacgggtcaaagccggcccaccctcgagtttttccctcaaaagcttccacagctcattgacatattcaatggctagtcgccaaaaaaaaaaattactacactttttagtatgataaatagggcataaaaataaggatataaaatcggctatatggacataaaaagtggaccaaaaaatcgcgcaatatggacataaatttttcgaaattagcggtatatactttttcaaaaggtcttcaattacgctaaatgtaaagtaaaatgtttaaaaatagttaaatatggtattaaaaatcattttagaagaaaaaaacattaaacctaaaatgtttactaatttttagcgaaaaatcaactcgaaaagtaaaaaatatggattatttccaaatataattctacgcaactactgattaaattccatgaaataattttttttttaaattaaatatgaatttttaaaatttactttcactaaaatgagtgcattctccacgtaaattaacattttgagcagttccttctttttctccatttgtggcaacgttttggccagcgccatctcaaacccaagatgcatttgtttctttttgatcttggaagttgaaaaaattta

SEQ ID NO: 40686 - DNA, 911 bp, Heterodera glycines
  unsure (1)..(911): unsure at all n locations
ttcaaaataatgattatntcggttctagacaattttattctccttttaaaaaaaaatattcgacctttggaacatgaaatacccacaaaaattcactatgtttagcgtttaataactttccttataagtaatataattaaacattcttggtataattcgatagctctaatggtcctctataagtctataaaaattcatataatttaaataaatattgaaagagttatgatcagaaaagttaatcattcttttggtaaggtaatttcatcataatgatactaaaaaaaccgggtaactggtcaccttacccgcagctgcgggtaaatcaatgagtaccgggtaaaattcatttagtatgggttaacccgcagctgcgggtaggtttaccaggtgttacacgggtaggtttacccggtaactttacctcgttctttggtacgggccccgggggtcttttggtcaatgttttgcacttccctttttcccatttgattccccccccccgggcgaagtgtttcaaaaggcatttatttattattttcatttttttttacatacatattcattcaatgtaaataaactttaaatctccaattttcatctttcatttgaattttttttaattgttttgctgctctgatgctcattagtagtaaaatatttttgtaactgattttataacttttcatatccccattttatttaaaaattgaattaaaatgagaaatttcggtaattatctttattattattaccagcacaaaattctgcacaataatttcataaattgactctcgctttacattctccaaaaaataacttcacatgaacataaaatataaaaaaaaacaaaagatactcacgaagtttaatattttaatctacctatgtatatactatgtgagtaatgt

SEQ ID NO: 40687 - DNA, 1144 bp, Heterodera glycines
  unsure (1)..(1144): unsure at all n locations
gcatcagagagccnttaattacctgtaaataaagtnttgtgtgtttcagagcactttctgaaaaaatacttatgaattaattttgcaaaaaataaataagtaatgaaaaagtcagaatttcgaaaaattntaaaaacaacaagcgttggcattttttcaggttaagttagtcctttacaatggagaaggcctgcaaaatttggagagattatatcgattttagtgcgctaggttcgatgaaactttttaaaatataagcctaaactttttggcctgtttaaaaaggaattaaaaatttttaaaaattttattcatctcccttttgatagaaaaagcatcagagagccttatttaacttttaattaacatttggtgcgtttcagagcagtttctgaaaaaatatttatgaattgattttgctaaaaaaataaaatagtgaagctttaaaaattaataaaaaattttaaattcagaattactggagttagcatcatagcagtgcttttccttgtctttttgatgctctcgcaaaatctggttcgcttctgaccagtttataaaaaaaaagttaagcctaaaatttttcgcatatttaaaaagcaattaaaaatttttagatttttattcatctccctttttgatagtgaaagcatctgagtgcctaaaataacttgtaaataaaatttggtgcgtttcagagcagtttgtgaaaaaatatttatgaattaattttgctaaaaaaataaaatagagaagctttaaaaattaataaaaaattttaaattcagaattactggagttagcatcatagcagtgcttttccttgtctttttgatgctctcgcaaaatctggttcgcttctgaccagtttataaaaaaaaagttaagcctaaaatttttcgcatactcttaaagaaannaaaaannnnnagaannnnnannnatnncccnnnnnganagngaaagnannngagggnnnaaaccaacttgcaaataaaatttggtgcgtttcagagcagtttctgaaaaaaatatttatgaattaattatgcaaaaaacaaataaataatgaactctcttccttaataattttcctgcaccgaaggtactcactcggccgcttcgcggcctcgtggtgggcctt

SEQ ID NO: 40688 - DNA, 1487 bp, Heterodera glycines
tatgaaaaaggggttcattttaaaattaacaaaaaaaaaatacaagcaattaattaattatgtgttgtcattgcgacttcatccatataggtaggtattactgtgatttggaaccgaaaaaaatttcagaagatacacccctaaattgaaaaaagcttcccgaaattgattcacgaaaataattttttttatttaattgattttcaatttttttcaccttggcattaattttattcaaaaataaaattttaaggagtgtcgttggtgcaaaaaagcgttactttggcttcacttcttcgccaaccgagtaatacatacggggaatattatcaataatatttcgacatttcgcaatttcaaaggaatatttttaagacctattactttatttgaagaattaaaaaaatatataatatctatttttttacgaaaaacaaagttaattaattaattatgtgttgtcatcgcgacaatcacccgtatagatttttctgtaatttagctgtatcaaggacgacgaaaatattctcaacactttagaattttcattttaatttaaatcaaataaaagtaggaattttcttatcacttcgcgcttccgtcgatcaatttaaatttttttgtttgttttttaggtcagacggaggtggtcacccgcacaatgtcacaacagtgggaagtacagcatgatatgtatgattatgatcattaccctaaagacgatggaccaaaagaaaaaggctccaaaaactgctgcactataatgtaggaaatttggacaaatttcagacgctttttcgagtttggcgatcttagaaaattgtgtaatccgcttttttgaattgtcgaattgttgagtaaaatcttgttgttgctaaatatttgtcttacatatggtcaacaatttgggacacatttgcgaatcaaaattgaattttcaatgagtaacaaatttttgagtgacaaaaaattaattaaattttgcttttatgtttaccaggaatagaataacccaaaaaaaacactggacgtcgtgattcgaattggcaaagtatttttgaaaataggaaaaaattacgaaaatggagtccaacaaacccaaaatttcgcaagtcgaaggtcggaattgcgtttcatccctgatgcttactaggccaaaatttcaaacaaattcaaacagttgatttgtggtaaacagttttgatttgcattggaaaaaaataaatttaatctttttaatgctacagtccaaaaatgttttatgctgaaagcattttgttgctatttttgaattaagtaggtgttgaaaataataaattcaattatactatcaatattaaaatataaactaaaaaagaatacaataaaagcattccatctttgagcaaaaaaatcacattaaaacgaaacttttaatttcaaatcttgaacccatcaaattgattgacaagtaatttactagaggattttttatttttagaaaaaaa

SEQ ID NO: 40689 - DNA, 816 bp, Heterodera glycines
  unsure (1)..(816): unsure at all n locations
ttgccattcaaggacggnatcccatccctgggataaaaaccttaaacctgagggtttcggggggtgttgatcacgaatctgatatccatttcgaccaatttcggacttttgtctaacactgacactcactgggtttgacccgtagttataccggtaacattttcggaaatttcatattactttataaataatttagcgattttggataaatttttcaagaaaattaaggattttaaggttcggtggtgccgataggaacaacggccgggaaaaattttgaagtttcagtgctatttttttcggtaaattcgtacatttcttgatcgtatgtatttctaatataacattaggtaatagtgtagtttatcccccccccctttttgacaaataaattttcaaaaattttaatgagatactcacgtggccccagggttttgacaggagcctaatttcgattacgaatcgcattttcattatttaggactaccggaacctggtgacattaattaatgaggtaaatctccccatttttctagcatggagttgcaaaaaccgtaccatttgtcttaattccttgactaaatcacagcttctatatatactcggtttgtcgttttaatcggagacggcaatctgctgacatcaattaagcacagtaaatctcccaatatttctaccataaaattgcaacaaccggcatatttgccaaaatatcctgacaaaatcctgaattcaataaatactcggcttcttctttttaacgaggactgcagtctgctgacatcaatgaatcatgtaaatctcccaatttttcta

SEQ ID NO: 40690 - DNA, 1471 bp, Heterodera glycines
  unsure (1)..(1471): unsure at all n locations
ccactataaattgacccgaaaattttcaaaaataantccctctatttgtaaaatttactcaaaaattcatcttcaaattatttacatttatttataaaatttttgattttaaaacttttatctcatttttttttacttttttttaataaattttatcattttacaccccaaactatttttcatttttttgagcctatgttcgaggtttttaggatctaaagactacctatttgcagtttttgagcctaaaaatcttagccctagtaattaattataaatatttagctttaatttgaaaaaatcaaaagaaaaattgacaatccggcatgagaagatagtttttttatttcaactcttattttaaattattaattgagaagcattgaataattaatctaatgagttacgagaataaaattaattctaaaaaatataaattttgatctgaataaataaaattataaaaataggtattggcgtttttttattttaatacaaaaaataaggataaaagaaaagaaacaaaactaaatataaaaaaattttggcaaagaaaaaaagcaatgggaaaattgaattcacacagagtgcagggcacgattgaggaaagttttagacaagcgtctttattttagaaacacattaattaacataaataaatcgactaatcttaaatgaattgactaataattcatcctgaaaataattaacaagaaaataaactattttttggcggaggagttttttaaaaaaggctgagtatctaaattaataaaatattttgacaaaaataacttataagtttttaattaaacaaaaaatattttatattatagttattcattccttcaaaaaactataaaattataacctacacgcaaatgcgttcgagaaaaattcttaaaacaaacatttcaaaaagcttggcacggatgagactcaacccagttggtgccttcgtcagattcagtcatttaatttatttaataaaattttttactaaaaatatattatttaaaaattaaataaaaaaatttcatatcgcaaggaatgcatgaaagtaaagaaaattatttttgtttgataaatcaaaaaaataattaaatagattaataaatttcatgtaaagaaaaacaaaaaaatgattttttattgagtaataaatattatgaaatactaatgaactaaattacattattataacataaaagatgcttatttcttgggtaaaccctacgaaatcaaaaaagaccaataaaatttaatgaattaaaattgctctaaattgttttactcaagcaaataacaaattcaataaaatttttattgctttttccgtaatttataatgcttctaatttttgtcacatgtgttctctagtgatgctcgagagtctcggtctcgagtctcgactcgagaaaagtctcggtttttttggtctcggtctcgagtctcggtctcgggttttcag

SEQ ID NO: 40691 - DNA, 776 bp, Heterodera glycines
tatggggagcaaaaatccaacgcagaattaaagtacaggctatagggaagctattcccgaaggattcggtctccccataaatctgggcgcatcggttcggggggactgccccgaaaacaaaaataaatcgattttttcaagtgtccgtttggggtactcaaacaattatggggagcaaaaatccaacgcagaattaaagtacaggctatagggaagctattccggaaggattcggtctccccataaatctgggcgcatcggttcggggggactgccccgaaaacaaaaaaatcgattttttcaagtgtccgtttggggtactcaaacaattatggggagcaaaaatccaaggcaaaaataaagtagaggctatatcgaagctattcccgaaggattcggactcctcataaatctgggcgcatcggttcggggggactgccccgaaaacaaaaaaatcgattttttcaagtgtccgtttggggtactcaaacaattatggggagcaaaactccaacgcagaattaaagtacagactatagggaagctattccggaaggattcggtctccccataaatctgggcgcatcggttcggggggactgccccgaaaacaaaaaaatcgattttttcaagtgtccgtttggggtactcaaacaattatggggagcaaaactccaacgcagaattaaagtacagactatagggaagctattcccgaaggattcggtctccccataaatctgggcgcatcggttcagggggactgccccgaaaac

SEQ ID NO: 40692 - DNA, 1729 bp, Heterodera glycines
gtaattccagctctcaaaatgcatagaattattgctgcggttaaaaagctcgtagttggatctgtgctagccgtccggtgcacactttgtgtgttactggtttggttggcttttctgccggtctctccccggcgttggcctttaccggtcggcgtcggtgggctggcgagtttactttgaacaaatcagagtgcttcaaacaggcgtttcgcttgaatgttcgtgcatggaataatagaagaggatttcggtccgattttattggttttgctgaccgagataatggttaacagagacaaacggggccattcgtattgctacgtgagaggtgaaattcttggaccgtagcaagacggactacagcgaaagcatttggcaagaatgtcttcattaatcaagaacgaaagtcagaggttcgaaggcgatcagataccgccctagttctgaccgtaaacgatgccaactagcgatccgccggcggatttattcgccctggtggggagcttcccggaaacgaaagtcttccggttccgggggaagtatggttgcaaagctgaaacttaaaggaattgacggaagggcaccaccaggagtggagcctgcggcttaatttgactcaacacggggaaactcacccggcccggacaccgtaaggattgacagattgatagctttttcatgattcggtggatggtggtgcatggccgttcttagttcgtggagcgatttgtctggtttattccgataacgagcgagactctagcctactaaatagttggctcattgcttctgtgggcacacttcttagagggatttcggtgttcagccgcacgaaattgagcaatacagggtctgtgatgcccttagatgtccggggctgcacgcgcgctacactggcaaaatcagcgtgcttgtccttccccgaaaggggttggtaaaccggtgaaaatttgccgtgattgggatcggacattgcaattattgtccgtgaacgaggaattccttgtaggggcgagtcatcaactcgctctgaatacgtccctgccctttgtacacaccgcccgtcgctgcccgggactgagccatttcgagaaattcggggacggttagtgttccggcttcggtcggtatgcagactggaaccgatttaatcgcagtggcttgaaccgggcaaaagtcgtaacaaggtagctgtaggtgaacctgctgctggatcattacccaagtgattcctattcaccacctacctgctgtcctgttgggctagcgttggcaccaccaaatgcccccgtccgctgatgggcacaggtcgttcgagatgacttgtggacgctgcccaacattacggggcagctgcctcacgagccatgcttttggggtgcttccatacgttggagctgtggtataccgctcagtgctgcacgtgtgaaagcctgtgtatggctgctgcgtggcaatgtgtcggtggcgggccgcctcgcttggctggttcgctgcgccaatgtgggatgcacgctcgtggggcgacctaacggctgtgctggcgtctgtgcgtcgttgagcggttgttgtggcaggcacataacacactgactggggatggtggtttcgttcccggtcttacgtgccgtaactagcggtgtgtttgtgcttgctgctacgtccgtggccgtgatgagacgacgcggtagtgcccgtgcttggcctagcacgtggcttaagactcaat

SEQ ID NO: 40693 - DNA, 645 bp, Heterodera glycines
aaaataaaaacccataaaaatggcgttggtattaatgtttatgtgtaatatatttatataaataaaaaatcaacgtcaattttttaatttccgtaaaaatatatataattaaaatgttgatttgtcttttccccactttttccatttcaccaccaccaattttgttattgatggcctcctctcctacacactgccatttctttataattttcattttattttacataaaatcgtcaagtgacatgtcaaaaattgattaattcgttgtttaagcatctcatattatataatttcccaacgcatcctttttttattattttattttctcaatttcctccattttcttttgcatgtgttcagcaggaggctgttttggaatttcctctttctaagaattttgactccgataaaattatgaattttagagcaccaataaaattgccacaattcggttttcttgaaaattaattttcaatattttttgcgtcggaattcaacaaaaaaaattattttcataaaataacgactaaactcccacaaaattataaacaaaaaaaggcattctcaggactttaacctgctaccacagcataccgtgcttagctctaaccaattgagctacagattttctttcaatagatccct

SEQ ID NO: 40694 - DNA, 906 bp, Heterodera glycines
ctaacggacgacctaatggaaaaaaatccccgaaggagagaatttaattaaatccattccttcgggggaccgtgccgggtgccgcggggtaagcagtgctggttcgtttcatcacggcaccgaaccttttggctagtcagcaatcgttgcttaacttgccagatcggacgggtgcgcatgattccactgttccaagcaccccaccaaaagcaaaacgatataaccaaaatataaggaaaaattttttctccatcttcctttttgatactaaagcatcagaatgctaaaattaagttgtaaataaaattttggtgcactttagagcactttctgaaaaaaatatttatgaaacaaaaaaatcgattttttcaagtgtccgtttggggtactcaaacatttatggggagcaaaaatccaacgcagaattaaagtacaggctatagggaagctattcccgagggattcggtctccccataaatctgggcgcatcggttcggggggactgccccgaaaacaaaaataaatcgattttttcaagtgtccgtttggggtactcaaacaattatggggagcaaaaatccaacgcagaattaaagtacaggctatagggaagctattccggaaggattcgatctccccataaatctgggcgcatcggttcggggggactgccccgaaaacaaaaaaatcgattttttcaagtgtccgtttggggtactcaaacaattatggggagcaaaactccaacgcagaattaaagtacagactatagggaagctattcccgaaggattcggtctccccataaatctgggcgcatcggttcagggggactgccccgaaaacaaaaaatcgattttttcaagtgtccgtttggggtactcaaacaattatgggggagcaaaa

SEQ ID NO: 40695 - DNA, 1225 bp, Heterodera glycines
  unsure (1)..(1225): unsure at all n locations
tatattttcagactttccattctgtgtccggttccaagcattttttcagcatttggatttttcctggattttctaggcccggcttttttcagaaatcaatcttatcaaactactttccatacctaggagtccgccataaatttaaagacctaaaaattgaaaaagcatcactttgaaaggtatgccatgcctatggcgttaatttttagccaaaattaataataattaatttttccatttttgctgaaataaaaaagcgacggaatgcatccgccgagcagcaggaggacacccttataaatatacaaatgagtcagtgaatcaccatcacacaaatggggacggacagaatgttttagtttttgcgggttggccaaatggcaaaaggcgaaaaaaaatgagtcacagcgatggcaaaaaaaagggcaaagccaaaaacaaatattattattattatttattacagatttatttggaccatcataatgttgttgcttgtatctgctagaattattggagaatgataaggaaaaaaatgttgttaaggaaaaagagttcattcccccccccccaaaaaagtgttgaattttacaagaaaaaaattcaggggggtaagatgagaaaattcatccgacaagaaaatttgaattttgggcctctgaaaatctctacttctaccgatcgcttcaatagaacagaaattctataggagaatggggctggctgggctgcttgaaagcctcggtttttcttgaactaataaatttctcggattttccttgggcatcggttgtcgagactccaattttcactctcgagttcaagctttcgactctgatcagttccgaaaattattttttgtgactcgggggattcgggaattcaatctctgacaaatgtgggggtgggggagggactccgtttgggttttctgttgaagccatccatccccgcgggtttgaagcccaatttatacccaaaggtgccgcccccctccgccccgccaaatgctgacacaaaaagcaatgaaaaagcatttggtggaagtgaaaaacaagattttggtgggctgagattgngctgattgcttgttgcttannattaaattgaaagtgtgtgtgtttggcgatcagattaatctcccgtcgccccctccttgggcgacggcggcggggagggaggggggaagggaggaattggacgatgatcaaagcattgtaatgtg

SEQ ID NO: 40696 - DNA, 752 bp, Heterodera glycines
atggccgaaaaagtgtgaattggggaggattagaagaaaagtgtcaattgacaattcatcttgcgaataatttgacgagaacactaattatttcatttaaacgccccatttaacaatttaatttgaatttaatttttcagcctttcattttcttttccgtgttcacttcgctttcgttgtgccctttttctgctgccaatgagtcgaaccctttctttcccctgcggggggggggacttcgttttctgtcaattcgcaaaaatagacgcaagcattggccaaaacagcccagccgtgctgatggatggacttcccgtgatgccctctcctcccatgcgatgctccgatcagagcgaccaaaatgcctgggggcatctgccagagaaaggaaaaacagagaaacattgtgcccaccccgtccgctcatttgttatgtgccgcggtccgtccttttccctccctctctctccgcccttctttccaagagtggcaactgtctcgaactctcagacactttctctgtctgtctgtctctctcaacccacttttctctctcctctggcctctctctctttctctgtcgtctcttatgctgcggtaaatctgccgatcggaaaggaaaagcgaagggaggtgaagccgtaagcactgaagaaaatttcagaatcggaatgtcgtcgtcgagagcaaatggcctcagaaagggtggtgggtgggaacacacaccgaccgatgacggaaagagacgggga

SEQ ID NO: 40697 - DNA, 1080 bp, Heterodera glycines
aaaaatcagtacagttacgagccagccctgctttaaatcgctaatcctttttttaaataccgtatcgctggtgcatttttatcgactactgctggagggcggaggttggaaaattttcaaaaatatagacaaattttctccaaaatttttcatttcggggttatggcaaagaaaggcccttgtaaataatgtgagttttccgcgcgacctgtcgccgatttccgtccatgtcggcacactcaatttttgcttccagcccggcatcgctgtaacaaattcggccaagttttggcaatgtgacaattgcagtcggaatttgaagttgtccaaacacgatctgaaaaaaatattacaaaatctaaaatattaaaaaaaaaattttttattaatgttcggaaaataacattttaaaaagtcagttcattaagagataaatcaaatgatcagatccatttttcatttatgacagtgtcaacgttttattttttttatttccaaaaattaccattttccaaaaatctcactttaacgcctcattaaatttttgattttttaaaataaaaaaatgttttatttatttttgtggttggaagattagttttattccatcatgctttcctatgtatcggaccattatacaaaatttacttttttccgatagcgaccgtcagatgttgcaacaaaaactgcaaaaaaaaaaaaaaaatatttttatttaaaaaatttaaaataaaaaattaatttaatttatttaaataaatatgaattaaaatttcggccaaaatgacttgcctacgcctgtttcgtcaagcggttggctccaacgccttttgcgtcggccagccgcctccgcgttcgcaatgttttccgcgcccacaacaccggtgacgtaaatgttgctaaaaacgaagaaattttgcagaaaattttcgaaaactctttttcaaatggaaaattcgcaaaagtcttccttttaacattgccgatccaattttatggcctgcctaattaggcgcaaattgttttaaattctgtttaatttgcaaatggtctaagcaccataaaaataataaattaatt

SEQ ID NO: 40698 - DNA, 1158 bp, Heterodera glycines
atacttaccttatccgctgatgctccttgaatccaaaatcaaatttatgaacattcctcggcccctctccaccgggcattgtcacacacgttattttcatcgtaatttgctccgagagcaacagcattttcttattttcatctccgtccccgctctgccccaacttattaatctcctgcataataacatccgcattattctgggggaacgcccgatacggcacccacaccgggaaagcaagcccggcgcccgtaattaccactccaaacatcctcactttccgcttcatcctttcttccgtagtcttaaaagccgccttaatcattgtgtcgattgcgtccctcatcgcttcatcggggcgtcccacatccgggttgatcgtaaattccgcaatgttcttcgtaaatccaaatttttcgcaaatcgtcgaacgataatccatcaatttaaaagtttccatttcttcaataaaattgtttctgaaaaattattgaataaaattgtctcttaaatatattattaaaaattacttacccgattgatctaaaatcccattttttagtcgacggtccgctttgttgagaggttccattgcgttttgcagccattttaataatatttaataatttctaaatatttacgcacaatcttattttagcaaaatccaacttttggttgaactgattgggggtgaatttggagagcttttatatggggtgagtgatgtgcaaaattggacctgtcaatattttgattgacaggtgacctaattttggtccagattgcgaaatattgggaacaaaaaaaaaaacaaaaaagtcacgtgcatatggcgaaatgaacggggaaattgcgaaataagggaccaatcaatcattttttggtccatattgcgaaatacttggaccaaaaaactaaaaataatggttaaatttaaataagaaaaccatcaatcattttttggtgacaggttttcaaaaatatttgtctcatattgcgaaatatttggatgaaaaaaaaacaaaaaaaaaagtcagttcagattgctaaataatggaaaaaccatcaatcaaatttattggcagatgacctacttttgaaagttttttttcccatcctattttatttattcattttcaatttatatttaaatagtta

SEQ ID NO: 40699 - DNA, 679 bp, Heterodera glycines
  unsure (1)..(679): unsure at all n locations
ccataggggtcatatgcagggttcggatcgaaaatttttcaaaataagaacattaaggccaaaaaataagattttatggtcaacaataagaacatttcgaaaattgcttcaaatccgatatttttacaatttattcgatcaaagtatcaaatattatatttttcacctccatgattatttttaacaattttggggagaaaaatagcaaatttagtgcaatttttatctaaaaaaaataaaatttttaacaaattttttacggcgcatttttccaagaaattttggagaacgggggaggggagtgggtcctggaaaaaattttgttatttctttgatttgttaacagattttgtctaaaaattccataaattttttaaatttataggtaaaataagaacatttggccataaatttccaaattatgaatatatttaagaaatatgtaagaacaaaataagaacaatagcccgaaataaggacaaatcttacaaataaggacatttttattttgtaagatttggaccctccaaataaggacaaatcttataaataaggacagatccgaaccctggtcatatgagacgggggctggggttcgagtccgcttggctgcggtttattatttttatgatttctgttacaaaaatcatcgnacaaaatgaaggttcttgcaaaatca

SEQ ID NO: 40700 - DNA, 992 bp, Heterodera glycines
gtaataaataattatatttaaataattttagtgaatgaaacaaattatatttaataattattatatttacaaaaattcattttaaggcaaatttataattttaacattaaacaaatataatttttaatttatttattcaaatattccctttctttgctattaaaaaattaaaaaaaaataaatttttgaataaaatttttcaccattttgttgctggtccggttcctcgtcaaacagttcatccagcaataattgagacattttttaatatatatttttttatttaattttcattttataaaattaaaattgccacttatgcacaaatcaatttgtcttttttatttgtcgacgtattcaccagcaacagcagtaaaagaaaattgtggtcgaataaatggaagaaaaattggacacattattggggccattttttgttgttgttaaattttcatcacatttttgctaaaagactaaaataatttttaaaatgtttaaattttaattatttttgaaattaaaatgaaatggtaaaattaaattattcaattaaaaactttaaaaaatttgaaagcttttttgttcaagcattaaaattcaatttttaataatgaaacttcgtaattggccttttgaaatgtggtgtaaagcataatggagtaaaaaaaaggaatatacccaaaaataaaataatttttgagaaaatcttttaattccaagattttccggattatttggtggttggtacgcttttaaaataattaaatatctatatgtgcatttcacttaattaatggtttcccaaataaaatatttttagagctggattggatttttatttatttttggatttaataggaaaatggcgattaattttgggtgcatggtttttggttagttttcattcattgtgctgaataatggaaagtgagagaaaaaaaagcaaaaatggaagcaatgtgtcctttattttaaaggaaaaaaaagagaga

SEQ ID NO: 40701 - DNA, 1231 bp, Heterodera glycines
  unsure (1)..(1231): unsure at all n locations
tacgttttattcgatcaaaaatatttaataataattggtcgttaaattctagaatgtctgaaaaaataaaaattncgggtatctataaaattgacccattaagagaagagctttgctttttcgaaaatccccacaaattccattggtccaaaattgaaaattttactcagcccattatggttaactaataaaatttaaaagcccagggagcaaaggcacacacacaattatggtcaataatatcttttataaataatgaatgaacatcggcggatcttcttcttcatttctgcatcgttccatcaacaatttcggtaccctttcagtttagggggcagattcatatacatttttatatgcctataaatgtattcattttacattgtttttttaagcatggaaattttaaaagactttaatattcatttatttactcttctgcaaaaaccagacacaatgtaaaatgaatacatttataggcatattaaactgaaagagtaccgcaatttctcttcccccaaaatggcaaagtgccgcctccattcgttcgttcacttcgacgactgtgacgtggtgcgctccttctccttgcgcttctcctcccccttcaccgcgttgtccacgatgcgacgcgtgtcgccctccggatgtccatgtttgtgctcaacctgccacaaaatgaggagtggtggtgggcagtctttaaaatgcctgcacaattaacaatggatggtaaagcgagcctcattttggcatcaagagttgaactcagcagttcaaattgtttgtggtagaattcaatttaattttctttactaaatgtaatttccattaacgcatttttttgcaaaactatattgtgttgaaaatttatagaaaaaactatttgaaatttcgagtggttgggggggggatacgtcccactgagaccgtccctgatcaaaatggtccttttttagaaaagccaatgacgcacaatcagccttattatacaacaaacgatccgacctgttcggacttggtgcgcttgccctggttgctcttgataacttcaccgtcacccctaaatgcagtaaaattgattaaaacagaaaaaaaatgtaaaacagagcactaaattaggaccttcaccaaaaaacccacctctcatattcgtcagcgatttgagccgcggattgattgctcattttgttgatgattcgcgaagttttattatttttggattctaaaa

SEQ ID NO: 40702 - DNA, 924 bp, Heterodera glycines
aaaccaatttttggtgttcctaatttacccgcgagtcaaacatccgaatcaattaaatagcttctgagataataaggtttatcataaaatttcatttaaaaataaacactcaattatcggtacgaacgatactttccaaacatgcacgcgtttcgcgctcgagctatttatcatcgggcttgtcaatccaaagcgaaacaacaaagatgctgttttgaacgaataaagggcataggttattttgaagaagtgtcaaagaaacatgcagcaataagcctgcaaaatctaataagtggaaaatacatgagtatagaatttattttcagaaagtgtcaacatacttttggaaaaatatatttgcaatttatcaacaattttgagaagtgagttagaaatgataaacttcacgattcaaaccaattttcgttgctctaattaaccgcgataaaaacattcgaatcaattaaatagcttctgagataataaggtttatcataaaatttcatttaaaaataaaccctcaattattggtatgaacgatactttccaaacatgcacgcgttttgcgctcgagctatttatcatcgggcttgtcaatccaaagcgaaacaacaaagatgctgttttgaacgaataaagggcataggttattttgaagaagtgtcaaagaacatgcagcaataagcctgcaaaatctaataagtggaaaatacatgagtatagaatttattttcagaaagtgtccacatacttttggaaaaatatatttgcaatttatcaacaattttgagaagtgagttagaaatgataaacttcacgattcaaaccaattttcggtgctctaattaaccgcgataaaaacatccgaatcaattaaatagcttatgagataataaggtttatcataaaatttcatttaaaaat

SEQ ID NO: 40703 - DNA, 898 bp, Heterodera glycines
  unsure (1)..(898): unsure at all n locations
aatttttaaantttgaaaaaacagaatgccaagaattaaacttatttttaaatttgagaaaacagaatgccaagaattaaaataatttttaaatttgaaaaaacagaatgccaagaattaaaataatttttaaatttgagaaaacagaatgccaagaattaaaatatttttaaatttgagaaaacagaatgccaagaattaaaataatttttaaatttgaaaaaacagaatgccaagaattaaaataatttttaaatttgagaaaacagaatgccaataattaaaatattttaaattagagaaaacagaataccaagaattaaaataatttttaaatttgagaaaacagaatgccaagaattaaaataatttttaaatttgaaaaaacagaatgccaagaattaaaatatttttaaatttgagaaaacagaatgccaagaattaaaataatttttaaatttgaaaaaacagaatgccaagaattaaaataatttttaaatttgagaaaacagaatgccaagaattaaaataatttttaaatttgaaaaacagaatgccaagaattaaaataatttttaaatttgagaaaacagaatgccaagaattaaaataatttttaaatttgagaaaacagaatgccaataattaaaatatttttaaatttgagaaaacagaatgccaagaattaaaataatttttaaatttgaaaaaacagaatgccaataattaatttataaccctttttttataactaactgaagccggcagttggctgaggacggattcgagcggcggtgcatcatcaaacaaatccgcaccgtcccgaacaggggagtacggtccatcaagggtaggggggagggaatcgtcagataattggctcattntattttctttc

SEQ ID NO: 40704 - DNA, 1432 bp, Heterodera glycines
aataaatgaattattgtagggccgagtctgaaagtggtctctaaaaacggcattttccaagaccatcaagtaacaaaatgttttaaatatggccttaaatttgatctatgagctctcaataaacctgtacagctccaaattcatgcatggagtaggagcagtacaagctcagaattgagaaagaaatagtgtaatgatggattgcaaaaaacaataaaatatctaattaaagttattaatgcgtttcattctttttcaatttttatcgtttatagatttaagccattaaagaatattaatttagaataattaaaattaattaaccataaaacagaatatccggatattttcttattataaaaataatgttaaacataattttatttattgttccactctttttcaaacaaaagacaccgcatgatgagaagaaatctgcaaaaagaactaaattcacaaatattttaaataattgtaaaatttaaaaaaagcataaattagataagaatcatttaacaaagaaacatttcattcaatttcacaaatttattttcgcttcgattagataaatgagaaatttgtaagaaaaaaaacacttcaaataaacatcaaaataaattatatttaaaattcgatttaaggtcgataaaagcaatgctaataaaaaacgaaataataaatcaaataaataattaaaatctcaatccttaagagttctcaaatgaacaattttgagttaattcagtaaaaaaaatattttaaaatttacatttaaaagaaattatttataattaaaattacctaaattatttaaaaaataaaaagaaggccttagaatataagaaataataaaaaatttaattgtcttacgattatgaaggattattatacgtaatttgatgacaaaaaataaaaatattacataataataataaaattaaatatatatattaaacaaaaaaaaaaagattcttggtaaaaatttgtggctatgactgccaagtggaaaaaatgtaaaatgtctcttaaatgcccaaattattggaatgtcaattaattgaaaaaaacattcggtctcaaaataattgatttcttcttaattacaacaattatattaattttaatcatgtcgcatctgcttgttaggtaaaaaagaataacattttatttacttcgaggttattcttgaaccagaaagattagagaattgaataagtcgtggtttaacgacttgcttaacgcctaacaagcagtttcgacaattaaaaaattaatatcaaaaataattgaaaggtatacaaaaaaataaaagtaataaaagtttctggtggattaaacttgaagattttttgaattttataaattttattaaacatattttgaaataaataattaaattgaaaattttgacgtccattttaattaaaaatat

SEQ ID NO: 40705 - DNA, 859 bp, Heterodera glycines
ttgagtcccagtgattggaatgccgcagatttgagtcccaatgtttggaatgccggagatttgagtcacagagattggaatgccggagatttgagtcccagtgattggaaagcttgagaattgagtcccagagattgaattgctggtgggttgagtcccagtgattggaatgctggtgggttgagtcccggcgattggaacgatggtggattgagtcctggcgattgaaatgctgtgggttgagtaccagtgattggaatgctggtggattgagtcctggcaattgaaatgctgtgggttgagtcccagcgattggaatgctggtgggttggttcccggcgattggaatgctggtgggttggttcccggcgattggaatgctggtggattgagtcctggcaattgaaatgctgtgggttgagtcccagtgattggaatgctggtgggttggttcccggcgattggaatgccggagatttgagtcacagagattggaatgccggagatttgagtcccagtgattggaaagcttgagaattgagtcccagagattgaattgctggtgggttgagtcccagtgatttgaatgctggtgggttgagtcccagtgattggaatgctggtgggttgagtcccagcgattggaacgatggtggattgagtcccagtgattggaatgctggtgggttgagtcccagtgattggaatgctggagggttgattccggcgattggaatgctggtgggttgagtcccagtgattggaatgctggtgggttggttcccggcgattggaatgctggtgggttggttcccggcgattggaatgctggtgggttgagtcccagtgattgtatgct

SEQ ID NO: 40706 - DNA, 368 bp, Heterodera glycines
ccagaaaaaagggctcatctctttttttcgagaaaatttcacacctcacaaaagcgcttgcgtatcgagacggagggccgggcacaatcgccattttctttcacagatggattttatctttagaggttatcccagaaaaatggctatctctttttttgataaattttatacacatacaaatgctctcgagcatgatagggagggcggtgcgcaatagaccttttatttttgagggaatttttaaatttatactctatcccagaaaaatggctatctctttttttcgagaaaatttaatacctcacaaaagcgcttgcgtatgagacggagggccgggcacaatcgccatttaatttacagaggatttt

SEQ ID NO: 40707 - DNA, 1239 bp, Heterodera glycines
agttttttggttattcttcaagagataccttttgaaaaccaataacgacttaaaattacgattgcttaaattaatataaaatattgaatcgaatcaaaaattaaaaggaaaaatataaataaagtatctatgatatattaacaaaatttaaaaatgaataactacctttcataaaggtaaatttcgagaaaaaaacgcgtaaaaggctgaaaaaacgaaaaaaaattaaatatcgaaataatcttaagatccaaagtatttaaatacataaataattacaataaatttaaataatcgttatttctgttattaaaaaatctgttcaaacattagtaaataaacgtattaatatgaaccaataaaaaaggacaataaccaaaaacaacattcctgcaaatactcaaaatttaaaaaaaaagttttaaaatgagaagcggcaattttgtcaagaaatttaaatgagacattattactttattggtagaggtttattctataataaaaaatttatttatgttgctttaacaaatgcaataaaaattttaacttgacttgaaagttgaaaaattgtattagtttaaggataaaggtataaaaaattaaatttgaaaaagcatcgctttttcccatagtattaaatacgattgaactaaatttaaaatttatagtaagaaatttaataacaaatctaaacacattcaaagatggaatttcttctgtagctgtcaataaatatcttataaatttctaatcattaaacaaaataactgctaatataaaaacaaatttacaaaaatactaaaaaacagcaatccgaatacccgattacaaggagtcgcgccatgacgcaaaagtttaagaattttctaaaaattttaatttataaaatataatgttaggcatttttctaaaatttttcttcagcttcctataattatgaaaaaattagtacaacttaaacaaaatatattctaaatcatttaattaataaaaaaacagagaaaatcgatcaaataatatataaacataaaactaaatactttaaaactatcgattagaaattatcaaaattaataaaaatttaattttcataattttcgcaccaggaataccaaaaaccttactgaacggtaaaccaccaaaggggaccatggtccgaaatattacagcaatttattttacacattctatttcaacagtattacattgagtctacagtatctctgcttatatgatact

SEQ ID NO: 40708 - DNA, 935 bp, Heterodera glycines
ttcaatcaatgggactcaacccaccaacattccaatcactgggactcaaccctccagcattccaatcactgggactcaatccaccaacattctaatcattgggactcaatccaccaacattccattcaacgggactcaacccaccagcattccaatcactgggactcaatccaccaacattccaatcactggcactcaattctcctacatttcaatcactgggactcaacccaccaacattccaatcattgggactcaatccaccaacattccaatcaacgggactcaacccaccaacattccaatcaacgggactaaacccaccaacattccaatcaacgggactcaacccaccaacattccaatcattgggactcaatccaccagcattccaatcactggcactcaattctcctacatttcaatcactgggactcaatccaccaacattccaatcactggcactcaattctcctacatttcaatcactgggactcaacccaccaacattccaatcattgggactcaatccaccaacattccaatcaacgggactcaacccaccaacatttcactgggactcaatccaccaacattccaatcactgggactcaatccaccaacattccaatcaacgggactaaacccaccaacattccaatcattgggactcaatccaccagcattccaatcactggcactcaattctcctacattccaatcattgggactcaatccaccaacattccattcaacagtgactccacccaccaccaatccattcactgctacacaattctccgacaatccaatcactgcgactcaacccaccaacattccttatcacatggactcaacaccaccaccattccaatcacagttgactcaatccgccaccattctaatcactgggactcaatccaccaacattccat

SEQ ID NO: 40709 - DNA, 904 bp, Heterodera glycines
aatatcgtaagattgtttgatagggccagacaagagaaggcaactggttggtaccaagtttgcggtaaaaaaatgagaaaaaagagataactattttttggtcaagaattttttttgtttgcgtttcaaatatcgtaagattgtttgatagggccagacaagagaaggcaactgttggtaccaattttgcggtaaaaaaatgagaaaaaagagataaccatttttggtcaagaattttttttgtttgcgtttcaaatatcgtaagattgtttgatagggccagacaagagaaggcaactgttggtaccaattttgcggtaaaaaaatgagaaaaaagagatagacattttttggtcaagaattttttttgtttgcgtttcaaatatcgtaagattgtttgatagggccagacaagagaaggcaactgttggtaccaattttgcggtaaaaaaatgagaaaaaagagataaccatttttggtcaagaattttttttgtttgcgtttcaaatatcgtaagattgtttgatagggccagacaagagaaggcaactgttggtaccaattttgcggtaaaaaaatgagaaaaaagagatagacattttttggtcaagaattttttttgtttgcgtttcaaatatcgtaagattgtttgatagggccagacaagagaaggcaactgttggtaccaagtttgcggtaaaaaaatgagaaaaaagagatagctatttttggtcaagaattttttttcttgcgtttcaaatatcgtaagattgtttgatagggccagacaagagaaggcaactgttggtaccaattttgccgtaaaaaatgagaaaaaagagataaccattttttggtcagattttttttgtttgcgtttcaatatcgtaagattgtttgata

SEQ ID NO: 40710 - DNA, 1082 bp, Heterodera glycines
gggtaattaaatcagaatctaaaaattcattttgctctctaatatataaaattaattttcttttagtaattttgtaaatataaaatttgaatttaataaaccaaattatttgacttacattcgaatcgaacatgttacaattgtattcataatttttattgcattttatttaattaccaaacattttatttaataatcattttttaattaataatgtttttttttgtttttgtttattttttattttattttttgttaattatttatcttttaatatatgatactttattttgttttatcaatataaatttctattattatcttccagttaaatttatttatttattttttgattttttaagcaattatgattttactcgctgtcctaatgctcatttaggttcacgtttcttttccattattgtttttttcatttttcaatataaaatatattaacaatttttctaaaaattttaattattaaagatagttgaaataattttgtaaaaaattgaagaaataattttatgcatttttttattggaaaatcgcaaaattttgtattttttggacaaaaattgttaatattttaattatcactatttattatgatcataatttattttttaccagtttttatcttggattttttaagtcctttaattcagttaaattttgtttaattaacattaattcgtcgcctttttcggctccatttagattgaaattttcaaaatctccattaacaattccagttttataatcatataaaaatagatgaaaaccaaaaattctttctttactaattattttaattgcttaaaattttactaacgtaaataatttttcttcaataaaattattatatcactataaattttatataattaattaataaaagttaccctataaattatatttaaaaaactattaccatttcagtaaatattttaataatgtgtataaaaaaaataataatttttaacaatatactaatcaaacttgaataattaaaataatgattaaaatctcaatttaagatcctctgaaaagggatgaaatttcagtaataaatgaatata

SEQ ID NO: 40711 - DNA, 788 bp, Heterodera glycines
ctaatttccgtttttggcatttttgcctttgactcaccctaagagcgtcaaacggcagcaacagcaatggcgttggactccgcaacagcagcgctgggtgccaataaacattgcgaatgtgaacattgctcagaatggataagcgcactgataaggagccgaaccgaccgaccgatggacggacggagacgaaaactgaggacaaaatgccaagaatatgtgtgatcagtgacaaattcaaacccaatgccgcgccctttcgattgccaaagtgcaaaaatgccactgataaataaacaaagtgagagcaaaccaatggaattttagcaaaaatggagaatatatccttgaaacacagctgaaaatgggttagccaacagctgctgatgttctaattttgtgaaaaaaatcaaaaagttaaattgacaaaaaattgtttatattctgaatgttgaaattgaatatattttctaaatttcattacccaattttaataaatttattcattggaaaaggaaatttatgagtcataggacagtattttacatttttatgtccttcaaagagcttcatttttggtatttcagtctttttcggcacttttcttccagcaaaacaaaaagaaatagaataattatctttaccggatttttaccatttttccaaaagatgacctgtaaaacggtaaatttatcgagctttctagagcgaaaaagctggttaatttggggtaaatggtaatttttgaattttattaatcaaattaaatttaaaattaatatttttgc

SEQ ID NO: 40712 - DNA, 1361 bp, Heterodera glycines
  unsure (1)..(1361): unsure at all n locations
aaaaagcatgaattacagtgtatgaaaattataatagaaaccaaaattccaaaaacacaataatttatttaaaggttaaatttnaaaaagcatcgaaggaaattcaagcagggcaggtggagtttatcatgaaattatatggaataatagcataaaataaaattgaaaatgctgatgaaaataaatgtaaaagtaaataaaaaataaattgactaattccatcatttttatctttgaaaacaattttgtccagataattgaattaatgtataatgaaaatttaaaaataataaacattatttgaaactgagtaataaaaattttttatagtaagacaataattatttaaaaataagttcacttttaaaataattttttttgactgattaattgatcagaaagatattgatgaaaaactttaaacgcaaaaaatcaaacaaataactaaattagtaagaaaattaaagtagatcatataatttatcatgataaatcttctatcattgatttaaacaaaaaaatatggatttttccttatttcctagaaagtatgcattgttgattgaaaaacgttatttattcgattaactaatttaatcaaatttatttcctacttaaaataatgtttctttttaaaaatatctttatgcattgcaaatttatttggtgaagaaaaaattttaaaaaagttaagaagcgagtcgccgcacagcagggtgctggctaaagggcctattggaacgctaggagcagggatggacgaaatttcgtgtcgttttctttcgtcctacatttattttcgttcattgcgttttaaataaacctatttgttctcttcacttcatcattttattttcttctatcgtgtcctcaatatattctttgctgatttcaagcaaaagcgagttttgttgcaccaaaattaatataaaaaaattcgtgtttaaaaaattggttttattaaattattttcaggtaaattttttttcgaataaagaaaattttgaggatagttttttgtgtgttagcaacttctaaaaagtaccatgtattataatttaattcctaaaagtttagatttttaatttgataatgttattaactgaataattaattagtatggcttatatttatagtttttcaaaaaactataaaatttttgaaaaaaaaactattttcaactaccttggcgttttgcccaaaatttgttaacaaaaatgaaataaaaacgaaaaatacactccctaataatcgacttaatttttttcaaaaaatacactcctaagagtcgaccccaaaattttcaaaaatgcacacataagaaatgaaaaaattctcaaaaattcatctccaaatttatt

SEQ ID NO: 40713 - DNA, 1027 bp, Heterodera glycines
  unsure (1)..(1027): unsure at all n locations
tgctagatattttcacttttttgtcggtaacgccggacacagcttataaaattttaaatttttaacgaaaaaatattcaaaaatctgattttttacaaatctgatatgtagcagtttccataaaaattgaaaattcctggcgtccatcggtgccatcatttgtttttccattccaatttattggaaaatttttttataaaaaacaacgccattcgggtttttacaggaacttcttcaacaacggtccgttgtctacaggtcaaccgaacaatatgttggcatttattacccttgtttgttaattcccttttagtaacactgtgcacgcaatggaggaattattgcgggggatgaatatgtacaaaatcggatttacagaacccaaggggacggtaaacggtgtgccgccaattaaaagatgtcgaccggacattaaggaatgtgcgagagttgtgatggagaccattcggaacggggaggagagcgagccgttcagcgacgaattggcagccgcaatgaagcggctgtgggcggacccggcactgaacacggccacttactcacgccgactcgaattccatcttcacgactcggccaaacagtgggaccaggcttatttgttagccaagactgactaacccattgcccaattcagcttcttagacagtttggatcggatcagcaacccctcctacaggccgtcccagcaggacatccttctgactcggatcaaaacgacgggaatcgtcgaaattcaatttctaatcaaaggcgttccgttcaggtggaccttcggcagagaagcggacaaataatgggaattgagtaatttttagagtttttgacgtcggcggacagcgatcggagaggaaaaaatggattcactgttttgaggatgtcaattcggtagggatttcgcaaattaatttgcaatggtaaaattgccaaggtgattttcgttgcggcatttccgagtatgccaagtgctgtttgaagacgagaccaccatcgnatgatcgagtcgatg

SEQ ID NO: 40714 - DNA, 1233 bp, Heterodera glycines
  unsure (1)..(1233): unsure at all n locations
taattcagtagaatcagtgcccatctctgtagacgagacgctgaaaaaatcgggattccgtttttggacccaaaaatccccagcaaaggacggtgatcagtgcgtaaaatgaattttcgaccaaaaatatattggtggaatttntgaattgcaaaaatgagtcncagtccttccttctcaatttgcgagtaattttgttccgtctttgataatgtccgggcagcgtgttgaaaaactttttcttttccgtccggaaaacggtgagaaattgttgcgccgattcctttgttgctggcgtcagctgtgacaataattggcaaatgcgggtcataatgcgttaatgctaaatcggataaaaggattgcttttgcttgatcgaaagcttcgcggtgcttttcattccattgccattccactccctgtttgagcaactcatccaatggtgctctgatttgatggatgtttttgatgtactttccacagtaattgattgccccgaggaatgatcggagtgttgtgatgtccgtcggtggtggcatttcctgcagtgctcgtgttctgttttgatcaggacggataccatcggacgaaacaatttgacccaaaaatttgatttccttaactaaaaatttgcatttgtccatttgaattcggaacccgaattcttgaattcgcttgaaaaatttaaaaattgttgaaaaatgttcgttcactgtgcttgaagcaatgatgaaatcgtccatataaccgacaacgccaggaattccgcttgccaattgatccattgtccattgaaaaatgcctggtgcacttttgattccgaatgccagtcgttggcattgataaagtcccttgtgagtgttaacgcctaaaagttgacgcgactgttcatcaacgctaatttgcaaataagcgtccttaaaatcaatttgggaaaatatttttgctccgtttaattgagcaaaaagtttctcaggccgtgggagcggatgatgatgtggttcgagtgccgcgttgagtccggtgctaaagtcgaaacatatgcgcacttttccatttgctttgcgcactgccacaattggtgcggcccatctgctgtagtcaacttttttgagaacacccaactcgatcaatctgtccaattcggtgtcaacatcattttgaacactgcaagggtaccggacgtgtcccacagaaaaccgaagaggaacttctcctagagtctgtagttgt

SEQ ID NO: 40715 - DNA, 1165 bp, Heterodera glycines
ggagaagcaaggggctgtgctggggcctaaaattgggccacatggagaataattctgattctgaaaaagtcccagaaataactattttttctttccataccttcttgtagagctcgagctgctctttccaatggtcttatcccggtctcgatccgtgccgaactcacaaagttatggagtgaaatgtgaaatattgttttcaccacaaggcattttttctgaaaaccggattcaaaaatctgaggtttggtataaccgttttagaaatagcgtagaaaacagcttcgatatcaagaaaccaagtcaagtccagaaaggaatattttaaaacgatttcgttttgttttggcattatgataccgaataactttcggaaattatggaaacaaaattggagaaattcgaataattttttgactgcaaatttttttccttttttgaattgggtttaaaaaaattttaagagaatttttgattattaatttgaagtcttgaatttatttgacaaatccaagacttaaaactgggagaagcaaggggctgtggctgggggcctaaaatttgggccacattggagaattaattctgatttctgaaaaagtcccagaaataactattttttctttccataccttcttgtagagctcgagctgctctttccaatggtcttatcccggtctcgatccgtgccgaactcacaaagttatggagtgaaatgtgaaatattgttttcaccacaaggcattttttctgaaaaccggattcaaaaatctgaggtttggtataaccgttttagaaatagcgtagaaaacagcttcgatatcaagaaaccaagtcaagtccagaaaggaatattttaaaacgatttcgttttgttttggcattatgataccgaataactttcggaaattatggaaacaaaattggagaaattcgaataattttttgactgcaaatttttttccttttttgaattgggttcaaaaaaattttaagagaatttttgattattaatttgaagtcttgaatttatttgacaaatccaaggctgtggctgggggcctaaaatttgcgccacattggagaattaattctgatttctgataaagacccagaaataactattgtttctttccataccttcttgaagagctcgagctgctct

SEQ ID NO: 40716 - DNA, 898 bp, Heterodera glycines
catttcaatatcgtgtgagtgtttggtagagccagactagagaaggcaaatgttggtaccaagtttgcggtcaaatccccaggagaaaaaagagagccattttttcggcaagaatttttttcgttagcatttcaaatatcgtgtgagtgtttagtagagccagactagagaaggcaaatgttggtaccaagtttgcggtcaaatccccaagagaaaaaagagatagccattttttcggcaagaatttttttcgttagcatttcaaatatcgtgtgagtgtttggtagagccagactagagaaggcaaatgttggtaccaagtttgcggtcaaatccccaggagaaaaaagagatagccattttttcggcaagaatttttttcgttagcatttcaaatatcgtgtgagtgtttggtagagccagactagagaaggaaaatgttggtaccaagtttgcggtcaaatccccaagagaaaaaagagacagccattttttcggcaagaatttttttcgttagcatttcaaatatcgtgtgagtgtttggtagagccagactagagaaggcaaatgttggtaccaagtttgcggtcaaatccccaagagaaaaaagagatagccattttttcggcaagaatttttttcgttagcatttcaaatatcgtgtgagtgtttggtagagccagactagagaaggcaaatgttggtaccaagtttgcggtcaaatccccaggagaaaaaagagatagccattttttcggcaagaatttttttcgttagcatttcaaatatcgtgtgagtgtttggtagagccagactagagaaggcaaatgttggtaccaagtttgcggtcaaatccccaggagaaaaagagatagccattttttcggcaagaattttt

SEQ ID NO: 40717 - DNA, 1337 bp, Heterodera glycines
  unsure (1)..(1337): unsure at all n locations
cgagaagaanaccttttttcacagagcaaaacagtccaatgtattgccaagcttgatgcagatttatttaatcagccgctttatctcgtcaatttctgtgagttggatattgaaattttgccaaatagcagtaattttctgataatagtgggtaacgcagcagcagcggctacgcgctaccattttgaaattgtcggattgaaaatgtatgttaagaaagtgtcattaatggacggtctagcattggacattgcacggaaattggaggtgaagcccgcccggtacgctgtgcgaaagacaatgatgaagtcgttgttcattagtcagggacgatttgaatttaatgcgaatctgtttatggaccaaatcccccgtcggataacgttgggtcttgttgcaaactctgactatgtcggagatcctcggcgtagtccttttaacttccaaccattcaatgtgcgtgagatttccatagttgccaacggcagagcattcccgcaggctccgtactctttggactacccacggggaaaatatgtccgagcattcaacgacatgaacgaggctgtaggcttcagcaacacaacagaaggtaacggcataataatttggtacaacccattgtatctacgttttcaatatgaccaacagtggagatgatcaacccgggctttttgacttgatcaggaatggaacaacagctgtgagcattaaattcaatgagggcgtgcccatcggaggaattgtactggttgtgatgggagagtgtgatgctctagtgatgctggataaaaacagatcgatttcaactgacaccaccatttaagttttttcataagaaataaacatgaagaactcactttcttttgccgttgttttgttgatcgttctaattcaacaccaaaccctaactctcattgttgaggagggagtaaagccagaaaatattcctcactataacgaatgggcgaaacagcttgggcttaaagctaatttaaacaagacaacaaaaaccaagaatggtgtggcagcatcaactgtaaaaactacaactgtaaaaacaaaagtgggcacaacatcatcaaacagtactaccaaaggcacaccacccaaagctgcaaaacaattttcagatttaaatgcccctgtttcaatttttccgggaattcaactgtgtaaggacatgccagctgctgataattacatgnggcacatcttctgctgggctgtgtttgcactttatgctatgatgnatgtatctctgatcatttatncattacgctcgatactttnnggataaacacggcatcatgagaaaaaacacattaaaaattcaa

SEQ ID NO: 40718 - DNA, 866 bp, Heterodera glycines
taacccccgatgcataatccgttccggagagcctcttcaaaattttttccattaccctaagagctgcggcaattgtgaattaattctcagaaaaatggctatctctttttaggacaattttctatctcgtaaccccgatgctaatccgttccggagagcctcttcaaaattttttccattaccctaagagctgcggaaattgtgaattaattctcagaaaaatggctatctctttttaggacaattttctatctcgtaaccccgatgctaatccgttccggagagcctcttcaaaattttttccattaccctaagagctgcggaaattgtgaattaattctcagaaaaatggctatctctttttaggacaattttctatctcgtaaccccgatgctaatccgttccggagagcctcttcaaaattttttccattaccgtaagagctgcggaaattgtgaattaattctcagaaaaatggctatctctttttaggacaattttctatctcgtaaccccgatgctaatccgttccggagagcctcttcaaaattttttccattaccgtaagagctgcggaaattgtgaattaattctcagaaaaatggctatctctttttaggacaattttctatctcgtaccccgatgctaatccgttccggagagcctcttcaaaattttttccattaccctaagagctgcggaaattgtgaattaattctcagaaaaatggctatctctttttaggacaattttctatctcgtaaccccgatgctaatccgctccggagagcctcttcaaaattttttccattactctaagagctgcggaaattgtgaattaattctcagaaaaatggctatctc

SEQ ID NO: 40719 - DNA, 915 bp, Heterodera glycines
gtgatgaaatgttgtggggtgtcccagtgatgaaatgcaggagaattgagtgccagtgattggaatgctggtgggttgagtcccagtgattggaacgcaggagaatagagtcccagtgattgaagtcctggagggttgagtcccagtgattggaatgcagtgcagtagaacagagtcccaatgactggaatgctggtggattgagtgccagtgattggaacgcaggagaatagagtcccagtgattgaagtcctggagggttgagtcccagtgattgaaatgttggtgggttgtcccagtgattgaaatgcaggagaattgattcccagtgattgaaatgttggtgggttgagtcccagtgattggaacgcaggagaatagagtcccagtgattgaagtcctggagggttgagtcccagtgattgaaatgttggtgggttgtcccagtgattgaaatgcaggagaattgattcccagtgattgaaatgttggtgggttgagtcccagtgattgaaatgtggtgggttgagtcccagtgattagaatgctgttgggttgagtcccagtgattgaaatgttggtgggttgtcccagtgattgaaatgcaggagaattgagtgccagtgattggaatgctggtgggttgagtcccagtgattgaaatgctggtgggttgagtcccagtgattgaaatactggtgggttgagtcccagtgattgaaatgttggtgggttgtcccagtgattgaaatgcaggagaattgagtgccagtgattggaatgctggtgggttgagtcccagtgattgaaatgctggtgggttgagtcccagtgattgaaatactggtgggttgagtccccagtgattgaaatgttggtgggttgtccccagtgattgaaatgcagggacctgca

SEQ ID NO: 40720 - DNA, 969 bp, Heterodera glycines
  unsure (1)..(969): unsure at all n locations
ttattcaatttttaaaatttaatatttgccggcggcgaaggccccccacgaggccgcgaagaggccgagtgagtaccttcggtgcaggaaaatattaaattttaaaaattttttaattgctttttaaatatgccaaaaaatgtaggcttaacttttttagtgaaaattcgatcactcatattttttgctaattgagcagaagcgtaccaaactttgcagggatactccccggtaaaggactaacttacactgaaatgagcgccgagctagctggctcaaaaaaattttcgaaaatctgagtctttcgtttttatttattttttgcaaaattaattcttaaatattttttcagaaagggttctgaaacgcaccaaattttatttacatgttagtttaggcactctgatgctttttctatcaaaaagggagatgaataaaatttttaaaaatttttaattcctttttaaacaggccaaaaagtttaggcttaacttttttttcagaaactgatcagaagcgcaccaaactttgcagggatactgaaaggaagagaaataacctattttaaatattatctagtcagttcatttaaataatttttatccaaaaaatttttttttgggttttcggggcagtccccctgaaccgatgcgcccagatttatggggagaccgaatccttccggaatagcttcactatagcctgtactttaattctgcgttggatttttgctccccataattgtttgagtaccccaaacggacacttgaaaaaatcgatttatttttgttttcggggcagtccccccgaaccgatgcgcccagatttatggggagaccgaatccttcgggaatagcttccctatagcctgtactttaattctgcgttggatttttgctcccccataattgtttgagtaccccaaacagagacactntgaaaaaatcgnnatttttttgttttcggggc

SEQ ID NO: 40721 - DNA, 282 bp, Heterodera glycines
cgctgacccgtccccgattttgtcctctttgtcatgcttcaatgtcaatttgattccactgatcatcactttcccattcaatcgcttccttttcccattttgtccatttgctttcgtctcgcgcaattggacaacggacgaacagaaaacgatggctattggaaattcttttaagcgtcaattgtttttgagtaaattcgttggtctgatcaaagggcataacggagtcagcaaagggccgcggaaaccaaacggaaacaatgaaattggcgggggaagaag

SEQ ID NO: 40722 - DNA, 1027 bp, Heterodera glycines
tagaaaatagtcccatataacccaagacataaaaagtgcttttgcgcaacatctcccctctggtgtctttcatttagaaaaggcactgaaccgtatacaaaaactctcacattctaaaataactcagtaaaaacagcttttaattttaattgttctgaaaccaataattttatctgtagaaaatagtcccatataaaccaagacataaaaagtgcttttgcgcaacaatctcccctctggtgtccttcattttagaaaggcactgaaccgtatacaaaaactctcacattctaaaataactcaattaaaacagcttttaattttaattgttctgaaaccaataattttatctgtagaaaatagtcccatataaaccaagacataaaaagtgcctttgcgcaacaatctcccctctggtgtccttcattttaggaaggcactgaaccgtatacaaaaactctcacattctaaaataactcaattaaaacagcttttaattttaattgttctgaaaccaataattttatctgtagaaaatagtcccatataaaccaagacataaaaagtgcttttgcgcaacaatctcccctctggtgtccttcattttaggaaggcactgaaccgtatacaaaaactctcacattctaaaataactcaattaaaacagcttttaattttaattgttctgaaaccaataattttatctgtagaaaatagtcccatatgaaccaagacataaaaagtgcttttgcgcaacaatctcccctctggtgtccttcattttagaaaggcactgaaccgtatacaaaaactctcacattctaaaataactcaattaaaacagcttttaattttaattgttctgaaaccaataattttatctgtagaaaatagtcccatataaaccaagacataaaaagtgcttttgcgcaacaatctcccctctggtgtccttcattttagaaaggcactgaaccgtatacaaaaactctcacattctaaaataactcaattaaaacagctttta

SEQ ID NO: 40723 - DNA, 645 bp, Heterodera glycines
aaatctcttttttacctcttttttttatgggaccagtaaaatcgatgattacccaacaacagcagcaaaaccaagaagttcaagcagtacaacaacaacagcaaattttgatgggaaatgagatgaagatggacaacagcaaaaatggagaaacaagggaagaggagggaaatagcattggggaaggaggagagacggaagagaaagagaggaaaaggaaaaattcggcgcaaaaaggaggagagaatgaagctgaaaagagaaaagaacagcagcaaatcggcacttaatgttgccggtgctaattgctaattttgtgtgtcgtaaatcccgcgtcaaaatcccgaaaattaattgccacaattttcaaggagaaattcatacattcgatagatagcaagccatttttatacatccgatttatttatatatatttgagaggtttttcttcataaaattgcatttgatcactgatttgaattatgatcgatcgaccattctcaattaattaattcatttctttcttatgcggctgatcactgtttttgttgttttgtccgtcactcatttgtcagcagacgacgccccctttttcgctgctttgtcccgtttcttctgccagtggcggagacaatggccttaatt

SEQ ID NO: 40724 - DNA, 995 bp, Heterodera glycines
aaaaatgtctatctctttttttggcaatttggtaatagaattctctttggaaacaatgacagtggctgtcatcaggtgttatgctctaaaaatgattttggggccgtttgagtatatgtgaggtatggacggtccaaaaaaatggctatctctttttttggcaatctggtaatagaaatctctttggaaacaatgacagtggctgtcatcagttgttatgctctaaaaatgattttcgggccgtttgagtatatgtgaggtatggacggtccaaaaaaatggctatctctttttttggcaatctggtaatagaaatctctttggaaacaatgacagtggctgtcatcagttgttatgctctaaaaatgattttcgggccgtttgagtatatgtggggtatggacggtccaaaaaaatggctatctctttttttggcaatctggtaatagaaatctctttggaaacaatgacagtggctgtcatcagttgttatgctctaaaaatgattttcgggccgtttgagtatatgtgaggtatggacggtccaaaaaaatggctatctctttttttggcaatctggtaatagaaatctctttggaaacaatgacagtggctgtcatcagttgttatgctctaaaaatgattttcgggccgtttgagtatatgtgaggtatggacggtccaaaaaaatggctatctctttttttggcaatctggtaatagaaatctctttggaaacaatgacagtggctgtcatcagttgttatgctctaaaaatgattttcgggccgtttgagtatatgtgaggtatggacggtccaaaaaaatggctatctctttttttggcaatctggtaatagaaatctctttggaaacaatgacagtggctgtcatcagttgttatgctctaaaaatgattttcgggccgtttgagtatatgtggggtatggacggaacgaaaaaaatggctatctctttttttggcaatctggtaa

SEQ ID NO: 40725 - DNA, 907 bp, Heterodera glycines
ttttcctgctttgatgttttccgtgcacaccgattcgctcccaagggtaccccaaaaccagctttcttcgtcactggcggcagaagctgaaattatacaaaaaatgggacgaattttgcctgaatcacgcaatttttttttgaggcttccccggcataaaattataggtccaaaatttcaaacaatttaatttttttgtgcacttggtaaaaaatattagggtatctgaaaactaaaaatggtttgaagtcggaaaaatttttggaaaattcctatggtgcggggcacaaatgatccgggtcttgcgggggacgaaaccaattgggtagcactgtttttcgacaaaaaaatcgtcataacttctgccaaaatcgacaaaatttaacatttttggtatcattcaatagcctttaatattctctatttccttgcaaaatttacgaaattttttatcatatttgaacaaagttatgggcgacaaaaattttcttgaatttcgcataaatttatagagaatctttaaggctgggctattcgaatgatattgtaactttgtcgtcttcgacaaaaatattatagcgtttgcgtttttttttttgacgttttaccctctcaaggggtagaaaaccgaagcccaacggaacgggctctaattgagaaaatatgggcaattttcgttttttttgctagccgaacctccgttttgaaacaccaattttggcttgctgctatgctgtgggaccaactggagcatggaagtgcaaaaaaggccattcaaagtgtgcacaagtcgtgccaatttgcgttcatcatgctcatgagtttcggactgactaaaggtaatgagagtaataatggcattttcaggactaatttacgataattagtcaaactggattttgactac

SEQ ID NO: 40726 - DNA, 601 bp, Heterodera glycines
  unsure (1)..(601): unsure at all n locations
acaatttcactttttggccncattttttatctctttccctattccatatntaaatggcccccaaatcactcccaaatcattcccaattcacattcatttcacttttacaggcaatcaatgcctatccctttgcccgctctcacacactctctctctctttctccctttgcccatcctcggaccacttttgaccatttcttttcctggtccctttctctctttccacctttttgcacttctcctggcccaacatttgtcccacttggattgtcccggtgaatcccgcatttctgtgattatccccccgacggcccctctttctgtgattgtgatcatttgtccccccggtgatggcgcatttcatttttttttttttgtattgttcacatttaaatatcggtttaattacccaagtttgagtttgagagggaacaataaagcattattttgttgtgtgaattgtgctttcgaccaattgcccccgacccaccgaccgagcccatctgccccaaccggtccccgtggcactaccttgtgcaaaatttgtggaggtttccacaattggcgctcctgagtgggatcttcgtccgccaacaacagc

SEQ ID NO: 40727 - DNA, 852 bp, Heterodera glycines
gtcctcgtaaaaaaaatttgggggcgatttgaatgagaatagctttagccaggttcgatgaagttttggtaagccaaaaaaaaatccaaacatttaaaaatctataaaaaatttaaaaatgagaattcatgcgagattttctggaaataagcttaatagggcctagttaagctgtaaaaaaaatttggggcgatttgaatgagaatagaaagagccaggttcgatgaagttttggtaagccaaaaaaaaatccaaacattttttataaaaaatttaaaaatgagaattcatgcgagattttctggaaagaagcttaatatggcctagttaagctgtaaaaaaaatttggggcgatttgaatgagaatagaaagagccaggttcgatgaagttttggtaagccaaaaaaaatccaaacatttaaaaatctataaaaaatttaaaaatgagaattcatgcgagattttctggaaataagcttaatagggcctagttaagctgtaaaaaaatttggggcgatttgaatgagaatagaaagagccaggttcgatgaagttttggtaagccaaaaaaaaatccaaacattttttataaaaaatttaaaaatgagaattcatgcgagattttctggaaataagcttaatatggcctagttaagctgtaaaaaaaatttggggcgatttgaatgagaatagaaagagccaggttcgatgaagttttggtaagccaaaaaaaaatccaaacatttaaaaatctataaaaaatttaaaaatgagaattcatgcgagattttctggaaataagcttaatagggcctagttaagctgtaaaaaaatttggggcgatttgaatg

SEQ ID NO: 40728 - DNA, 997 bp, Heterodera glycines
ataaccgtgttcagcgacctcgaaaacccctaaaaatatgttttccttttattttggaatttggatttttgttcgaattggtcaagtttttaagataattttttcgaattttttaccgtttttcttaaaatataatcattcatttaaatactccaaaatttcttcttgaaatagtttctttcattttgaatcggtttatgaattttcaggatttttgaaataaatgatttttgttgtagtgttttctttttgatccgctttgacccttttgttgataaaaaataaaaataataaaataaattatttcatttcaattggaaataaatatttgtaaactaaaacaatttgatgatggaattataaaatttttagctatattatttaataaatgaagaaatgagaatttattgctttagattacttataaaaagtcaggacgaatgaaaaaaactttcattttagtttcacccaaatcagaattatttttatttaaaatctttaaaatctaatatttaagggttgtaagggttagggtatttaggcaaaaaccgggttcgggtattaccgggtccagaaaagacgggtccgcttcgggtttcatgtttttaaaccgatccagtgtccgatacccggtaaaaccaggtattaaaaaaattttgaatttttattttttttcaaaattataatttaacagaaaattttttgctgtaggaacaggccttgcgccacatgaaggaacgacagcagctgcaattgcagcaggaagacatggaagctgactggtacatgcgccaagcacgaggagacgaggtgggtggtgatcggatggcatgggacgttgaccaggatgcaattttatttatggacagtttgacgagactatcggccaccaagacttccggctgattcaagccgatccggggcttcattcgcaaaaccgcatcgcaatgaccagacttcagccgcagaagccagcagcgccatgatattgcatttt

SEQ ID NO: 40729 - DNA, 1082 bp, Heterodera glycines
tgttggctgtctatggtgctaagtgggcaacaaaagttagtatatatcagtgcaaagtagtagaatggagccataattttttgcattattatttcattaggatgacacgcatattgtaaagcggcgtcagtgttcagagctggggggggggggggatgagtctcgggattattaacttccccccccccttcctctagggcatacagtagtacctgggttagactttctactgtgttacggtaagatttttcaaatttgaggacggcaaagtgaagcgaagtgacacgcgagaagaagccgatgtttatgaggaggaggaggccaagtggggggaagagaaagattttttgcaactgtcaaccaacggacattttgaagaaatgggtaatggcgttttgatgaaatgggtagataatttgtagaaataggtaatggcactttgaagaaatgggtaatggcattttgaagaaatgggtagggttggcattttgaagaaatgggtagggatggcattttgaagaaatgggtagggatggcattttgaacaaatgggtagggatggcattttgaacaaatgggtagggcattttgaagaaatggataatggcaattgaacaaatgggtagggttggcattttgaagaaatgggtagggatggcattttgaacaaatgggtagggatggcattttgaacaaatgggtagggatggcattttgatgaaatggataatggcaattgaacaaatgggtagggttggcattttgaagaaatgggtgccgaaatgggtacggaattttgatgggtagggccgggggtaggaaactgtcgtaaatttaaaatttggaatttgttggcttaggaaagcccaacaaagcccaagaacatctcctgttttatggttttaaaatttaaataataaataaactcttttacatttggcgtattgtcattcaggtttcaatgcaaaatttgcgaatttaaaattttctaaccaattttaaattattttttatatcaaaatttaatttaaaataaaacttaaaataatttttaaaatttttatcttaatttatcaatttta

SEQ ID NO: 40730 - DNA, 1143 bp, Heterodera glycines
atgacatatgaaattgaaatgccgtttctcatttttgtgcaaaacaaatggcgaaattggcgcaatataactacaatttaaatattttccatctaagttttattattatattgcattttaaatgattgtttaggcgcagttaataaatttaaagttgtactgtaattagattaattaattatataattgctttgtgttgtccgttccttcgatttcctcccctccttcaaaatgttttgccgttatcctttcgctgtgcttttgcttttcggctttggcattgtttgtgccaatgttcggtccgatttatctgaggaagacgaaactgatgcttttggtcccccccccccccccccccgccttcaaaattttgaaaaaaaaaaataaaataatagaagactcagcattttgaaatttttataacaactgatgacaagctaatgtgataaaacaggttaattcttttcctttcagtatccctgcaaagtttggggcgcttctgataagtttctgaaaaaaaagttaagcctaaactttttggcctgtttaaaaaggaattaaaaatttttaaaatatttattcatctccctttttgataatataagagtcagagtgccttattcaacttgtaaataaattttggatcgcgtttcagagcagtttctgaaaaaaaatttatgaattaattttgcaaaaataaataaataatgaacaagctaatgtgataaaacaggttaattcttttcctttcagtatccctgcaaagtttggggcgcttctgataagtttctgaaaaaaaagttaagcctaaactttttggcctgtttaaaaaggaattaaaaatatttaaatatttattcatctccctttttgataatataagagtcagagtgccttattcaacttgtaaataaattttggtgcgtttcagagcagtttctgaaaaaaaatttatgaattaattttgcaaaaataaataaataatgaaccctcctccttaataattttcctgcgcccaagggcgcactcagccgcttcccttactcgtggtgggccttcgcccccccccgacgctgatgccgatgaacccccaccaccacgttgaagccgatatttttacggatgaagtccaacaccaccgga

SEQ ID NO: 40731 - DNA, 879 bp, Heterodera glycines
caacggtgatcagaagaggtacaccagtgatcagaacaggtacatcagattagaagaggtaaactttgattagaagaggtggaacaatgattagaagaggtacagcagtgattagaagaggttcaacagtgattagaagtagtacaacagtgattagaagaggtacaacagtgattagaagagatacaacagtgattagaagtagtacaaatttgattagaaggggtacaacagtgattaattagtaaattcattaaattaaaatgaaaatattttttaacaaatttaatttaaaaaaatacatgaaattctatcaattaaaaaaataattaatttaaacttataaaatgtattcatcaaaaaaaaaattaatttaaatataattttttatttattaactcaacaaaatattttaaattaattaaaatcattgaaaataacgtaaaaatgcacagaaaaataatgttacaccgtccggactcgaactttgcccccccccccaaaaatgatgcctcagaatccccaatcacacagggattctgagatcttgacgatgtcaaaagtaaaatctgatcacgtattcgtgatcagcggcccaaataacgcctaaagacatgtttttggaagatttttggtgaaaattttttttcacttaaaaaccatgtgcacccccctttggtcccgaagcccaaaatcacttttatttttatatctttttttaaagaagtgataaaaataccaaataaattttataaaatagagcaagaaattgcggattttagtattattttacttttccaaaataacttttcagaatcgagttcagaatttttttctgaaaattcgaatttttccagaacttctggaataacttttttt

SEQ ID NO: 40732 - DNA, 1016 bp, Heterodera glycines
tccatattttagcaaattatgtaaattttatttttaaatatataattttcatatttgtcgatattttgaaaaactccaacaattttaggcaccaaggagtccagaaattaaaaaaaatgacccaaatgctaattttggtgaaaatttttggctagaaatggtttgaaaaaatgaaaagccaaaaaaggcttaaatctggaaaattttcaaaaaaaaatcctagggggttaggaaaattttctgtaaaaaatgagtatgcctgccaaaaagagcacaaaatactctctaccaaattgattttggtttaccagaaaaaatttcccaaccccctaggaatttttttcgaaaattttcacgattttcagtgtattttaggatgttcagatcaccatgaaggagtgatctgaccatgttggtcaaaaagacttttttgatcaggaccaagagaatgattagcaggaattttttaaaaattcctttttacttcttgacaaaattttcattaactgttttttcagattttttttaatgatttcattaattaattcaattggattcaaaaccaaatttactcaattttaatcaattaaacttaactgatgctattaatgaattaaattggattcattccaaattaatcaagttcaatcaattaattgagcaaattaattaattcattaatcgatttttatataaaaataaaaacaatatttatcaaaaaaatattttagaaaatattcaaaaatttttttatccatttaacaattattcgattattattttttaattaaaatatttctcaccgaatttttattgctccgccgttgtttgccacatagctcagcggtgggggtagaggtggtgaaaattctggcggcgcctgcgttggcctgaaaaattgacttgttatttattttatcatgtaaaatttataatttcaatttttgcaaatcaaatttcattttttaccacccgcccaaaactcacattggccgcgatccgacgagacctccttg

SEQ ID NO: 40733 - DNA, 1380 bp, Heterodera glycines
  unsure (1)..(1380): unsure at all n locations
tccctaattggcattcattcgtttttctattcaattaaaattaattttgtttttaagggcgcttttctcttcgccgttctgctcaatttcaagcacatttttctgtattattcgcctgcgtttgtcgccttttatctcttccgttttttgtttccgatgggtcgccaatttttgcgccgctttttttcgctcgcttctgttgttggcgttgtgtccatcgcttcgtttggccccttctttttgatcggtgaattggaattaaatgtttgacattgaaaaacattttctgtgttgttcttatctgagaattttgtgtcagtgggcgatgccgagatgcgccacttggaaaatttgcaaaaaaaaatttggagaatccaagatatagactcgcgttttggcctattttcccgttttcctgaccacaaaattctttttactcccctctaatagagccaccaaagtaaaaattgaatgtttttttcaaatttataaactgttttttagttttaaattttcagatggttttttcgccctccggcacattttggcgcgtctgttccccttcaaacgtgggcttacccacgcttgctgggcaccaaatttttgggcactttacaattttgcggatttatttgcgcataaaattgtcgccaaaattgtgtcatcgacaaattgcagcgcgtggcattggctgttgaagcgctgcccgcccggcacgcccgactacacgcgggggcttgttcaggtgactgactcggcacggattggtcttttttatgccatgcaaaccgaaatgccatgttaagaattgcaaacaattttctatatatttcaagggaaaaatggttttccataaattttaaaaatttaagttttcctgaatacgataataagaaaatttgagtgggtggggtaaattttaagcaaatgctttttttgctaaaactaatgggttttaaataaaattaaaaaaagaatttttgcgtataaagtcggctttaattttaatggttccccatttcacacaaattaaattttcttttactcacttttcacatttcctttttacacgccccactttatttatcagactttggcaggaatatgagcacgccgttttgccaaacatcagtctttttaagaaattcggaaaaccgccggacgaatgccttttgatttcgctgaccttttccgcctttgccttcttttgattcggttggcatgtccatgaaaaggtgctatgtcattatttaaaaaccatcattatgtgcgttatttaaaaaaaggggcggaatgngcatttttgcttatggctttgctctaataaaaggcaaatttttaatccggtgttattattcgagtagatctaagactatagag

SEQ ID NO: 40734 - DNA, 1169 bp, Heterodera glycines
  unsure (1)..(1169): unsure at all n locations
ggggtatgaaaagtttatttgggaaaaaaagactttacaaaataatacccctgggagaagggagtgggaaacatgatttcaaaatttcnnaattttttctagtctaatctactcaaaacggctcagaatcaaataaaaaaacattcacggtgcgaaaaatggggttgacaaagtttattgggaaaaaagactttacaaaataatacccctggagaagggagtggaaaacatgatttcaaaattttcaattttttctagtctaatctactcaaaccggttcagaattcaataaaaataacattcacggtgcgaaaaatggggtttgacaagtttattggggaaaaaagactttacaaaattatacccctgggagaagggagtgggaaaaaatgatttcaaaattttcaattttttctagtctaatctactcaaaaacggttcagaattcaataaaaataacattcacggtgcgaaaaatggggtttgaaaagtttattggggaaaaaaagactttacaaaataatacccctgggagaagggagtgggaaacatgatttcaaaattttcaattttttctagtctaatctactcaaaacggttcagaattcaataaaaataacattcacggtgcgaaaaatggggtttgacaagtttattggggaaaaaaagactttacaaaataatacccctgggagaagggagtgggaaacatgatttcaaaatttttgttgaaatatttgtcgtgctctgaagggcgtgggagggggggggcgaaggcccaccacgaggccgcgaagaggccgagtgagtaccttcggtgcaggaaaattattaaattttaaaactttttaattgctttttaaatatgccaaaaaatgtaggcttaacttttttagtgaaaattcgatcactcatattttttgctaattgagcagaagcgtaccaaactatgcagggatactccccggtaaaggactaacttacactgaaatgagcgccgagctagctggctcaaaaaaaattttcgaaaatctgagtctttcgtttttatttattttttgcagaaattaattcataaatattttttcagaaagggttctgaaacgcaccaaattttatttacaagttaataaggctctctgatgctttttctatcaaataatggaggt

SEQ ID NO: 40735 - DNA, 945 bp, Heterodera glycines
aaaaatcgattttttcaagtgtccgtttggggtactcaaacaattatggggagcaaaaatcccacgcagaattaaagtacaggctatagggaagctattccggaaggattcggtctccccataaatctgggcgcatcggttcggggggactgccccgaaaacaaaaaaatcgattttttcaagtgtccgtttggggtactcaaacaattatggggagcaaaaatccaacgcagaattaaagtacaggctatagggaagctattccggaaggattcggtctccccataaatctgggcgcatcggttcggggggactgccccgaaaacaaaaaaatcgattttttcaagtgtccgtttggggtactcaaacaattatggggagcaaaaatccaacgcagaattaaagtacaggctatagggaagctattccggaaggattcggtctccccataaatctgggcgcatcggttcggggggaatgccccgaaaacaaaaaatcgattttttcaagtgtccgtttggggtactcaaacaattatggggagcaaaaatccaacgcagaattaaagtacaggctatagggaagctattcccgaaggattcggtctccccataaatctgggcgcatcggttcggggggactgccccgaaaacaaaaaaatcgattttttcaagtgtccgtttggggtactcaaacaattatggggagcaaaaatccaaagcagaattaaagtacagactatagggaagctattcccgaaggattcggtctccccataaatctgggcgcatcggttcggggggactgccccgaaaacaaaaaaatcgattttttcaagtgtccgtttggggtactcaaacatttatggggagcaaaaatccaacgcagaattaaagtacagactatagggaagctattcccgaaggattcggtctcccccataaa

SEQ ID NO: 40736 - DNA, 630 bp, Heterodera glycines
tagagcaaaaccagtttaaataatatattttacatgaaaagtttaagcatttaataaatatttttgtaaaactgcagctcttcaaataaaaaacattaatattaagaaacaagaaattgattactgcaatgataaaaatattgcaaaaaaatactttaattaataaaattaaacccatatttcttataaattatactaatccatgaaataataattaaataattatgtttcaaataaaagtaacaaagaacaatgattctggtgttcgtatgggattgacatgataagtattctcaaatataacaatagaatttttaaaaattaaaaaatcgtatataaattattaaaacgatttccaatgaaacatcttaatataattctgttatttttgatagctatttgccaataaaagcaaacacagcaaattgcaatcaagccttgctccatggaggagcagaaaactttcgtgctgtcaaggcttgaagacgacaactttttgatcgccattgttcagaaacacccccaatgggcaatgcagatatcctacaaactcttatggcaatttaaatgagacatgagcacaataaaaaaaattatacgtttgacaaatcaataaataattttcatcaa

SEQ ID NO: 40737 - DNA, 828 bp, Heterodera glycines
atttattggacattattaagcggacgaagagaaagaagagaagagagacaatgagaaagagagagagagagaaagggagagagagagagagagtggaaaatggagagggcggaaaagaaagagacaaacgaagaaaacgaatttgaacaattagcagagaataaacaatgaatgaatgccaaacaaaggcaatgccgaaagcaaaagcaaagacaaaaaattgccaaatgacgaagcataattaattaattaataattaccaagtgattaaacaaagcacgtgattaggcatatatgaattgaataaaaaagacagaaaacatttgtcaaaaggtcggacaaaaattgattgataaaattgtcaacaaaaacataccgagaaacgttagtgctgtcggcaggggtggaccgatcaattcgccatgagacgcaggcgccacatgtccctctcctgctggggctctcccgtttccgcaccccctcttccgccctccccctctgccaaatcctaccctttcctccccttcccttatccccaccacatatctcatattagaggttaaaggttcaaaaaatagtagaaaacatttgagaattttatgcactgtatttgatatctctatcaagaacataagaaaagttattcctatatttttgcaaattttcaaattgtcaaaaaaaaattcactactcggttctgacaagatattttgcaaaataaaaatagcccatatatccgctattttttgctttatttgataaattttatttcatgtttttatcattttttagtaaaaggttctaaaaataaatagtgattttgaaatt

SEQ ID NO: 40738 - DNA, 822 bp, Heterodera glycines
ggggatccgtcgcttgtcgtctggggacgaaccggttctgttgcaaagttgattaaagaatagagaaatccagataaaagttctctattctatgtgtattattaggcaaattttataattcattatccgttgaaaataggaagaggctcgattgtattctttatagaggtcagtcgttttcagttatagaagtgaggggtccctgtccgtcgtattcgaggggttgcgtatagaaggagggagggatcatatggagatcggagagaggggtgtccgcggccgtagatttgagggggtcccattcgtggtagtgaggggttattgataaatcggagggatcggccagcgatcagtcagacaattgatcagtcgttgggccaaaaagtgatcagcaagtgaagacagggccaagaagtgattggcaatcggagacagtgcaaaaagtgattggtaatcgaagacaagactaaaacttgattggtcggagatcagctaatggccgccgagccaattggtcggccggtgataattgaaaatttgtatgtatatttttctgaatttcggcctccttttgccctaaagaaatgaaatttgagccaaatatttgggaatagaaagagccctcagacttaaatttaaaagaaaaggaaactaaaaatttaaggcattttctttaaatttcactaatatttccaaacaatttccccaacaagcattaaatttcttagatttttttcaaattttgcccttaaaatccataaatttgccatttaagcaaattattttcaagcctgtgttacattgttacatctgaaaaattgc

SEQ ID NO: 40739 - DNA, 1369 bp, Heterodera glycines
  unsure (1)..(1369): unsure at all n locations
tgttctttttttgtctataaataatttntggttgatcagattttcttaaaaaacataaaaatcgaaaaattctttaatggactatttcctatttcaattttcatttttaattcattcctttccctcatcaattagtctatttcccaaaatcccccctctcgcgctaattggctaacattcggcggttgctgctggcgaagtcggagttgccgaaacggaccgcgcaccaaaggcgaacaactgctgttcgtgttgcggtgttgcggatggagtagcagcagcagcggcaatgaattggggcatcagcagagaagacggaccaatttggggggtgccattgaaatgtcggggacggacagcggcagacgaagagacggagcagtccaagaaaaacggatttgaggaggaggaggaggaagatggagtagcagcaaaggtgcttaatgtggcatccaattaagtactaatgagacaatttatgtggggaattcgtgttcaaattttgatttttaattaaggaattgcttcaataacagggcctttcccaaggcgaaacaggcaaattattctgaccttttagttaagttcggataaagctcaaaagcagatttgtcaaaaaacccaaccaattgatttcttaaatggaccaaaattaccaagtttgtttttttgactttttttgtccaattttccaactccacaatttttttttgtcgtttttgccactattgcccacctcattaattaattaactgctcattttccatggcttggctctaattaactcctgattttccatggcttggctctaattaactcctgattttccatggcttggctctaattaactcctgattttccatggtttggctctccaacctgccattgttctgctgctgctgctgctgctgttccatcatcatccgtttgatctgctcaatttgctgatttcgctgcatgatcgccgggtcttcgaccatcatcaagtcaatttgttgagcttcaacaacaatgccatgccttttcgcctcttcctccataaatgtttttctattgatgggggagacaaattatcaaattgttttaattacattatttagaaaaatatacaatcaggtattatcataattaactatttgactaataagccaaaaatacacccaaagactttattacttaataccctatggttttgactaattgaactttagcaatatcaatgaatcaattaaaattgcctcaagcatatttctctttttgcggtggtgtattattataattaaatgaagggaatcattaatataaaggaatggattttaaaaaatttatttgcccttgggcaattttaacagaacactcaatcaaaggg

SEQ ID NO: 40740 - DNA, 649 bp, Heterodera glycines
aaaaaaaaaaaatggtttttttaaaatgccctttggggttcccaaacaattaggggggcaaaaaaatccaacccaaaattaaaagtccaggctttggggaaagttttcccgaaggattcggtttcccccataaatttggggccatcggtttgggggggatgccccgaaaacaaaaataaatcgattttttcaaagtgttcgtttggggtacttcaaacaattatggggagcaaaaaattccaacgcagaattaaagtacaggctatagggaagctattcccgaaggattcggtctccccataaatctgggcgcatcggttcggggggactgccccgaaaacaaaaaaatcgattttttcaagtgtccgtttggggtactcaaacaattatggggagcaaaaatccaacgcagaattaaagtacaggctatagggaagctattcccgaaggattcggtctccccataaatctgggcgcatcggttcggggggactgccccgaaaacaaaaaaatcgattttttcaagtgtccgtttggggtactcaaacaattatggggagcaaaactccaacgcagaattaaatttttggataaaaattatttaaatgaactgactagataatattaaaataggttattctcttccttt

SEQ ID NO: 40741 - DNA, 1058 bp, Heterodera glycines
  unsure (1)..(1058): unsure at all n locations
ttttctctttctctgtaaagaaatagtacgccaaaataatagaaaagtatttttctctgcactatttatttattgacacatttctcgttttttgactcggtgtgtacaagtgcgattgagataaagcaaatctcacaaaaaagattaaataccgaaattttgaattgcacggggcctggtccgggacttggaacatgcaaagagagagcttattacaataaaatttgattaaaggatttttagcaatcttcggatggaataaatatgataagatggaaccaatcaattcataaaatgttcgtagaatttcaaattttcaaaatttcgagagatctatcagatttgcattcacaatattgttccaaaatatgttagagaatgttgacaaaaaattttttaaatttagcagactaatagagaaaaagctgggctttcgaatggtaccaagaatgtaaaaaattttattgcaattaagcaaaattatgccatttttgtcgaaaaattcgctaaaattgcggatcttacgaaaccacccagcacggtatcaacacgccgggatagtgacttatagggacttaaaggaactcgaaaaacagggaccgtgtcccggattttgaaccaagactggtactgtaagccgggaaatttcctacctaaaataatgaaattattattcatgtaaattaataaaaaataaaattatttgtgcttggaaatcattttgaatttttttaatatgtaggctcgccagaaatggtaagtccacatttgcgtctccagcattcgcgcctggaacatttgcgcttttaggttaacttttttttaaatttgaaaatttatctataattgttatgacaaaactatttttaccaagtctaaaacttttgcttaaattaaataattaagaattaanntatataaattactaataaaaataaaccaatgacttggtttatatttatatttgctaatttatatttgctaataataaaacatggcggcgatacattattttaatattannatatttctctgtagcatataattgtgtaattttt

SEQ ID NO: 40742 - DNA, 1683 bp, Heterodera glycines
gcaaaacagggatttgaatcctaaatcaaaaaatggcttctgatcaaaaaaaattttttaatttcttctaaattaatactctttaaccctatttagttttttttcttttaaaatgatttcatgccatatttaactatttttgagatttaaagcttaaattaatagatttgaagaaattttaacattaatttggaaaaatttatgcgcatattttgcgatttttgtatgccgctagtgcatataattacaagttaaaattagttttttcgagtaaaaatgaaaattatcgtgccatttaattatttttttttacaatttttggccttttaaacattttttgcaaaatttaatttccatttttaaaataattaatgaatttggccgaaatgtgcggtaaaatgagcagcagcgaacgttcgtttgccctgacatttttcatttggggtttaaagcaaattaaaaatttaattaatgggtggcgtacacttttttaattgctccatttcactgcccacaaatgcattcattcttttaatttgatctaattgttctcccattattttttttcaaacccatatcatcacattcatttgttgcgaaatcgacaattatttattaatattttgcttttttaaggataaatttaaaaataattttttaaaacatattttaataaatttaaaaatccctttaatattattttacattttttaaaggatatttattttaaaacgaaaatttcaaatttttcttttctataattatcttaataaaatttaaaaaaaatttattcgctttttaaggataattacacattaaagcgaaatttaaaaataactctttttaaattagtttaataaaatctaataaattctttttcaacattttttaaatatttttgattgactatttttaatttatccttttttatttattgtgaaattgtggcttcaaaaagattaatctgttgtgtaatgctattagccaaaaaaagcactttaattagtgcattcatttccgcttcttcttctgccgtataagtaaagccccgttaatgtttacattgacattcttttcattatacaacaaacattttttatgacacgaaaagccacatttttaatttgaaaacatagggtaagagcagaaaatttcattaaaaattacaattatttttggagaaacctaaaaattttcgtttttatttttcaggaaattaagaattcacgcagcgatccctttcaatgtcattggactaattattttattttattttccaattttttctcaaaaagtattataacatgacgactaggattttttcgattcccgatcccacttttaaaaaatgagaccctgtcccaatttttttaaaatgaaattttggccccaatttttccaaaaaaaaattctgacgagatcaaaaatttccggttttgagcagttataccccatcaaaaatgtttatatgtaccatttttactgaattatagggcccctgtattagaagcccccccccgcctccctgtaaataaattccccgttaagggagggggttgaaaaatttgaagtccgggccttaatttttaaaataaatatggtacaataaatacacggctctattgcagttttgaccatcttcagtttcatagaggccataactttttttaaaatttcctaaaa

SEQ ID NO: 40743 - DNA, 951 bp, Heterodera glycines
tattggaaattattttagaagaaaaaatcacgataacgttaaatttactaatttttagcaaaaaatcaacccgaaaagcgaaattttcgttttttttgcttattttgacatgaatttatcaatttttaagaaaattgaaatttatttaatattctcgtgaaaattttgttaaaaacgattttttttgaaattttccggtttttggggtccaaaaggccaatttagctgatgggggccgttctaattgaggtttttgggaaaaatcccaaaatatggacaaaaatgggaaaatatggaaaaatatggaaaatatggatatggaaagtcatcccagaagcttcaaaccaagctaaaaacatgtttttcgtgcgtttcagacctcacacagtccaggaaaaaaatatggatttccatataattcccagccctacttataagttttgattttctccattttttctttctctgttattctttttctacatttcgaattgttttttccacccatctcataattaattgttcccttattcaaaattcgtataaattttttaaattttcttcctttctttttcgagtattttcttcttgttatattcttttcgtttttgaaaatgagacgaatttttacataaatttgtcttcaaattaaattttctaaactttaattaattcattttgaaaattttcttaattgaaattattatttacgaatcttatttgaaattttggaagagcattttatagttgtttttttcgtttttatctgatttttaaatgccaaagaaattgattatctttatccaattttggtgaaaaatatttttattctatgcatttataaattaagatacaagtagtattttcgaaatataaactcattaaattgtcacgctaaattcatgtaggcaaacaattttccactttttgaatttgaaaatttatatgtgt

SEQ ID NO: 40744 - DNA, 1556 bp, Heterodera glycines
atctcccatccatttccaccatttcattattttaatatttataaaaaccaaaccattttattgtgtagtaaatacacaacaatatcgaagcgcatactcatatttattaaaaaattaataatttgcaaattttgatatgattaattgaatttgataaataattcagataattttttaaatattaaaatgataaaaaaataaaaagttacactattattattaataattacaaaaactctaagataagcatagcaaaaaggccttggttaagaaaaagctcattaccattaaaagaaaaagcaaaaaaattattaaacagaacgcggacgcacaagtgtaaaaacactaaaagcgagagagacaaacaacaccgattgttcaaagagaacaaaatgcatgaaaaaaaactttgtgtaaaaaactagaaataaaatagaaagaaataattacgaataaaaaaactaataatcaaaattcactatttaaaaaaaatgatagacaattttttttacataaaaccttagaaaaaattcaataaaaatagtgtgaagactttttgtctactattataatttatatttaaataattaaaaccagtttctaaacatcttttctttagttatttttcaaaaatctttagtgagcttcttattaaaatttgacaaacattgaattcttctttaaacacacttggtgcaatataatattatcagataaaacttttaatgttttaacgtaatatctcttgatctcagacaagattttgattattttttgaatttggatattttttaaaattatttatttttaattaacgctcatatttttatgaatttatataattttaattaagttttatctaattgctaacgtgttttattttcaattaatgtatattttaaaaacaataatagctatatttagtgccaaatatagggattcgttttctttcagaattatgtttttgaccgacatttaaaactattttctttcgtataaatatgaattgctttattattaaatttttaataaaataacgttattactttctacatatatcaaattaatacagcaacattatgattattaaaaagaattagcgagaaaaaaaaaattttttttatttcaataaaatataaaaaaattatgcactttttatttaataattaatgggttttaagttcgaactgcataaattaaaaaaataaacaattatattgcaaaaacttgtattaaatttacactaatcttataacctgaaagtgagtggtatttaatttttgagttcatcgatttgagtacaattaatagaaaatggataaaagtgtttaaaattgaaaatctaattaatctggtataaaaacaaattaggtttcgaaaagttgaaataaaaaaatttaaacaatttcttgatgatataataagattaagttaaatgctgatatgttagtaaaatagaaaatgtaacaggttttttttttaaatatgatctgaaacaaaaagcaattacctaagtaattcttttaagcatttaaaaagcaaattataaataaaac

SEQ ID NO: 40745 - DNA, 828 bp, Heterodera glycines
cccccataaaaaaaattttttttctcaacgccggattttacaacatttaaaaaaattacttttcacagctcgattttccaaaaaaaaaaattttttttgggaggaaacggggggaggtgccgataggcaattatgttttgttaacagattatgtccaaaaaggaccagtttttgcgttttgagccagatttttaagaaaaaatccaaaatttatgagtttttactaattcgggattacggattggtgggattccgtcccgcgccggtctcgactctgtaccgtaactcaacatttataccgtatctcgttacacagcatgctaactatgacgaggtgggctccgcacttggcgccaacggcattcgccttgaggagcccatcggtgacgccgagttgcgcgacaaacttcggcaagcgttggcacagtgccaaggccgccgccgccgaaattctgccgttgctgaagagaatgatggcaccggcggcaacaacggcaccaccgacgaaaatggggaccaatcgacggtgatcaacgcgctgatcggacggaccaattttcgcgagggcagcatcagtgtgtgatcactgatcagtcagcagaaacgagaagagaattgacgccgagtgaccattgattgattgttaatttgatcagccatatttaatgtttttgttaataatttcaaaagttgacaacagaaagcttcggaagtcattcattcattattcatttgtggacggaccgatgtgataaataaattttgtgtacggtaaatggattaaggcatttagaggtgggtcagttatgcattggataggcaattgcc

SEQ ID NO: 40746 - DNA, 986 bp, Heterodera glycines
tgatcagcatctgtgcggaactgataacgctgttggttctactcatcgcctccgcgcccgcgtggggatggctcgcggtgcgcgtgcgcgacacgcgtgtcgtgctcaaacacggctggtacgcaattttgaccgccatgctgatcagcaccgggggcggctacgtgctgcgccacgccatcgaccagttcgccggcattggactgttccagccggtgatcaacggagtaggcggaaatttggtcgccgtccaagcgtccaaactgagcaccagcctgcatcggtttggcaagctgggcattctgccggcacacacgctgctcacctacgtgaacccgttgcgcactttcgcgtgcagaggtagcgccaaaaagcctctttttagcaaaatgagaatgggggaacattaatttgatcagcgttagagaaagttagtgatcgacaattagtttttacgaagtgacaacgatcataaatctttaaatgttcaatgaattggtgaatcttcatttgatctggggtatctgatcaagtaggtggtcacaagttgatttaggataataacttccaattataatccaaaaagggagcctttatttgtcctagtaaatctgatcagtcagtcagtgatcgccacaatattttaagccaattattattctcatgaatctctaaatttataactgcaattacattcttgatttgcagtagtcctaacgaattaagacaattaattaattaattacccgccccctttgtgaagaaactgagtccaacaatgcgctcattttgctgctgatgagtgtgcccggccacttgctgttcattggtctgctgctgttgacaggcgaaatggatggccaagcattgaatttgccattcatggcaatttatttgtgtgccacaacccttcaggtcggtaggacaaatcttttttcattgacacatgggcataactaatgtatcgagatcaaaatactaatcat

SEQ ID NO: 40747 - DNA, 542 bp, Heterodera glycines
tccccctcgcaacgttgccccatgaagaaagtggaggaaaggagtgaccgatggtcttcctcccccccactgtccattccttttcgcattcactgcccattcctcccgtcacccatccgccgttttacattcatccatcgggaaatgtcctttctgccagcccgttaagcagcggaattcttgcgtagatagggcacagcgaatggccttcccctcgcccacccccttttttcctcccccctttccctctctcgcccatttggtggagcggccgtccgtccgtttgacggttggagcgggccggtccgccttttgcttatttccacccgctgccagccgaccgggttccctcccccccggggggggggggggagggaggtggactttaagagttaaatgataacggaaggaaagaaaagaatgcgtccacaaggcaatgagcgagaatgaatggatgggaatgtggtgttggacggtcagccaaaaggcagcttagagaggggagggggggggggggggaagaagcattgtcgaaaggggca

SEQ ID NO: 40748 - DNA, 1201 bp, Heterodera glycines
ctctagagtcattcaatttataattatgtatttattcatcgtcggcacttttcgtttttttttgtttgacccaacaaatgccttaactttgtttcatttttttaaatatgcaaatggtgccataggaaatcaaaaaaaaaatctcaatttaattagggggacggataaaaaatgtttgacagatctgaagactttcaggtctaaatgaaaatgaaaaatatcagtcaaatccaacacaaaaaaaaaataaaaaataaaattggcacaaatgccgggtttccacgcgcaaaatttcaaacccaaaaaatgccattaaaaagagtcaaaattaaaaaaaagttttaggccatttttatgcttttcaaaagccatcctccgcttcattcacgagcccattgaatagcaaaaacaacaaaagcaacatcatcaaccacagcatggtcatctcagggactgctgcttctgcttcgcttccgtcttccgccggcgccgtcggcggcggcggcggtgggcgtccgttgccgccaaattgggaaatttcgtacaccgaaaatggcgaaaaatattacattgagtaaaaaactcattaaattttaatttaaaaactaattacccaatttaaattggccagtcacaacacgggcaccaccacgtgggacgacccgcgcgacacgtacccgctgcacaaccagcagcagcaaatgcagcagcaacggttgccggacggatgggaacgcattgaggacacaatacacggcactttctatgtggagtgagtaggggaaggacaaatgggagaagttgtgggattgtcacggctgctggtgtgctggcaagccaagcacgaaatcccgggtgtgccatcaaaagtcattggattggagatttggcacttttcaagttgttggtctcgactagcaccgttcgaaacggaaattgccgagactcttgacccgcctctgggtacgagatcgagaccctcaaatgcctgatagagacttgtctagagtcgaaactcagaacagcagggagcagctcaccaccccccccccgcgccggcctttttccccgaatttttcaaaaatttttatttttttacaatttaaaaaatctttttttaattcaaaatcaaaatcccagtccatcggtctcctctagaaattcgtttattaactctcaagattgttgaaacaaatttatg

SEQ ID NO: 40749 - DNA, 1527 bp, Heterodera glycines
gacgcttatgcgtctatcgacggatcagtaagtgttccttaagcaacaacagccgaattggaagtgatttcaaacacgctatttagggttcaaatgcgttgctcatccgtctccgcgaactttacccaagtgttattgaaactcttgcatggactagccttcaaaaattctccgaacaatttccgtcaactcagcgtatggtgcaagcacttcgcgagttaattgaagcggtttgcctatttcttctttcgtcctttcaaaaaagaacctttttagacgggcctttattttggagctgttccccagtcgtcctcatcagaggtgtttttaatgggtattcttgttttatcgtaacaagaattgtttttaggaaagtccttatcattttgtcggtattttgagttttgtttctgggagacaaaagttatttaagaaaattgatgctgatgcccagtcaacttcctcatcaacggctcccattccgaaaccgctggacaaatcgatgaagccaccgccacaggtattgtttttagtcaaagattgtctttcatattataaaaattagttttaatgacattgatctttagcgtttgcctgccaaatgtctctctactgagcatttgtatgatgaagttccgccgagcatttatgaccatcctccgcaacagattaaggtttacgggcgctttttttgtttagaaacattctccatcttcaaccaaaattttcatttttgagacgacaattcctttcaataccaattggacagttaatttctgtttaagcaaaactgggtgaaaagtctgaattaagcaaaatcgccaaaaagaaaaaacccgtacatacaaaaaaaaataatttagcaacaaaacgttgtgccgtccattcttcagccgacttttcccgcttcagctgcagttccggtgccgccgcgaaaggttcgagtgccgattcgtcagtcgacttcgtccgcttcagctgcagtgccattgccgtcgcagaaggttcgattcacaatttaccaattgcatttatttattcgtttttactcaaatttattgcgtatttcaattaatggctatttaattcttagggtggtgctgttgttcagtctttggttcgccgtttgcctttgttgtccgcggtcgatcccccgtcgtcacagcttcaggttttgtggacatttttgtcttttaaataacttattcacttcaaaagtcgccattttcgttgatgctgatttttctcagccgtttaaatttctaaatttcccgtttcaaattgtaaatgcaatttttcagaaacgcgttttcggtcacgccggactttcgctgttttcccctccgtctgctgacaattcaccgccacagaaggttttgttgcaaatgatttaaataaaaaagtgcatttgaatcattttgacttttttaatagtgtctctattagacctgaaagacttatttagttttaggtgcatgtgatcaaaatttgcaattgtctggcggaaccactaaaaaatgactcaaa

SEQ ID NO: 40750 - DNA, 1299 bp, Heterodera glycines
ttttgcacctctaatttgggctgtttcagtgctcaaactttagccgaacgaaaacaacagtttcagaaattggcgctttttttgtgccgaatttaaaaacgacgcgtttaaatgcgaaagaatggcgccgttggggccgaaaattttcttctccatctcattatccgataagcatttgcacgtgtagagttccgcccgactctccgaagaagaagcaacaaattccatggcaatgaaggcaattgcgttgctgaacagtcgcactttgtccatgtccaatggcacaccgttcggctgattagtggagggccacggtattttttcctcagattttgacgacatggattttgtttgttgttttgaggtgccgccacggtgattatttgcttgatttgtctccctgctgaacttggcaaagttcgtttccaccagtcgattttgattatgcgtcattgggtctgatggttgggacatggaaccattagtgccattggcagcagacagttggccaatgatgaacgagttgaacaagtcatgcatgggatcacactgaaattggcattattttacgaccaggggtgacacggaattccgacttccaaaaaatttttggggcctcggaatgccatccctgtgctatatgtatcattcccacaaaaaatgttggcccatttaagtgcatttgtgctgattttttgttatctccaaaaggggatatgccaagccaaaacttttaaattaccgtatattctctaattaaggccctgtctccattaatcccgctgtctccaattatgtccccctttctgaggatgttgaaaaataatcctcccgtctctatttatccccccgggggataaatggaattattatttttttaaaatcttatttttaataaaaattaattttaattaattctaaattgaaattcatttaaatgtttaataaacatgaaaaaataatacagcaaaaatcacttactttactcaagtccgaacataggtaacccagcccggtgctatgtcgttattagagctcggtattttgaaaaaagcctggacctggacctggatttcctgtacaaaaatccaggaaaatacaggttcaggaaaaatccaggcctggatccaggtccaggccgagctctagtcgttataaaaaagccatcaaaaagggggcaatcattaataattggtgtcccgacgaaaaaaaatgttaaaagtttgtcggatatttttctaggcttaaaaaatgcgctagaagggaatctgagctcagattttgaaaatctttgatttc

SEQ ID NO: 40751 - DNA, 1416 bp, Heterodera glycines
  unsure (1)..(1416): unsure at all n locations
aactaaattatacttttctttatgaataaacatttacaaaaataaaanaatntaataatttatcataaaattaaagtaaaaaatattaatacttatataagcccttttcttcaacaaataaagcagaaaaatggtgaaaattaatttggttatataaaatttgaaatattttccttgaaaaacaataatattaatttaaattaaattaagtgacaaaaatatttaaaatattaataataaataaagcagttacccagcacgaaaaaatgccgaaagcaaaaacaacaaaatatattttaaaaaagtaaatatgaaatgacgcatgaatgtagagaaaatttccatcatccgtacgaaaaaaaagcttcatcaataattgctattattatttatcaaaaataaaagtacaattaaataaaataatcagaaaaattaatgaatgcaaaaataccgatgttgaaggatggaaataattaaaaaaaaataaaattgggttaatttaatttgttcttttaaattgtaaaaaagatttaaaaaatgtaattattccttaatctcactataattttaaaaataatctttttttggcaatattcgcactggaaaatttctggctgcacaatcaatagattttgaaaaatataacaactaaaataagcattaaacaatttttttgcagctaaaccgataatattctatttaattaaaatattaattgttgcagattataactaatcaacaaaaacatttttaaatacaattcttatattattgtttactaattataatatgcccaaataaaaattaacaaaaattcaaccgaaaatcaataattttcaaaaattaaaaacaattcgtaatacattacatcagtcttattttaattaattttaatttataaaaaaatatatccttttattagttgtaatgaatatataaatggtcatctaaccaaaaagttatgatttataagaattaaaattcaagaaaattcaaattttggaaactatagaatataacttcttcggtgagaaggttagtcggttaacatttggttaatggtagcttctaaaacacgggagatgcttttgattggatagcaattttgaagaaattaactcacgaacaaaaaagttatcggccatttcccatttttaaattcgtacgaaacgtcattcggtacgaaccggcatcgacccaacttcttaaaaaattaagattttttccgataaatttttcggtttttctttcggtaatttggttaaaaatatttttaaaaaataacctaattaaatttttcgtggattaactcaagggaaaatcgaaactttccgggaggcgcctcatcggcgcaaccggaaaatttttcggaaagttaagttcaatttggtaacaaattccggcgagaaacggtca

SEQ ID NO: 40752 - DNA, 1123 bp, Heterodera glycines
  unsure (1)..(1123): unsure at all n locations
ttataagaaataaacttctaaatgcggaaaattctgaaacatacgaaattgtcaaaaaattttttatgttcaaaattcttattgaaaataacttttattttgaaattttctcaatgagaagaaaattattttctttaattaattttgaggtacatatctaattaatattttcgttaattaaaaaaaatttcgcttttagtttcaaaaatttaatgaacaatttttgagaaatcttttgtccatattttgggattttttcatttgttttataatccatttttaaaatatttttcaatataaatccgagccttaaataaattataaaaaataatagaatagtgtttttaataatattttaagcatttttcatatgaaaaagggccgactgatcagccgccgccgccttgggcaaatttggcacgggaaatgcttggtcttttcaggccgttggagacaacgactgcaactcaaagcacaacgacaaaggaagcgtcaattttggacagggtaattaagaaaaaataaatttaattgaaaatattacgctttgactgatttggccaagtaattatgaaaaagtccattaattaatttaattttttgacaatttaatataaatttaattttaaattaacttttgattttgtgctatttcagtttatgccaaaaattccgaatattttcaattcgtttgtcggcggacggacgacgatggccacaacaaccgctaccactcctccgacacttttcccatttctctcatttttcaccgaaaaacctactacgacaaaagcgttttgtttttaaattattaatagggctgggatttttatgtgctaaaaatcctgaaatatgtaataaaatatgtgctaaaaaccaaaaaaaggtttaaatatgtgctaaaaattggaaaaaccaagtgtatttacgcaaaaaaaatcatatttaatatcagtctttatcaattttcgcccgacctccaatcaaaattttggcgatatcaatcaatttgtaaagtcccggattaatttttccatcagttgaataagttccttccgggaactntgaaatccagtgacgacgatttaacacagcgtttgatttggctgctttaggcatttaa

SEQ ID NO: 40753 - DNA, 1478 bp, Heterodera glycines
  unsure (1)..(1478): unsure at all n locations
cgctttggcagcacattccagggtggtcgcggacccatttttgcatactttgaccatccgacacgaggatggaaacacttacgaagttaatttgttggaagaacaagcagctgatcctgaagccgcggcctacatttcgtttgtcagggatggggaatttccagctgatttggatgagaaagaaaaagaattatttgctgtaggcactgccaattacaaattaatttcgggaattcttaattttgaggacaagggttcccccccaagaatttatgtcccaatttcattacgtgggctcattttcgaatcgtttcactcctctctattgggaggcggtcatttaaattacagaaaaacaattgccaaatgtaaaaaatatttttggcctaaaatgtactctgacgttttaacttgggtcaaactatgtgtcacttgccaattgagacacaatccaacacccgcgtaccgggaagagatgctcatggtgccagccaacacactttttgccaaagttgggctggacttggccggcccctttccagtcactcaaaaagggaataaacacattttaaatatcgtttgttggttcaccaaatacgtgatttctgtcccggtccccgacacaaaagcacaaacaattgcccacacttttcttaccaattgttacttaaaatacggtggttgtgttgaattaatcaccgataatgcttctgcctttacttccgaatttttcagagaattttgctccatgctttacattgacaaaaagtatgcctgtccacattggagtcaaggcaatgcgtcaactgaacgcacttttcggacatttcacaacatcttggccaaatacatttcgaagactcagcccgacttcgatgaatttttggatgctgctaatttttgctacaacacgtcagtgcatgcttcaacgggtgagactccattttttctaatgtttgggcgtgacccaattttctgtgttgatcagatcattgatccgaaagttcgtgatccgatagccatttcggaccgtaatgaatttaaacagaagctggtcgttgccataagacacgcgtggcacgctgcagctgatgaatatgcaaaagctcagcgaaaaatgaaggaacaatatgacagaaaggcaaggccacaacaaatcacaattggtgatcgagtgctgatcagaaactacgacggacgggtaggcacatccaaaaaattccaattaccgtggcgaggaatttttcgggtcatcaaaattgagggcatttatgttactgtgatcagttgcacttcgccaaattcgaacccaaaaagacttcacttaaatcaaattaaaaaatgcttcgaaattttgggccccccgtgcactatgccaatacaaccaattgaagagcaaaagtgccttgaaaatacaccaagcgtggaggaagtcagttcggaacggtctgaaattaggaatganatgnaccccgagt

SEQ ID NO: 40754 - DNA, 915 bp, Heterodera glycines
  unsure (1)..(915): unsure at all n locations
gtccgatcacaattaacaaaaccccttaggttttattcgatcgaaatgataaatcacaaataaatatgaaagtctgagatctgatttttgtgatattttggaactcttaattgtgatcgacgactgctagtcccgttcggagttgattattgctcctccggtcactaaatatttattccattagtctcttctctgcaccttccaacatctcaactgatcacgacgaattgacagtgaaaattggcgacaaacaggtgaaacagcagaaagagagcacaatggagagtccaaaattttttaaaattctgataaacttggcaaatcgctgagtccggtattgtttagttctttaaaagagattaaatcattgagaattcttgatcagatcactgataattcttggacagatcactattaattaatccattctgatcagatcgctgtgtccgcccattggctgatgtccgtttccccggtgatcagtcgcatgctcagcgtggagatgaaggagaagcagcagcgaatgatcactttggacgaattgggcgtggacatggaccaattcatggagtttttggaggccatcacttatctgacaatgagcggaccttttctgcccaaccgtaattctatgctatcgtatttattctactatatcctctggaaaattaactctaccctttttatgggttgaaaatatgatttttaattttttaaaatgaattcccaattttaagccaaaaatgtactgatgcttctcaaattggccgactacttccaggtgggtgccttgacacttatcaacaaatcctcatttgatgtctaaattttctcgctttagcctgtaaaattttgtgaacaaaaatgtcgaattnttttagtttttgtaattntctaaattttacaggcttatag

SEQ ID NO: 40755 - DNA, 1492 bp, Heterodera glycines
tgccggctgaggcgtggacaaccaaactcatcattgtccacaacgatcggattcacaatcattgtggaccgaggattcttctatccaaaattcgcgagaaattttggattccacgaggcagacaaacggtccaaaatgccctttactcaagtcgaattggatgtttggaatgcaaaagggaaaaactgaaaccatacacttatcccgaggctcctaatctgccaaaggagcgagtcaacgagacacgaccctttaacaacaccggcattgactactttggtccactaaaagtgaagagaggactcgaaacggtgaaagtgtatgtcgcactttttacctgcctcgccatccgagcaatccacctggaagtggcagaagactattccgccgaagcctttctccgcgtgttccggagatttgccgcacgacgcggcgtaccgagagtcatcttgtccgaccaagggacaaatttcatcgctggagccaaggtcatcaaggaaaattggaccacagacttactcacactcgaagtgcaagaacagctggctcatcaaggaatcacatggaatttcaacacagcccatgcaccatggaaaggcggcacttgggaacgactgatcggcattactaaaaatgccttgaggaaaagcattggacgcagacttctcactttcgatgaattcggcacgctcgtcgttgaaatcgaagcaattgtgaaccatcgtccgttgacttttgagtcagaccgcgaaccagacccggtactcagaccggtcaattttctgatcccgtacggatcaacggaaaccaattttccgtcaatggcaacggatccggaagatccagaatatacgccgaatcccaacaagctgaaaacgatgcttcagaaggctgattcaagactgaacagcttttgggaaatttggagatccgactatctcctttcactgcgtgaacgtgcaaaccaacggttaaacaacgaacgacaaactcctaacgaaggagacattgtgcttgtggaagaagaagcaaatccgcgatcagtctggagcttggcccgggtccttaaagtccaaataggacgggataacaaatcccgttctgcattaatttcccacaagggaaaagaaaaatggagagctgtaaatcagctctacaatctggaaattcaacccgaatttccagaaatccactccaccgctttcgtcatgagcaacttggacaacgacatcgacagcgtctctctcgccggcagcgaagatgaaatgccgcagccgaaaaataaattccgcattccgaaacgcaaacgggcatttcttcgaccaatcccgcagcagcacagtcctcttcaaggaccgcgtcgcaaaagaagggagttacaagactccggattacgcaagctgttttgcgcaatatcagagccagaaggcgggagcaaggcaactactgaagctatcaacgaaagccgcgccatgaaaaagcgccgcaaccg

SEQ ID NO: 40756 - DNA, 1198 bp, Heterodera glycines
  unsure (1)..(1198): unsure at all n locations
atctctttttttgataaattttatacacatacaaatgctctcgagcatgatagggagggcggtgcgcaatcgacctttttatttttgagggaatttttaaatttatactctatcccagaaaaatggctatctctttttttgataaattttatacacatacaaatgctctcgagcatgatagggagggcggtgcgcaatcgaccttttatttttgagggaatttttaaatttatactctatcccagaaaaatggctatctctttttttgataaattttatacacatacaaatgctctcgataataggaattccaaccgcattctcagaataattacgccgatactaattgttctggaatttgtttctcggcgcgtttgtttgggaaaaatttggaaaattggctatctctttttctgctcaacagtaataggaattccaaccgcattctcagaataattacgccgatactaattgttctggaatttgtttctcggcgcgtttgtttgggaaacatttggaaaattggctatctcattttctgctcaacagtaataggaattccaaccgcattctcagaataattacgcgatactaattgttctggaatttgtttctcggcgcgtttgtttgggaaaaatttggaaaattggctatctcattttctgctcaacagtaataggaattccaaccgcattctcagaataattacgccgatactaattgttctggaatttgtttctctgcgcgtttgtttgggaaaaatttggaaaattggctatctctttttctgctcaacagtaataggaattccaaccgcattctcagaataattacgccgatactaattgttctggaatttgtttctctgcgcgtttgtttgggaaaaatttggaaaattggctatctctttttctgctcaacagtaataggaattccaactgcattctcagaataattacgccgatactaattgttctggaatttgtttctcggcgcgtttgtttgggaaaaatttggaaaattggctatctctttttctgctncacagtaataggaattccaaccgcattctcagaataattacgccgatactaattgttctggaatttgtttctcggcgcgtttgtttgggaaaaatttggaaaattggctatctcatttttctgctcacagtaataggaattccaaccgcattctc

SEQ ID NO: 40757 - DNA, 961 bp, Heterodera glycines
  unsure (1)..(961): unsure at all n locations
attaacttatataaaggatgcgcagaataaatacggaccttctaggagggattataggnnggnngaantattttgtgaaaagtcgttagaaaagggtgtaaagattttccttttcctctcattgttaaaattatgatacattcgcctcctcccccgccggtttcattcattcattgttttcccattccttaaatgttccctttgtggctttaaggcaccccaaaataaaccgatgacgtttaaaatatcccatgaattttaagtgaatagaagaggaacgtaagacagaggcacaaccaaggggaggtgaagagagaaggggaagggaagtgaaagggaatggtgaaggggaagggaagggaagaggaggaaggggaagggaagggaagggaagggaagggatggcaccgtccaattcagtcccataaacgaaatgaccaacaggaagcgattttgccatcttttgttgatttatcatgtgaaaataataaaaatacgacgccattttggagtgaaattctttaaaaaattcgacaaaattaccatttattttttcgaacggtccattataaaaatttttttttaataaattgactcaaaaaaaaatgcaaaatacggtccttaaaaaacaatatttgttaaaaattgatttttatcagtgatttccatggcaaacaaaaaatttctttggtattttttggcatcatttccaaaatgcatgccatcatttgaaacacccttttgacatctgatttcgcttccctgaggcaaagccatcgaaaaaatgttttctcgagacgatactcgagaccaagtcttgctaaagcagtactcatccaaaagggttggcgcttgactcaaaatgggattaattttgaagtggttattcgagagttttttggcaattaatgggcctcaatggcacgcttaataactcgcgcatggaaagggtagaatttta

SEQ ID NO: 40758 - DNA, 1402 bp, Heterodera glycines
agcagcggacgcgtcaaaatgccatccagcgcccagccggtcagagttgcctgaactgcttccatttgtgcgaaaccgccaactttccgtcacttccattgtccgttcggctggggatggcacttcgccttcggcttcttcccttgtcggtctcagataataaaaatcactcattcatttggcacttcatggaactgtttgtggaattattgttgtaatttattaatcctcagctgtttgatattatcccttttaattaatgcccgcccatttgactctccgtgctaaaatttctcccaaaagaatgccctctaaaacaatttttgtccattttctaagtcacatgataaacattaattgtccatgtcaaattcatcatccatttaattggtacatattaatgtgttagcaatgtttaattaaatttattattgtaatttgaatattttctacaaaatatgctattttaattggcttgggaataattaccgcaatttttaaaatattttattcaaagagcactctttttaagccatcatgagaaagtaaaataattattgcttaactgttatgatccctaaaaatgtttcgccctcagcctgcggacccatcaccgacagaatttgccgagcggtgattattttggaacaaaacgaagagaatccgttaaatgccggagggcaaagttcggaaacacaaaaaaagtgagagaagtgaaaagtaattaattaattgaaatttaattctgccgattgttcagaagaaagacccattcactggagagggaacgccaagcactgaacgaattgcattttctgttcaacggttgggaggcgttcggccgagtgccacggcatttgctcacaaatgccgtgtcggcacttttccaggtgacttggaattccctcttttttcttaatcgagtcgaattgtgaagtgtttggaccatcgcgagcagtctttgcgattcgtcgccgaccaaacattggacgcactttttagagtaaaaattaccaaacgcaaaatgctaaaaacttagataattgcagaaatttttcttgaaattccaagcggaaaaagttgtggcatttctgctcagcgaattgaacaaaagaacgaattcggcacgggcaatttgcgcggcactgcaaaaactgagttggacaatcggaagtgcgaaggcacagcggacaaagtgaaattttaaagagaaattccactgaatacaaaaaaaaattccattttgggaatttcctctctctttccccttatttttgcctcccttttatccaatttaaatcaattaaatttctcttcctcaattttcttccattttctctctttctctcattttccctcatttccatcattttctccactttcttagtcgctttggcgacac

SEQ ID NO: 40759 - DNA, 858 bp, Heterodera glycines
gggctctaatatttaataaattcaaaattatttaccataggtgcaatccgaacaaaggatccacagaatcccggtaaatgggcatttccgggcttaaatgattgacagggattgggccactcgggttcaaattgcccattttaaattggtatatttagtttttgagaatttttaatataattttaaattttttcaaaatttcaaaaatgccgcaatcccgagcgggatcccgcaaattttaaatgctggatttgcggggttaataccgctggatccgttcccgcaaaaaatttgaattctaattacacagcgggatctgcaaatttgaaatttccagtctctaattacgaacatgctttcttccaattaattaattttccaaaatgacttcattcataataaactactaaaacaaaaggaaatgaatggtgagaaaactgtacaaatatttgtaaataatgaaatattggaaattgaacagctgacttttgcggtaattacgttaattagcgtcacttttaattgtcaattgggagcatataaaaaggcattaattaatcactgtcaagcatcaaattaattagcaaacatttaaaacaatttcatcaaaatgcttctaaaccctgttcaaagtgcacttttgcttgtgctaccgttcctttttgtgtcctccgatgctttttggatgtttccgttcggcggcggtggccaaaagccagcgcaatggcaaatgctaaaatggccatggtatttgccgaccgatgccaacaattcgtcaactagttcctcttctacgtcaacttcaacttcaacctcccctaaaagttttcctcctcgagttcgaccagttcgtcctcc

SEQ ID NO: 40760 - DNA, 787 bp, Heterodera glycines
  unsure (1)..(787): unsure at all n locations
tttgaccacaacttctttgaaactcaacgaaattttttgaaattttaaaggcaaataatggaacactttaggctatcaaatggtaccaagaatgtttaatttggatgcttcttgaaaaagttacggtgccttaaatttgtaaaattattatattgtcatgtcaatttttcgtggtcttgtaaactgaaatagagccaaatatattttttattattattagcttatcattcgcactttttgcacttcggctcaccacgttattacacaagtattaatctttgtttgaaagtaacagcttttccaccaaaatttattcttagaatcactgcgtctcaattaaaaattctttgaaaaataaggagaaaatgaaatttaatattgtaaaaacagacatttaacaaccattcgtcgtcgcttttctttgctttcgtcggtttgcatttgcggcaacaaaatgttcaaagtcaacgtcgattattttttgacgctcgcagaaaatgttgatgaatttcattcatattggaggattgaaattcgttgttttttctttaaattttatgttccccctaattttatgtctaatccgacttttacaattttgactttgacccataaaaaataaaaaaatgaataaatgagtgcgaagtatggccataaaatgtcaaaagtttaaaatgccccgggccgaaatgcgcggccaatttttttttaattntttatcgacccgttatttatttattcatttgctgntgcactctcccaatgtgnatttatttgggaaacttct

SEQ ID NO: 40761 - DNA, 1614 bp, Heterodera glycines
  unsure (1)..(1614): unsure at all n locations
aaaaatgtgtttgatactttcaggtccagcttaaaaagatttgcgtagcattcttggctaattgcattttntggtaaaaaaaatacgacgatttgattaataatatttttatgtaaatatttacgtataaaactntaattggctgaaactaaatatttaatttacgtaatttggtaaccttagcatacaaaataatattaaatgcgaatgagtatgaattgaggggattatttggtgggggaggggaggggaaggatatgccgaggagcgatcgatcggacggagtctaaatgcaaaatcagacaaatcaatataagttttttctgatcacgccaaaatcgccatttttatgggcttttccccatcatcattcttgaattttgccctgacgcatcgtctcaatcatttttcgcaaactttccgcgtcgctgggcgtgtaagtgcggctcagcttcttcacgttcagacaacaggtgcgcaccaacgcatcggtcactgaaaggggccagaaattagaaggaattagctcttttcaatgtaaaaagagagggaattttcagccaaaatggtcaattaaaacacagaggaaattccagtcattttacgagattcttgaagtcaaagtgtgaccatcgtatcgccaaaaattagagtccggtaaaaaaaaaattccggtaacggggaacgggaaacgggaatcgataaagagcgggacgggaaacgggaacgggattcccggctttttcccgttcccgtaaaaatcccgtcaattttaacgggaatcccgccgggaaacgggaaaaaatttttttaatgaaaaattttgattttttaaaaattttttactttaattatttttcaagtgaaaatattataatttaaacggtttaaaaaatttctctgtgtaaatgattgagtattttttaaaattaaatggacaaaaataacaaaaaatttaataaaatagaattttcggaattgatttgttcaaaatccttcgttaattttccaccaatccaaagggtccaattcctttaacctcaataaacggaatcacaatatttattcacgaaatttcataaatagcagccacttgagaccaaaaattaaaaaaaaacatcaggtccttgaaagcgcttacgccataaaaattcttccacatacgaattcaataaacttctgtgtgttcaatatctttttttgtgttctgccttgaatttctgccaaagtcctccttcaactgtgttcatgtgctgacccgtttcgctattcacaaattccacactgtggttgactgtgtagtgtgtgtaacagggctggacgcaattgcggattacggaaattgcggggtttttggacccccgtaattgcggatttttgggatttatccgcaattttgatccgtaatttgactattggattatttttcgagacgatttcttgtaagattattttttataaaatgaatttttttttcttttttattaaaaggctacccatatttcgatttcatctgacttattcttggaaatttgtagtattattaacatacataaaagggggcgggaggctagcgaaggggaaaagatgaaatgcctaaaaaattggctattt

SEQ ID NO: 40762 - DNA, 1472 bp, Heterodera glycines
cgtgcctgcgacgcactttggacacggctttgtgccattgccatgccaattcgctgctcgccgttttcccttccgttgtcaatgtcttatgaaacgaacaccggtcaaatgcatccctaacaaacgaacaaagacccaaaagtgtgtggatgagccgtgccgtgtcgttttcgttgaccgatttttcgatggaatccaaaatgggctgaatgtgggcgccctcgtcgagcaaaaccatttgagcattctgaaaacaaccgcagcaaattgggagtccaaatggaaaataaaaagcaaattgtgccaacaatgactggcaaaagagtgccgacgacaaattcggtgcattgtgacctttgagcgtgtaacaattcaatgtaaaagttgcgattttcggcttcaatttgctgcaacggaaaaatgatttttttttttggaattaaaatcggaaatttttcgcgggtgtaaaaacggacgaaaatgtttataatggaagacattgactgaatgacctgtccgtttttgttgtgctttcctccgccggatgttttaaagcgtttgcaatttctctgatggcgtcgctccaaatcggaaatctgtaaaaaattgcactgttaattgcaaaaaaacaaaaccaaaaaagactcagcgtaaattaatggttgggggacgcggttttggcatttctcacgatttatgtaaaatttgcatttccccgaatttagctaaacgcattaaattatgagaaaattaataccaaggaaaaacaaatgtttaagaagagcgtcaatccaacttaaatggttgtctttgatcaatcctcaaaaaagtgaaaccattgaaatataataagaccaacattagggaaatgtcaaagcgatggcccacacttttgccatggtttgaatatttaatgccaatgaatcgcaccgtttggcgccactcgccgccccttcgtcccaaaccgtcggcacaatgcttttgcaatgtttcgccccatttgcgaatcgccgtttcgaccgcgcgttgtctgaggcaaaagcgcgtcaacgcggcaccgatgtcgcggctgacacctgcggaacagacgaaggagaagcacttttgaaacacgagaggaacttctagaacccatttcataaaatggttttatcacggccaaaaaggcgtgtgcccaaaaaactcggcattttctgataattccgtccctcattttgttgctaattaccattgacagtgttggcactgtcactgatcgtttgcagtgcgtccacaaaagcgccaaaagcggcggccatttggtgcaattgcgaggagagtttcgccgcgcgtccgccaaaagtgtcccaagcggaagttgaggcccaaatgggagaaaaaggcattcgttcgaagtattaaaaacgaatttagtcatccaaaccttaagctcactgaccaaacccgagggaagcatagaattaattgtccct

SEQ ID NO: 40763 - DNA, 973 bp, Heterodera glycines
  unsure (1)..(973): unsure at all n locations
ttcattttttataagccatgaatttttttaattgaataaacagcttaatggaaaaagaaactgagcccaaaaaggggtttcatgtcgtatttgcctgggttactaatttagtttttttttataatctcatttttccttgatttagttttctaaatttctgagattttttctgtttaataaatattaaattttttgaattcccttttttggaaaaagacattttcctatcgaaaaatctgttttgaaaaccttcgaagaaatttagaaataaagtcgaataatcgaatcccgaattcaggtgccactttctcctcgtcctgcggcaaccttaacccaaggtgccgataggtaaacttgaacaatttggtgaaacttgttttgcccacgaaataaataattttgaagctgatttgtgagttaaattattagtgtcaagaggaaaagctaaaaaaaaaaactcaatatattaataacaaaaataattctttttaatcactcgaaatattttttcaaaatgcaaaagataataattatttttaagaagtcagatttgctgaacatttaattcaatatttaatggattggaacactttttaagttttcacgattttttccctttctattgtcattgtgtacgatgtcggataaacgacgatcattaatttactgaaacaaaacgtaggacaatgtccaatttccatggttattcaacgaattcgtcgggacgatgaattgaaataggaatgtctaatcccgaaagtttaattgaaacatgaaaaatgacatgtaatgagagtacctanatcatattggagatacgacgcaaattgaaattggacccgccggaaaaacggagacgaaaattagcgtanatgggcaaaaagcgaaattggcacgggcagcatttgttgcttcatctccattgcagctgtaaccctctttcgtgatgattaagatgaagtgngcacatgcg

SEQ ID NO: 40764 - DNA, 890 bp, Heterodera glycines
  unsure (1)..(890): unsure at all n locations
ccaacactttaattttggtaggcttgatttttgaaaatttttttatatttaaaaaagaacttttttagctgagcttgatcagtcattcattgatttattggtggtggaactcgaaaattcgtgaactgtgcaaagaagttgttgaaactctgcacaaaaagctccttaaatcgcgctaaattaacttcgggaataaaaattgtcaaatcattctcgagagtgtcgataaaccttcattgatatttaagcgctaattcggaatttaatgataaaatcctatcttcattaaatactttttaatataaataaatattttaagcaacaaagaaatctttaaaatctatccatttagatgctaattaaaatcacatgtccatagatctcttattttaaattttggcattttattttgcctttaccaactttagtccatgtgcatgtgtgtgagattcacatgcttttccactggcatggtccgccgcccattccacgcaccattatattccctgcaaaaaaaaaaaaaaattaaaaatccccaacaagcataggagttaatatatttaactcgtgtaagcttacgttaatcacattgatttttgtttaaatcataagcacatttattgcataaaaatgaaaatatgaggaaaacatatttttattattaagcattattattattattacttattaaattaaacattacaaaagagcccgataaaaaaaaattgcgagagtcagaaattttggaagcgggaatcccgaaaaaaaatcgcgggaatctcgctccnaacgagctctaatttatatagaaaaaagaaaaaattaagataaacaaatgcttaataatttgacaacaccttttggcacttttatttaccatttatactttt

SEQ ID NO: 40765 - DNA, 1044 bp, Heterodera glycines
tgtttctaggcgcgtttgtttggaaaaaatttggataattggctatctctttctctgctcagcagtaataggaattccaaccgcattctcagaataattacgccgatactaattgttctggaatttgtttctctgcgcgtttgtttgtgaaaaatttggaaaattggctatctctttttctgctcaacagtaataggaattccaactgcattctcagaataattacgccgatactaattgttctggaatttgtttctcggcgcgtttgtttgggaaaaatttggaaaattggctatctctttttctgctcaacagtaataggaattccaaccgcattctcagaataattacgccgatactaattgttctggaatttgtttctctgcgcgtttgtttgtgaaaaatttggaaaataggctatctcttttttgctcaacagtaataggaattccaactgcattctcagaataattacgccgatactaattgttctggaatttgtttctcggcgcgtttgtttgggaaaaatttggaaaattggctatctctttttctgctcaacagtaataggaattccaaccgcattctcagaataattacgccgatactaattgttctggaatttgtttctcggcgcgtttgtttgggaaaaatttggaaaattggctatctctttttctgctcaacagtaataggaattccaaccgcattctcagaataattacgccgatactaattgttctggaatttgtttctcggcgcgtttgtttgggaaaaatttggaaaattggctatctctttttctgctcaacagtaataggaattccaaccgcattctcagaataattacgccgatactaattgttctggaatttgcttctcggcgcgtttgtttgggaaaaatttggaaaattggctatctctttttctgctcaacagtaataggaattccaaccgcattctcagaataattacgccgatactaattgttctggcatgtgtttctcggcgcgtttgttggggaaaaattcgaaaattggctat

SEQ ID NO: 40766 - DNA, 1041 bp, Heterodera glycines
gggtgtctcgggaccgattttgcatacgaaggtccatctttcttctctggtgtcgacctttatttatttttttttgtttgctattcaaagcaccttttttgcggcgcgtattttttcaaaaaaactgaggaagggggtggcggccggtccggtccgacggtgccgataggcgccgccgtgaaatttttaaaattttatataattttgctcgggaaattgtgcaaattttaaatacccccttcgttaacgaccccctccctctttacaaccgccccccttacgacgaacggggggggtggatttaaaataattctgtatatatgaacaatacacataacaccatgttccaattcagcaataaacttaaactaattgtaagtaaagacaacagaaaacaaacaaaacaaaaaccggctaaaatttcaagaaatgtgattttttggcatcaaaaatgatgggaaaaaatttaaatgaaactatatttattgctttaagacgtacctatttgattggttaatgaacttttttttgtgggaaaaaccgaaaattttgcaaaaatgcgatttgttatttattctcgtttccaccccctcactttctttgctctctttcaccaaccgtcaagtcaaaaatgatgaattttaagattttttgcaacccatcaaccccacgtaaccccttaaaattttaatgtattttaatccccaattctcccctctctacaaaatgtatgattttaggacgatgatgattatgagtagggaacatatgaacggtgcaacagtttcgctgatggtgtttgttggcatggtctgttgttgtccatcatcacctgttgggttagtagagactttggcaaaggctttggccaatggcatcggaggcgcctgtttttgtttttcggtcaaacgcggcacatttgtggttgtggtggtagcggaatggcatggatcgttgtggatgttgttgtaaggtggtagtgttgctggcctcactttttgtcgccgtcgcccacttctgtcgccactcaccgctaccgta

SEQ ID NO: 40767 - DNA, 478 bp, Heterodera glycines
ctctctctctcctctccccctctcctctctcataggttccgtcctttcgggacgcgaaccgtacggttccgtccttttaggacgagaactgtacggttccgtccttttaggacgtgaaccaattgacttgttttcccattcaattttgaaaaaagaattaaaaatttgtccatttttaaaattctctctctctctctcttctctcttttataggttccgtccttttgggggatgcgaaccgtacggttccgtccttttaggacgagaactgtacggttccgttttttttttaggatgtgaacttatggaacttttcctcgtccaattttgaaaaaaaaaaaattgtccatttctgaaattcactcttttttaaaaaattttttctcttacgtgggttccgtccttccaggacgtgaaccgtacggttccgtccttttaggacgagaactgtacggttccgtccttttaggacgagaac

SEQ ID NO: 40768 - DNA, 1513 bp, Heterodera glycines
  unsure (1)..(1513): unsure at all n locations
ctaaacagcagcagtgacggcgccgaagggacgatggatcagctgaaccgcgtggttggcccggacggtctcagtccgttgatcgtcgcggcacggcacggacatgtcggactggttgacctgctgatcaaccgtggtgagaagatgccctgttcatcttttgctgtcaaatgcgaagcccgcaatggtcaggtgctcagttggatttatccgattcgcacgggcgaccggcggcgatgcatggcatcgaagctgggcattcctcgaccgtggcacttctgcttgagcgcggaagtgcgctttttgcacgcgactcgcacggaaacacgatgctgcacttattgggacgacatccgaacaaatgtctaatctatcgactgtcggaagacggactgtcgctggaggacaaaaacaaggaaggtcggtggaacaaggcaggggacgagggcacgccaaacaaatcttggcacgctcaatgagccgtgaaatggccaagaaaacaaaagtaaagcgtaaggcaagcagactaacaacccatatcaatggccagaaatcagcatgttcatgacaactcgaatatcttttcagaccttcgcccgatcgaagtggcaattcgtgctggccaactcgtcgcagtcgacacatttcttcgccgtggcgcccgtctccgctcgctgacttggcaaattgcgctgagttcccatccccctctggtgctggtactgctccggaaactgctcgacgacgcgcaaattctattgcggcgcaaacgaaccgcagaagcgcaacatcgactcagttacgcactgcaaaagtgcgacgaactgctcgaaaaggctgaagcagaagacaacgaagcattgagacggatggggccgcaactgcgacgcgtcaaagtgggagaaggaaacgaaatttttaaaaaacaaatggaaaagtggacgagagagagagagagaggggaggatgagggagaagagagagaggaacggaatgggacagggataggataaggaataggacatgggtaggatcaaaaagggggaaagggaaggaatagggataaacagcccatgctaatcaggtacaagcttttcactcaatggccactctgaaacggcgctgcaacgatttgtccgatgccattgcgttggccagcaatgcgttggaattgttggaccaccacaacgtcggcggtgttcccgcgggcaattcgcttcgtccgccttcgcgcggatccctcggcggcgaacgcgaagaaaaaacggacgcggagagacgcgcagaagacgaacagcgcttcgagttgcatttgctacgcgcgaagtgccactttgacgcacgcgacttggaacgcgcgcgggtggacgcgcaactcgcgacatgcatganaccggaagaggtggaggcgcagaatttgttggccgtactcagcgcgggcaattagccaattaattaattaattcattcataattagacagacgagaggaaaaggggtcgagaatgaatctc

SEQ ID NO: 40769 - DNA, 973 bp, Heterodera glycines
tttctcggggaatctcaaaaatgaaaaattattaaaaagtattttttcctgtgaccgaattcgacgttaaaatgacattttcaaatttttaacaaataattagattttcttggagactttgtttatataaaatatttatttgccattttttggagtgccccaaaatgccaattttatacgcttttaagaattagtttaaattttgcttctctttttttttttgtttgtttcttcgcttccctctcattgtcaggtcattgccattgcccttttgtacatgtccttcaaaatggagcgcatggaggagcagcaaatcggacggacattccattttgacgcgagcacagagtggtggaatttggtaagaatatttgttgaaaataatagaaatgcaactacgttccccccccccctcacatttttaaaattttcaaacaatttccaagaaaaaatcagaacctttttataagaaattttattaaaattactgaaaattttttgttttttttcaaaattttcccaaaaaaatcgctgagaaattttaaaaaatttcaattattacaaaaaaatgtctagcaataagtttttttagtgaattctaacaataaatattaaaatttaaaaaaaattcagggagcgggaaacgtgctgcttccaaagtaattaaccccaattttaaatacttttttcacagtatgtgcaaaatttgaccgtgcccatgatggacgacatttgtcacaaagtgttggattccatcgcaccagcgaacggagaggacgcgccaatggcaaacggaacaaaaaattgacagatttaaatttttgtttttttttgttttattttaaaaaatatttttttgacgttgccttctattataatttgcaaaaaaataatttcgaaaatcgtgcatacgttacaatgcaaaaggtgtctcaggttaagggtaatacgacggacgattgagacggggggg

SEQ ID NO: 40770 - DNA, 1634 bp, Heterodera glycines
tttatcacccaacgttctagactgatcagaagctcaccaaattttgcagggaaactgctgagaaccctacaaatgcttataaattttcttagaattttttgcctggaggaacacagttcttcacacttaccacaccagcattatttttttttaattattttttgcatttgatcacccaacgttctagactgatcagaagctcaccaaattttgcagggaaactgctgagaacccttcaaatgcttataaattttcttagaattttttgcctggaggaacacagttcttcacacttaccacaccagcattatttttttttaattatttttttcattttatcacccaacgttctagactgatcagaagctcaccaaattttgcagggaaactgctgagaaccctacaaatgcttataaattttcttagaattttttgcctggaggaacacagttcttcacacttaccacaccagcattatttttttttaattattttttgcatttgatcacccaacgttctagactgatcagaagctcaccaaattttgcagggaaactgctgagaacccttcaaatgcttataaattttcttagaattttttgcctggaggaacacagttcttcacacttaccacacaagcttaaaatttttggcctgtttaaaaaggaattaaaaatttttttaaatttattcatctccctttttgatagaaaaagcatcagagtgctaaaattaagttgtaaataaaatttggtgcgctttagagcactttctgaaaaaaatatttatgaaacaaaaaaatcgattttttcaagtgtccgtttggggtactcaaacaattatggggagcaaaaatccaacgcagaattaaagtacaggctatagggaagctattcccgaaggattcggtctccccataaatctgggcgcatcggttcggggggactgccccgaaaacaaaaataaatcgattttttcaagtgtccgtttggggtactcaaacaattatggggagcaaaaatccaacgcagaattaaagtacaggctatagggaagctattcccgaaggattcggtctccccataaatctgggcgcatcggttcggggggactgccccgaaaacaaaaataaatcgattttttcaagtgtccgtttggggtactcaaacaattatggggagcaaaaatccaacgcagaattaaagtacaggctatagggaagctattccggaaggattcggtctccccataaatctgggcgcatcggttcggggggactgccccgaaaacaaaaaaatcgattttttcaagtgtccgtttggggtactcaaacaattatggggagcaaaaatccaaggtaaaaataaagtagaggtatatcgaagctattcccgaaggattcggactccttataaatctgggcgcatcggttcagggggactgccccgaaaacccaaaaaaaaattttttggataaaaattatttaaatgaactgactagataatatttaaaataggttatttctcttcctttcagtatccctgcaaagtttggtgcgcttctgatcagtttctgaaaaaaaagttaagcctaaactttttggcctgtttaaaaaggaattaaaaattttaaaa

SEQ ID NO: 40771 - DNA, 658 bp, Heterodera glycines
cgttcgtaattctgaaaggcccctggctggacccaccaactgcacattttctgtcccataacttgagttgaatagacaaatgtcaaacagattcccaaacttcatgtcattattatcggtacttaattggcaaaatataattttaaaaacaatttttatttaattttatttaaaatttggaattatttaattttggatgcgatgtcgtgtataactttccaattttgtgtcgaatttccgcggatatcgcattgctgtctcgcatatcttttttcgggttttcagtctgttcccagttcaggaattttttataatttcatcccgttgacgatttttgaaaaaacagcaagaatcgggaaagattcaaatgcttgatagtccttccgcccttccgccgtcaagtgccattcactttcgttttgccattcattttcatttgcgttcccaattaatccctccaaaaactatgcccacccaatcgactgatgcaaattgacgtgctaaggaggagaaaagaggaataagctaaataaatctcagcgaagcgatcgataggagggataaaggggggggggaagcagagggagtgtggtggactgactggacacgacatgggatggacgacagaacgacacccacgggaaggaatttgtgttgt

SEQ ID NO: 40772 - DNA, 943 bp, Heterodera glycines
  unsure (1)..(943): unsure at all n locations
acacaaaaaatataaaagctgagaatttttttaccactttacacccctaaatttgaaacattttgccttttccatttttattgcctcttttgaggtttttttagggcctaaagcctacctacttatgcaatttttattgcctaaaaatattttcaatagatatgggaaaatataaatgcataatataaaaaaacatattctttttgaataaaaaactgaaaaacactaaaaatcctatttttgattatctcttattttttaaatttttcttaggatttttaaattttcattttttaaattttgctacgacatcatttttattgggtccgtctgacaattagcgtttaaaaggccaacataaaacaaacattgtttaaaactgaataggacaatgtttctcatcaaagataaattcaaaggcgaaacattttaatattctcagctaaacaatttccttcaatttgttcttttttccattttgcacgcgattttgtcatgtaattaatagaagaacttattattgttgcattttgtcttcattttcaaattcttagaaagaaacataaatcaatgacaaaattaaattaaaaatcagataagaaaataaatagacaaaatgtgacattcggccaaattatacaataaaaagtttatcatcataccatcagcagggcaggaggaccttcagcttttttctgggtttttcttggtttgaaatagggttactctggtcgggtattttggcaaaaccgagtctgggtattgccgggtccagaaaagccaggttctggttccggctaccggttccgggtcttaaaaagccgggtatccgggtctggacccggtcgggtacccgggcccatttaaccctaatntttaatatgtgaaaaggttttcttattacaaaaacttatttcacctatnnttggcttttgcccaaaca

SEQ ID NO: 40773 - DNA, 710 bp, Heterodera glycines
aaagtttttattaaaggttaaaaatcgaatgcattttaatttaaaaattttttaaaataatttacaacaaatcttaaaattaataaacattgaaaaaagtgaaaaaatgcagaaaaataatgtacaccgtccggatccgaacctgccccccccccacctcaaaatgatgcctcagaatccccaatcacacagggattctgaggtcttaacgatgtcaaaagtaaaatctgatcacgtattcgtgatcagcggcccaaataacccctaaagacatgtttttggaagatttttgtgaaaaaaatttctcaactcaaaaatcatgtgctccctctcccctttggtcccgaatcccaaaatcacttttatttttgtatctttttttaaaaatgtgataaaaataccaaataaaatttatataatagagcaaaaaattgttagccaaatttgggcgctatttgcaaagagtaaccttttgaattctatcaaaaaacaaaaggggggacccttttgttttgcaatttataatgatttttaggggtaatcctaggcgctgagcatgaatctgaccttatttttgctcaatttcgaaccccggacccggagttgttgaaaacaattaagcgtggttaaagtcgtaaacaaaagttatgaatcgggcggaaccattgaataagattgaacaataagaatagacggcagaaactggagca

SEQ ID NO: 40774 - DNA, 1202 bp, Heterodera glycines
gcttaaatctcaaggggaaattgatagccaatactttacataaaatttaaatgacaccaaactttgaataattggaccagtaaaaaaggcacttaacaatttgtaggttaattatgtcccaataaatattaataataactgtttaatttttaaataattttattattttatttcatacatatatgtatctttttttcttttttctgctctgaattaattttttcttttattgctttctctcgcactttttcttcatcattaaatcacatttttcagatgcttattcttgaataaatttaatgatttttataaataaaaaagcaaataaccaaaaatattttaatatttccacttcacgttaagattaattaaataaatttataaaattcatattttattttttaattgatgttggctgtttttaataaagacttggaaatatgagcatataactacaattttataaaatcacaaaattcttatttcaaatatttttaataattttttcaagatggcatttttcacaatttttctctccatcggaattatttttctcgcgaatattatctcacgagtaagccaatccggttattaattgtttatttatcataattcattatttttcaggcttttccatgcgataataaagtagtttatgtaccaggagaaagatgctgtcatggcacagataacttcaagtaatatttttaattttttaaaaattaaacaaggttaattaacatcgtaaatgtcccaaggcattgaccccgagagtggggatcgagcccggtgactttactaggtagagacgtggttggtcgcgattcctaaaaagtgcaaaaatgaatcatttgatctttgtgtgatttttaaacaattaactattaaattaagcaaaatttaacaaattttgaaaaaaaaaattctaattaatatattgttaatctatatttaaattgtcatttttataaattttattagcaatttaaatgcaagttttatatagtcttcaaatttgagctaaggtcctatttaattcatttcgcaaatcgaaaaacaaaattccaaaattaatcaaatgacaaaaaataaagcaataatttcgattaagggaaaataaaaatcaatttaataaaaagtgcaaaagtcacgaaaaattaattaagattaatgaattccattttgcacatttataaaaaacg

SEQ ID NO: 40775 - DNA, 1723 bp, Heterodera glycines
  unsure (1)..(1723): unsure at all n locations
gaagtgcgtggatgtctgttccacctcgtccanaaattttcaccaagaaaatttctgaatttgggctgaaacaggttgaattcatgacaaaaaaaaaaaaatcgaattttcgaaaattttagcgctatcaaaatgacccgacattcgcagaaatggcacgatgtgtcacgtcgctcgcgtttctcccaattggagacttgacccctggaatcattgctctggacatggctcttcccgacgaacttactcccgtccttgactggtaaattgacaatctcacaaattgtttactatttactgttctttatttattaggttcatcatgaactacacgggtcgtcttaagaatgatggaagccgaacgcgcccgcgatttgacccaaacacttggagcgtttacactcgaacaatgcaaggcgatgaccggacgaataaccattcagaagccgcgaacagacgcctgcagtgctcatttgcctgttcacatccatcgatttggcgtttcattgaccttctgcgaaaggatcaaaagttgtcggatgatgacttcgcgaagtgttcaactggacaagaaccaccgcaaaaggcaaagaaatatcgcgaagcagaccgccgaattctcacgatggttcaaaattatttgccacttaacaacggagacaccaacattttcccaattcatcagcctttcaatcatcattttatcattacctttttgatcggaatttctcgaaattatgaaatgagaccgtgatttgaaacagataaaatgtttgttaattttcttgcttgttttaattaagtgtttatttatattcatagtttgatatgaaaatagcctaaatacgtgaatagggaactggccatagggaaacggtcatagggaaacggcccatagggaaacggtcatagggaaatggtcatagggaaacgaacccaacccactcccgattacaaaaaaaaagattaaatcccgaccgcaaccaacgagaataatgctgatgatcaagaggaaaaatagttataaagtataagcatttcttactaattcagagaccattttaaatgcatattcccttttaataagaaaactgatttaaggttaattttcgtactttatgtagctctattttataaattttgttttttgcgatggatttgccaccttccaaattatcaaatgccgcttcacgtttatggggcgaaagcactggacagtttcaaaagaaaacggatgtgaagattgatttgggccttcatcaaacaatttcaacgaatggaggaagcgatgagaaggcgtccacttcgtcgctttctgctgctggatttgtattcggctctcggatgtctgaacgggtcaccaacagggtttgttttttcatttaccatttatttttaacaatactaataactccaaaaatcgtcatttaataccgatttggaaagtcgataaaaatttagtcgaacaacttattcgcggacagtagcaaaggcagcgatggaaaaggaaaaccaaatgatgtatcttcaatatttaaacgtatggctgaaaaaactacgaccactgtcaacacagcaacaatggtttgggaaattaggccaaaattcattttgccatgacctttagtctgacatgagacattaatcttaangcatttcaaatttgtactttaaaaattcagtggaaagcaattncgtcaaacggaagcggagggattacgat

SEQ ID NO: 40776 - DNA, 992 bp, Heterodera glycines
aagagaagaagagatacagaaagtggaagagaaagtgaaagatgtacagaaagtggaagaggaacagaaagtggaagtggaacagaaagtggaagaggaacagagagtggaagaggaacagaaagcggaagagatagtggtagaggaacagaaagtggaagaggaacagaaagcggaagagaaagtggatgaggaacagaaagtggaagagaaagtggaagaggaacagaaagtggaagagaaacagaaagtggaagaggaacagaaagcgcaagagaagaagaggaacagaaagtggaagagaaacagaaagtggaagagaaagagtaagaggaacagaaagtggaagagaaagtgtaagaggaacagaaagtggaagagaaagtggaagtggaagaggaacagaaagaggaagagaaagtggaagaggaacagaaagtggaagagaaagtgaaagaggaacagaaagtggaagaggaacagaaagtggaagagaaagagaaagaggaacagaaagcggaagagaaatcggaagagaagaagaggaacagaaagtggaagagaaagtggaagacgaacagaaagtggaagaggaacagaaagtggaagacgaacagaaagtggaagaggaacagaaagtggaagaggaacagaaagcggaagagaaagtggaagaggaacagaaagtggaagaggaacagaaagcggaagagaaacagaagtggaagaggaacagaaagtgcaagagaagaagaggaacagaaagtggaagagaaacagaaagtggaagaggaacagaaagcgcaagagaagaagaggaacagaaagtggaagagaaacagaaagaggaagagaaagagtaagaggaacagaaagtggaagagaaagtgtaagaggaacagaaagtggaagagaaagtggaagacgaaccgaaagtggaagaggaacagaaatagaaggaggaacagaaagtgaagagaaagttaagagga

SEQ ID NO: 40777 - DNA, 1190 bp, Heterodera glycines
  unsure (1)..(1190): unsure at all n locations
catattcatttgtcatttataaatattattatntaataaattttctgaaaactntcatggtnaacagaaacatttcgcaaattaaaatacggtaaaaatattaaatttaattatttttatttatttttcaagtttaaattaaaaaatgggaaaaatgaacatttattataaaatgaatttaatttttgaaaagactgcacaaaccgtaagggaaaaaagttgtaaatttttgattatttccttattagtaattataattttttaattttcgacacccgttgactattttcatttttaaataatattgttataaaaaaacaaaacttaaatataaataaaaaaaatcgaaaaattgtttaatgcacttgaaaagtactaattaacttaactatttctcatattcatttgtcatttataaatattattatttaataaattttctgaaaactttcatggtaaacagaaacaattcgcaaattaaaatacggtaaaaatattaaatttaattatttttatttatttttcaagtttaaattaaaaaatgggaaaaatgaacatttattataaaatgaatttaatttttgaaaagactgcacaaaccgtaagggaaaaaagttgtaaatttttgattatttccttattagtaattataattttttaattttcgacacccgttgactattttcatttttaaataatattgttataaaaaaaacaaaacttaaatataaataaaaaaaaatcgaaaaattgtttaatgcacttgaaaagtactaattaacttaactatttctcatattcatttgtcatttataatgttgtattttgataattaaattgactataattatttaaatatttcttggcttaatgtattttcttttattatggcgttatttttttcatttaagaatggttctttttattcttctcagtctttgctttttgattgacttcaaccaaatttgtttgtctttttctcttttaaattttgtgttgtgattaaagtgatttgaattgactccggtatccttattcggttttatccctgcctctcaacccaaaagacccggaaaaattacaatttggcgctcctgaggaacaggtacaaaagtggtggtgacaaataaagagtagggtgagatcggagaaatttgtttgaaagaggttttaacttttgtgcgtgaaaa

SEQ ID NO: 40778 - DNA, 1450 bp, Heterodera glycines
agttgctggtggtgtgccaccgccttggacacattgtcacgtgttcggtgccaaacaacacgtttttgtgccatcgtcggccgcaccgagccaagtgttgttgttgttgttgttattgttggcattgccatcgacgcattcatcttcctgaacgaaaattttatgagtgaaaaatcgaattatttttgtctcaaatccgacaaaaaaattcagtctcgattaagttcattggtcaatttaaacagtttgatcactcgagaagggattacaatagaggattttaaatcagtgatcagaaatcttggaacataatttcaatctcaagtaaaaacattgatcatctggattaaagtctcagaaagcggcactgatcagaaaaaaccggattttgatcagtgatgaaagggttcatttcgttgatcacttggttaaaacatgaggtttagcattcattctcgagtcaaaccactgatccatgtttcctccagctcggtaggcgagattgggtggtttttactaattgccaattatggatttaattgcctgacaaacgcccgaatcagcggacagtccggaggcacgggccaccgaatttcgggcaaagaattggctgatttgttgcggttggatgccaaattgacagttcaagcaggccatcatatttgttgaagagcaattattaatattattattattgttgctattattgttgttgttggaagtgatatgtttgcagtgatcggtcttaaatttataaaaaaaaaattttgaattttaattaaattaaaatattttgttttttatttaaactttatgactgttttttaaatggcaatataataagtttaatttaatgtattttatataatttattaatgaaatatttttagaaaatattttaaaaaaaaattgtttaatataaaatttaattaattatcacaaaattaatttatttaataacaatataattagtaaaaataatattaaattttaatatgttaaattttataatgagatatgtttcaacatataaattgcaatttaaaattatcaccagatggtgagaatggcattgtggaagaaattgccgagtcgtcgcgactgatcggtttcgacgaagacaaatcaaaatcggccgaatttcgaccaaatgaacaacgcaacacagcagtgtcggaagaactaataaaataattatgattatttttaaatattcgaaataattaattcttactcaaagcacctaatttgataattaagtatgagataatgaacccttaattagggcgtttggttgcccaataaaaacttataattatgaaaaaaacttaatttcatgctcctcaagaagtaccctaaaaagttttttaattttatttgaatacctattttattgtcgaaatcaagcctcaccctcgaaaaatcataaaaattcctacaaaaatctaat

SEQ ID NO: 40779 - DNA, 959 bp, Heterodera glycines
agtcagaaaatgggaaattcgtttggacagttagctgaggccttctgctgctgctatttgttgaggcaaactgcggaagaaaagctcatttgccaattttaaaaactttaaaatttcatttttttgcctcccccgcctttgactgaattttaaaataattaaatttattatttaaatattcattcacaccttttgctgctgttcattataattgttaatttactttggcatttccccaccttttggggtccttcccctgccaatgtctctgcggatgttcgtccgctgtccgccacctccgacccgtccccatcattagcgttcatcgcttccataagtccgcttcggatttcgttaagcgggtcctcaaccattttcctcattttactttggctaacattcgatttgagtgacgatgactcagacattgcgccttctctcatttcattggcatcgccgtcgttggcattggcgctgcaacaattaatttaaatatttaattcataatgtgtgtgctacatcatttctacctgcttctacgttttctcgtcacttcgttccccccatttttggcactttgaccgcccaattttccaaaaggctcctcaaattttcattttatttttttaatgaattaatttttgatttcgaccacttcctctggagtgagttcaataacggtttgttgctgttgttgttgattgtctgtggtgctcataattggtggtgctgttctcgtgtatcttacaaaattataaattatttttccaaataaattatttaaaaatggcactcattgctcgccaaatcgtccacggtcatttttttacagcacaacaacaggccggaaggacagtttcggttcagcattaaaagcctaatttgggcactttgtaaattatcgttaggtaatttgtttcccgacatttttgtctatttttgatgaaaattatcgaaag

SEQ ID NO: 40780 - DNA, 938 bp, Heterodera glycines
  unsure (1)..(938): unsure at all n locations
attttagcactatttttgaatacaaatatgccaatacccattttattaaaataaacttttttttattattattaaaaaaggttttgaggcaagaattagagcatcatttataaaatcatttgtatgaaaatatccatttatcatagtttatttgtcaaatattatatttttatcactataataattatgattaattaagtgcgttttgcgtgagtttttcaagactaagagaaggagttaagtttcatttttcaatttttgaaatcgaatattttcattggaatttcggaggcattactggaaaaagaattattgaaattttgcttctattttttagctcttacacaaattgccaattttgtgggtttagcctatttctgatcattttgggtactgcatttcaattgtcgccgccaattttagaattttgggtgagattgttaagagattaacgccaaaaaattgaaatattttagggttttaaaagtaattttgaatattcccaaatgaattaagtgttagccatgtgccgaggcgccttcatcttcctcccctctctctctcttcccctctcctcctccccccccccccttctccctcttccctcttccgatccctctctctctcttttcctctcttctccctccctctcctcctctctcgctcccgcctctctccctctcatcctcctctctcccctgcccctttcttcctctccccctccctcttcccctccctcacttcccattcatcttcctcccctctctctcttcccctctcctgctcttcccccctttctccctcttccctcttccgatcccctcntctcccttccgcctctctccctctcatcctcctctctcccctgcccctttcctcctctccccctccctcttcccctccctcacttcccattcatctttctcccctctctctct

SEQ ID NO: 40781 - DNA, 1029 bp, Heterodera glycines
tggatttgtatattattaactacgaaaattgccgcccaatttgaattttgaagtgcattgttttgagctacattaacaatgatgtgctgcaaattgggcacaattaacaataaaattttgaaatgagaatttttgtcggttgaaaatccccgcgtccgtaactaaataagtacataagtgtgagtgttgtgttgtgttagctaacgactgtttgcttgcggtgctgctgctgctttcgcttttgcgctttttgtttccggctcaaatcggcgccacaaatttaatggaacaaaaagcgctccctcccgcaattcgagaccgtttctcgaacatcccccccccaccacatgatcacgagcgagcgagcacaaagcggcactacccgctcctcaaacacacattttggcattctgtccgtcgtcgtccccctcccgctcccttcccttttcgccgttttcttttcgttttccgtttgatggatttccttgactgttgctgatccattttactattagcgcggtgcggattcagccccccccctttctcctctgtttttgctccccccccccgcgctcactcacagctcaccaaaataaaaccgtaaagggatgtgtcaagtgacatgtgggtgccgacggcacgtacacatgctaatgctgttcgagaccgaaaattttgcgagaccgacactcaaaacgaaaccgagacttgggcaacaagtctcgagacgctgaaactgatctcgtagctcgagatgcaaccaagactaaagcctgagcaaacttgagcttcttgcagatttagtgccaaaacaatttcggataatcagtgtggtcagccaaaaatggtacgaattttgaagcagtgaaagtggctgctgttgtttattcatgctcacctccacaaaatgctcacaaaaactagcttcgcctaccaaaagtgtcatatgttagcatattcgtacctccactccgatcagcagcggtttgttctgtttgttcctcttcatcctcccaatttccgagacct

SEQ ID NO: 40782 - DNA, 1070 bp, Heterodera glycines
  unsure (1)..(1070): unsure at all n locations
gtatagaaaagggtgttcctatgcnnaaatggatacagtatctgatttatttcacacgcccacacgcccgttgaaaataaaaacacaagtgcnatgcgatggcaaaagttgtgaaattcaaacgcatttnacggccatgaattgccgggaagtgaggcgatcaaaattcataatgatagagaatgtgtggctttacctgttttgaagctaagtcgggcatctgacggctaatatgagaataaagtgcagttcgctctttaaacgaactgattttatggccactttctataaaggcgatggcggtcgctgtatgaccgtaaacccagttttttgtatagaaaagggttgtccaaattgcaaaaggatacagtatctgatttatttcacaacgccaacacgccgttgaaaataaaaacacaagttgcatgtgatggcaaaagttgtgaaattcaaacgcattttacggccatgaattgccgggaagtgaggcgatcaaaattcataatgatagagaatgtgtggctttaactgttttgaagctaagtcgggcatctgacggctaatatgagaataaagtgcagttctctctttaaacgaactgattttatggccactttctataaaggcgatggcggtcgctgtatgaccgtaaacccagtttttttgtatagaaaagggttgtccaaattgcaaatggatacagtatctgatttatttcacaacgccaacacgccgttgaaaataaaaacacaagttgcatgtgatggcaaaagttgtgaaattcaaacgcattttacggccatgaattgccgggaagtgaggcgatcaaaattcataatgatagagaatgtgtggctttaactgttttgaagctaagtcgggcatctgacggctaatatgagaataaagtgcagttctctctttaaacgaactgattttatggccactttctataaaggcgatggcggtcgctgtatgaccgtaaacccagttttttgtatagaaaagggttgtcctaattgcaaatggatacagtatctgatttatttcacaacgccnacacgccgttg

SEQ ID NO: 40783 - DNA, 1105 bp, Heterodera glycines
ccaagcgagaaataataaaataagatggtttagccacttgaccacttatgcatatgaacaaatgctttaaatgaaaataaataatttaattttttttttctcaaaaaatttctccttcttcaccattccctactcttttctcacccagacccccattcttaccagtgcaaatttttaccggcggtaccggcaccaaaaaaaccggtaattaccggtcggtaccggtaccggtaccggtaccggtaccgctcaaccctagtattatcacatattaaattttcaaaataaaattaattaattaattttgttatacagtatttaaataaaaattaatttaacttttttaaagtatactgtaaatacataattcaaaatgtcggacgttgacaaattgtcggatcggatgaagcgtttgctgtgcacgggtgttgatgcgggatgtgcactttttggttgggcaggacgacaaaaaagaggcgagttcggatactgaaaatgttataaatacataagaatgggatgaatttaggcaaaatgcctattttctcatcagctaactttgtataagagttgccgcgggtcggtaaaaaagtcggatcagattcctgtcgatagtcccgcaatttcaccaaacaattcggaattgcctttctgggtcccgcaaaatacggcccatgacctgctcccgcaccgattttaatctgaaaaactgagtcgggaagtcatgtcagaaatatcttgcctaaaaattcttgtctaaaaaatccacctttagttcaatttttttttgaaaaatcaatttttaagtaattttccaattaaacaattttaacccaataaaatatctattttttaaatttgattaattaattaaagcttctaccagcgcataaaccgattttgagagtttcgtccgatgttttcgacgcaatgtttcgatttgacgagcaaaaaagtggaaaaaataattttaattatttttcattttttcaatataattttttttaattgttagaaggaagtgaaggccctattgaaatcccggatgtagacattgaagcgtttaaaactatgttgagctttatttatacggacgatttgaacg

SEQ ID NO: 40784 - DNA, 1447 bp, Heterodera glycines
cgcgaagcgccacgtccgatctcaacaatttaaaaaacgggcgcgaagcgcccgtctggaggccgcgaagcggccgaaaaggcccaactaaatttaaaaacgggcgcgaagcgccccgtcaaaagcaaaacaaaatatgaaaaacgggggcaaagcgcccgttcgaggccgcgaagcggcctaaaaatcccagataatcttttaaaattccaaatatcttcataacccatagcttatctaggtagcgaagctcccaaagcgcgaagcgctttttcccagctaaatagccgacggttcacgcacccgctagtttatattaccatagagaaaagttgcatttcgtttcaaaaaacaaaatctcccggccgaaggccgggagcgccctgaatgtagtggaagggtcttacaactttttgaggcgcatctgggaaaaataagggttttccggtccggtggccaactgagtcccggcggctaatttctcacttttgcttgcgtttgaaggcccataactttttttctaaaactctgatcaaaaaatgcccgctgcgagggcaccccgccaaagggtcctctacatgctggtattttttatttttttaatagagccaccccctggcctgcagaaaatggcaactgaagcgtgctcaaaaagtacacttcagtaccaggctaataccgcgtcggcgtttgatctgagagaaaagtgcccagcagacttattgtagagttttggaagctcgattttctgaaatttaaaaatttcgaaaattttcaaaatttttcgagctaggcctaaaaaacggttttcgggtttttgaattttaagaatttttaacgaattttcccagataaacggagaccacttccaaaacatagtttttcgagctctatcgactggtatttttttcggaaaaatttcgattttttcccggaaatagaaaaaatttttggcctgagcgggacatttgagtcctgggcccataactcgtcaggggtcggttttagacaaaaaatgccttagagcaaaattgtagagctttttaagctctatctaatggtatactatatgaagggaaattttcaaaaattttcgagctaggccccctagaaattttcaaaaattttttttgggttgaaaaaaagggtgaaaaatatttttctggggtaaattagggtcctgagcacaaatatgatgtttattttaagtttcataatttttggaattttttaaaaattctttattttttggcaattttttggcccttggaaatttgggttaatattggaaaattcataacaaatcgaagggttgaccaattttgattaaataaagcattaaaaatggagaaaaatcaggagaattttatgggttttatttggcttttgtatcataaatatgaaaaaagttattccagaaattcttgaaaaattcggattttcagaa

SEQ ID NO: 40785 - DNA, 1302 bp, Heterodera glycines
  unsure (1)..(1302): unsure at all n locations
aaaaataggctcttttaaatatgcctatttaaatacttcatgcttttccttgcttacgaccataccacgtgaaagcacgccatcccgtcngtctggcaagttaagcaacgttgggcntttcttagtacttggaacggagacgtcctgggaatcgaaggtgttgtaagcttttttcctttttcacttgtaaatttatttaaattttcaatttttttagctttttttcgaaaatttttttgtctttttttcggcaggcactgcctctgacaatgttttttatttatttagaaaaataattttttttttcttgttgatttattttaattatatttcatccttaaattttttaataaacattttcaaactttcaccttattaatttaaggcgaattttgccttttttaataaattctcttgtgaaaaggcaaaaaaataggctcttttaaatatgcctatttaaattactttaattgctgtcctttcgcttacgaccatagcacgttgaaagcacgccatcccgtccgtctggcaagttaagcaaagttgggccttcttagtacttggaacggagacgtcctgggaatcgaaggtgttgtaagcttttttcttttaaatttatttaaattttcaatttttttagctttttttcgaaaaattttttgcaatgttttttatttatttagaaaaataaatttattttttttctttttgatttattttaattatatttcatccttaaattttttaataaacattttcaaactttcaccttattaatttaaggcgaattttgccttttttaataaattctcttgtgaaaaggcaaaaaaataggctcttttaaatatgcctatttaaattactttaattgctttcctttcgcttacgaccataccacgttgaaagcacgccatcccgtccgatctggcaagttaagcaacgttgggccatcttagtacttggaacggagacgtcctgggaatcgaaggtgttgtaagcttttttcctttttcacttttaaatttatttaaattttcaatttttttagcttttttcgaaatattttttgtcttttttttcggcaggcactgcctctgacaatgttttttatttatttagaaaaataaatttttttttcttgttgatttattttaattatatttcatccttaaattttttaataaacattttcaaactttcaccttattaatttaaggcgaagtttgccttttttaataaattctcttgtgaaaaggcaatggagataggctcttttaaatatgcctatttaaattactttaa

SEQ ID NO: 40786 - DNA, 749 bp, Heterodera glycines
gcttagtactcgaagccgaagccgaaggcgaagcccaatttttattcgaagccgaagtccgaagctcgaagcccaaaaaacccgaagttttcgaagccgaagccgaagttttttcaaaatttttttttaattccaaaaaattttttcatcacaaaatttcggttaaatatcaaatagaccaaccaacaacccctttcgataaataaatataatgatttttttaacaatgtattttctgaatttttataattcttagaatactcacagtttttgagtcaatttaaaaaataatgggaattttggaactccggcggtgccgataggcgccgacgggaaaaatttgaaattttagtgacagatttagttcaaaaatgaaaagattttgcgattttaattgttaaatttatattaaatttccgtcgaaaaaagaataattttgaaaaattagaagaaaagaaagtacttggatgggaactgatcaaaagaaacataatgaaaagagcaaagagcactaccactcgaccatgcgtgcgaacaaaaaaataaaaacaaaaaattaataaatatatattaattcaagtttatcaaaagcccatcactaagggtgcattttcacattgaaaactcaatctttaggggtgtatttttcccgaaacttcgggtaaaatagccgaagccgaagcacgaagttcgaagctcaaaaaacccgaagttttcgaagccgaagccgaagtttcgcccacccctga

SEQ ID NO: 40787 - DNA, 855 bp, Heterodera glycines
  unsure (1)..(855): unsure at all n locations
ctttccatacaaaaatgggtgggtttaaatagaaaaataaaagcttttgtttcgggatcactttaatccaaataaatatgccacttgagatggaaaaagcggcctcaaaagttgccgaatgtttgggaagcattgaactgcgcgagccacgcgtgaatgtgtgagttgtactccttctgttttagatttcaatgtgtaaaaaaatagattgctattcttttcttttcggttttcctttaattttttttcttgcctaatcgttgcccctcacggtgttttcttttttagctactcaaatttcaccggcaaatgccacacacgtcgtttgacacaaatgcgcacggacattgctcggcaggtgaacaaccccgtcaagtgggagcagatcatgcagattctgttcaacaaaacaaagtgagttccccccccccccccccggattaacaatgaattttgtgactcttttcaggacgaagaattcccttcgtattttgaggttggccccggccgcgaattgggcacaattttgcaccaaattggcaaaaaagcttcaagaacatatgtgaactatcccgcctaatttgttatttttctgttgttacattggctatttgagaaaataaaaatgaaaattaaatttgtgaattaaaaatttgatgatcttcgttttgtttgtggaaaagcattggggcgctggcgatgtttccgccggcgatatttctttggcctttgaatgagtgactgtccttcccatcgtcctccaattttcatcacttccttattagtcatcggacgtaaatgttggccaaactgtgctaatgaaaggaaaagctgtaaaaacaacatnttgcgggg

SEQ ID NO: 40788 - DNA, 1428 bp, Heterodera glycines
gctgttccctattgggactcaacaatggaccaacgattggacgacccggtaattaaatgagatgtatgaatcggaattccaccctggggacttgttctaaactctcgtttttcagcaagcattggaagaaaacggaagggataatttctttaatattttattgcattaaattttacaaaaatcaacctttatatataacttagaaatttcttgtaaaaactgaaatgaaattttaaaatttaataacatatggaattttgaaaaaattttgtactcttttagacagttcgcctttattctaacaatttcctgtaacattccaagtcattctgacaactaagaactgaatgagaaaatcatctttttaagcttcgcgaacgagaaaaccctaaaaatattatccctagaaaactcgaatccgactttaaaccacgcaggttttatcccgttcaataattccgtttaatctgtcccgctcccgtcttttcgtccgatttaatcccggcccgactaatattctttttataagcaggctgattcgataatgtggacaaatttgttccttggctcaagtgacgacgatggttacgtcgttgacggttttttagcaaattggattacagtaaacttttgtatttatttatttattgcaaatatcagattacaatttaatttttcttaataaggccgaaatgttgaatttaacattttaaattgtttatcagtcaaatggagacagagttcagcgtaatctcggcattgatggagaattgctggcagaggacgagtttgttaattcatgaaccaaaaaataaaaaatatttatgctaaataaaattaattatttgattaaaacactcccaaattctgccaattcaaggaaaaaactattaataaaattcaaaattataaagtattatttaacgagtaattaggccgaaggggaaattttgaaaatggaggattttaatttatcaataaagtgagattaggaaaatgtaatatgcccatttataatttaatatttatttagaatcattcacataatcactaatcgtcgctatgaaaatgtttttggctttccttctcgtgtaagcttttggaaatattatttttatgatttatttcttcaatttcctttctaagaaggcaaaaaacactgaatgcactttgccaatgacgaaggcacaagatttgttggagttcaaccacaacaatgttcacacttggattggaggagacatggtagggtccaattccttctaaagttaattcgggttttttaaaacttatttttgttactgtatttttgagttttctgaatttaggaaaaattgccaacttcgccgcaggacccaatcttctttatgcaccacgccttcgtcgatttggtacggataaaacaaaacattgacttggattatcatt

SEQ ID NO: 40789 - DNA, 112 bp, Heterodera glycines
gattttaccacaattagtaaaacctatagaaagattaggtattacgacaaaagcatgcaaaaaattggcaaatttgaagcaatttcaatcaaaaatcggtgggattgggttg

SEQ ID NO: 40790 - DNA, 772 bp, Heterodera glycines
aataataaagtttgtttctaaaataaatatatttcatgaaaatattttttaattttcatgaaaaatttttaaagatttttgtttggatttttcatgacttggactcggtttaaaaactagaactctgacccggctttctgtacccggcaataccctgacccggtatttgcccaaatacccaggcccgtacccctaatttaatatacgattttgaagttttttaaattaaaaaataaggctacagaaaaaattgaaaaactctcgcctctcgccaactctcgtgtttttggggactctcgccaaactctcgctctcgtctttttggggactctcgccaaactctcgctctcgtctttttggggactctcgcctctcgccaaactctcgctctcgtcttttctgagacaagtcacacgcctggtacgtaccccgtgtggtgcgcagcaggggtggcacggaattccgatttccgaaaatttttggggcctcggaatgccatccctggtgcgcagcctgtaaccctaccttttacttacactcaaatttttataggagggaaaaagaagaaatcaatcagtaaccgatggcacgacgacatttcgcctactaacccgaaattgaatatttaaaacatatcatttttgtacattatcaaagaacaaaatgttggatggattcttgacgaagccgactttgaatcggataaacgattgactaacgccttgcatctgttatctgttcggtttcgtgatcaagattttgtggagggaat

SEQ ID NO: 40791 - DNA, 954 bp, Heterodera glycines
  unsure (1)..(954): unsure at all n locations
ttcttggattttttntgtgataaatatgatacaaacctagagaaatagcggcataccatgataaaggataatatttttaggcaaaagcctatttttttcctgagcttccctggtttttgagcctatttcttcatagcatataggcagaaaaaatatcgtacttttatcattaaattaccgtattgctggcttttgagtttattattagttttaacatttctaacttcataacttggatataaattaaaagtcattaatttatgcttacaaattagcgggaaggaaaatagttttagcaactcttgttcgttttacttacagataatttattcgcaaatcgattaatttttgagacaaataaattcaaaattaaatataattttggatataatttcaaaaaattaaatcattttttgatttaattttattttacttatataattctctcaaaagaaacatgcatagtattatttatgcatatgacaacttttctgatatatattaaattaatatttgtcataaaagtttctgaattcggaccttattttcagttagctatagatcaaccatattaattttttttgctatttttgactgtgattttcaaataatttatgtatctatttttttaatttcatggtccctaccggctttttccataattggtatatagtggataatccgtagttattttttaaaatttcgttgaaataatttcaattttcaaccttttaattccaccaacaattttgattctcttcattgatgctgtaaaataagcgaaaatatattttttaagattgtttaatatattttattaaatttatgaaacatattcaatctgctttgaattttaattaccttttcgattgatgatttatattcaataaaaattgtttaaactaaaaaatatagaggaaatataaattgggttcaaaagaccttagcagtcat

SEQ ID NO: 40792 - DNA, 819 bp, Heterodera glycines
ctacaaatcaaaaactgatgagcaaaaatttgaaattgtttagaaattgtgctgaaataacaaatgaatttaagcaaaaaggttgaaaatattcaagaaaagaatggcaacaaaattatgccgaaatttgtgagaaaattggagttagccattcagcaattagaaaatggagaaaacaatttggaatgagtaaatctttaacggagaaagaaaaaatggagaaaatgaaaatttattggcaaataaaaggagaaatgccgaaaatgagtgacaaggaaattggaaaaatgatgaaaattactagtagaacaattgcatattggaagaagcaatttggagaaggaatagtggatgaataaaaaacggaagaatctaagaaaatggaaaaatttgccgtaaaattttttccgaattgtaaaacctgagtattcattatttgttttttattgcgtaattttttttttttttatcaattcgtgatttaaattttcaaatctgtcataaaataaatgtgtgtcatgaagcccaaaaaaatttcagcaacacaaaatcaataattttttatttaaaaaaatgtaaaaatataacaaattgtgtgtcaaaaatggcatttttcacgttcaaagcatatttattgaaactttaaaatttcagtttttacggcatttttttcaaaaataaaaacggatccctttggtccaaaaagattgtaaggacgaaactttttgaggaagtttttttttgttaataaattaaatataaatatacaaaaacaattcgttttaatgctcacttttcattcctcagctttcggagctc

SEQ ID NO: 40793 - DNA, 1640 bp, Heterodera glycines
  unsure (1)..(1640): unsure at all n locations
ttaaaatattaaaaactggtttaagatttttgaattatatccatggaaatgagaaattccaatatttcaacccctcccccactatcctaaaaattttggaaaattagaaatatcaaatttatcccttccctcatcctaaaaattcttcatattttttctgaaaaatattacagaaataaattgagaaagcggaaactttacggaaaattgaaaagaaattaaattaattaattaatatttaaaaatttatgtgcaaattagctttattttcggcaaatcttttaataaaccagaagaccaattaggatcggtcgggtctcttccataattattttaaattaaaaatttaggcaataaaacaaataaatatatttttaaataaattaatattatataaaaccataactaattaaagtaccaccaaatttacctgcatgacgtggtcattgatcatcatatttttctcaaatttgtcgatggtcggaatatggatgctgatctgaaacgggaggaaacataaatttttaaaattttttttgttcaaagatttttcgtaaaaataaatgatcaaaagaaaccaattaaaatttggacaaataattcagttggtggactttatttccaattatttttattaatgtaatgaaatttctcaaaacaataaaattttgattgaaatttttgaattaagagcgaaaatgccgaaaataagtgcccaaaaactcgaaaaacagtcacaggaaaataaagaaaagagtaaaaatttataatttcaggaaattaattaaagaattgctaaaaatatattagggatttgatccctaaaaagggtacaatttatttttgaaatatttatgtttcagagaaaaacaaatatttgtataattatcaaaaaaatgcactttttttggttctcctccggcgcagctgtgcatgatttccatgtgcacattctcgtatttgtatctaaatgaaaaaaaacaaacaaacatgtcatttaaaaataatattaattgcagaaataattgaaattgccccctaattaacttgcaaaacttaaaatattgcattaaattaaaaaaaaattaatgagttgagcagtaaattttattaataaattaaattattttttaaaaacaaatgaaataaaaatttaactaagttcgttaattgccatttatattattgtcaccaataatttttttttgccaattttgtaaaaatgtacagaattttataaatataaaggcttcgagaaaatttattggctattgaatatcttttgccaaaatattaaaaacacaaaatcgttttaaaccccacactaattatgctcaaataattttataagaaatattgaaggatttgaattttcaataaaacttactcaagtggctgcatgatcaggttgcttttgtttgcagctactcccattttgttgaccattggacagagactgaaaaatggagaccaaattttaagaataaaaattgacaaatatttgaaataaatgtgattcaattaangtaatattctttttggcattttcaattanatttcanatttaccgntccccatcacaaacatgggcccccaagctgcctttaccatcactcatttaaacgtcatttggctataaa

SEQ ID NO: 40794 - DNA, 937 bp, Heterodera glycines
agaagcatacagtaccacagaagcggacaacgccaccgaagcggtcaatgccaccgaagcggacaatttcaccgaagctgacacagtttccactgaagcacacgtaaccggaaaggtaaataaaaaacacaaaaaatccttaaatttcgcataggaaataaaaatcgaaatttctcattctcaaaaatcccctttgacttcttcagaaagcacaaagtgaggataaatcctgaaatatcagtatatctttctctgtactctaatcttttaacattttgaatattttgttaatgaatgagaaatttcttttattaaaaaatgcaatacaaacctaaaatgcaccaaaaaatgagctttatttaaattttaaaaattataaatctataaattatttattttttctgaattattattaattcaactttagatttttcatttgattaggggtgtacccgcattccgacagacaacggattttgtattcaatccaaacttgtgtataaaaatgttctcaaaaataataaataaatcttttttcgatcagagctgtcattaatttactgctaattataagttcaaaaacctccccagcggcgccgacccctagctcaaaaaagtggaaaaataatgctgggaaattttgatgtttaaaaaaaaatatttttaaattatttatatgattgcaaaattaagaatactaaacggatggataaattgcagaaagcacagcaggaatatctggacaaactgaacaaaacgcaaaattattttacagttcgtcattattattttaaatcaaaattagccatccaaaatttgttttaaaaattatttatttgtttaaggccgtcgtccatgaaaattttgcatttatggacagaaaccacttcaaaaaatggcgaaagggctcattaagaaacaaaaacagcagattaaa

SEQ ID NO: 40795 - DNA, 951 bp, Heterodera glycines
  unsure (1)..(951): unsure at all n locations
agaaaatcctaatgttttgtaacaataaatcataactttttggtgagatgattaatcgcttagcttctgctcaatgatagcttctaaacacgtagagcttttgaatgataccaattttgaagaaattaactgaccaacaaaaaagttatggccattcccatttgaaattgtacgaaacgccattgtacgaactgccttgacccctacaaagctgtctgtcctcttaccgtaaaggcgtgcgatttccgtccgactccattggtcgtcgtcctcttccgttccgtcggcttcgcttgtgcccgccattgtccccccgccctcttcagtcccattttgatttgtgccgttccgtcttcctcccttcccaatgtccatttcttctccttcgctcttccctcccattaatttcgcgtgccgtcgtcggcagtcgtaacggacgcggagcatctcgttgccgatgaattcccacttgggcccgtgctgtttgtacagctccaacagttgcacatcttcagcggagctccaatttctgctggaaatgaaaaagggacacattgctgtccatgtcccaagggtccattccatgcgaaattggcaaaacccttggtaagacctcatttcggcctgattgtccaggctagaaacgcggtagatatggtaacaccgtcggaacacttggcccgcggtacggtcgagcagccgagaacctggggacatttgcaaattatcatggccaaaattcagtcggcttacacatccatggcctgaaaagcgtcgagcgaatgaatcggatccgttctctgtgcgcctctcgcgtttcagtcgccgtcgccgcgctcaccattctgtccataaataaatggatgaaaagcaaatcggatgaaagacaccgtggcgcctcgtcctcctccactgatgngcttccgcgaaggacagccaattctcccctca

SEQ ID NO: 40796 - DNA, 1056 bp, Heterodera glycines
tttttgggcaagaattttttcgttagcatttcacatatcgtgtgagtgtgtggtagagacagactagagaaggcaaatgttggtaccaagtttgcggtcaaatccccaggagagaaaagagatagccattttttcggcaagaatttttttcgttagcatttcaaatatcgtgtgagtgtttggtagagccagactagagaaggaaaatgttggtaccaagtttgcggtcaaatccccaggagaaaaaagagatagccattttttcggcaagaatttttttcgttagcatttcaaatatcgtgtgagtgtttggtagagccagactagagaaggcaaatgttggtaccaagtttgcggtcaaatccccaggagaaaaaagagatagccattttttcggcaagaatttttttcgttagcatttcaaatatcgtgtgagtgtttggtagagccagactagagaaggaaaatgttggtaccaagtttgcggtcaaatccccaagagaaaaaagagatagccattttttcggcaagaatttttttcgttagcatttcaaatatcgtgtgagtgtttggtagagccagactagagaaggcaaatgttggtaccaagtttgcggtcaaatccccaagagaaaaaagagatagccattttttgggcaagaatttttttcgttagcatttcaaatatcgtgtgagtgtttggtagagccagactagagaaggcaaatgttggtaccaagtttgcggtcaaatccccaggagaaaaaagagatagccattttttcggcaagaatttttttcgttagcatttcaaatatcgtgtgagtgtttggtagagccagactagagaaggcaaatgttggtaccaagtttgcggtcaaatccccaggagaaaaaagagatagccattttatctgcaagaatttttttcgttagcatttcatatatcgtgtgagtgtttggtagagccagactagagaaggagtatgttggtaccaagtttgcggtcaatccccaggagaaaaagagataccattttctcggcaagattttttt

SEQ ID NO: 40797 - DNA, 867 bp, Heterodera glycines
  unsure (1)..(867): unsure at all n locations
attatgaactcataatttttcttttatcgtagtattattatgcgtaagaagcacaaggagaatttatcaacataatttattcaaatattaattctattattgagaattattttttctaattatacatatttaaatatgcatcaaagttaaaaattatattgtgagttttttaattattcacctctaagcttttaatgaatatggctcgctattaatgctttttcgcttaataatttaaataaaatttaaacttcttaatattttttatttgagagataataattatttatttcatctcatgtttcgttttttagttaacaatgcttttatcgaccttaaatatattaagatttatgaatatcttgaaataataattaaaataacaattaattgtgcgatttttaataactatatattttaattttattccttgaagaattgcttccgagcataattttgttaaatggcctaatgaaattatgttttatcataaaaattgaaaaaataaatttattatcacagatatatttcttgttaaaataatttaatttttgagaaatttcatttaaaataaaaaataatgtaagcaaaacaaaacattcattccttaatttttataattgttttttcttattcaactgcatattttaatccaatatttattatataatggttattgaaaaaaaaaattaagttttcattatgatattgtatattgtttttttattaacagatttaatattccacattaaaaattttgcaagatattctcttttcgacaagaaaaatcataaaattttaaactttttgatataatttttcatataaattcgattgtncaattgactttttgtatattctttattt

SEQ ID NO: 40798 - DNA, 1054 bp, Heterodera glycines
tgctttggttgttgttcagcagtgtcggagttggaattcgcctaattatttttgttgaaatatgtactttttacggaaccggcccgggacggaactgcgggacggatgatccgttttgctgatcagaatcacgaacccgatatccatttcgacccatttctaaccccggacctgaattcgaataaaaagtcgaattcatttttcaccaaaattcacatttattaccccaaaatcgattgaaatgcatgaaagattttcaacttttatcgaattcggagtttagaaatgggtcgaaatgaatgtcggattcgtaatcagcgacccctaaaacctataggtatggtatattttttgtttggaaaaatgttaaaaaaagatgtggtgcataaacggaagaagagccgagaaagtaacaaatagaaaagaagaagaaatgaccagtggaggatgggaacacgcctttaaatagacaatgtgagggagataaacggaggagaaaatgggcacatgtaaatacggtccatgtcagtttggccctcacgtttgggccccaaataaaaatttttcaaattgccaaaaaaattctttataaaaactaacaaattttccacaaatacctaataagccccaaaaaggccaaaataggtgttaaaaattgaaaaaatccagtgtttttatgtacaaaagtgactaattttttatcaatttcgcccgcacaattgcaactggtcaagaaaataaataaataaattttggagacgaatttttgagaaaatttttcatttcttaggtgaatattttctgaaatttttgggtcgattcttaggggtgtattttgtatttttcgtttttattgcatttttactatgaaatttctgggaaaatcccaaaataggcggaccgggtcagtttagtacggggcgttttagtacgagcgcacatttttccactataacttttttatttgttatccaaatccaactttcttgatatcattcgagagcccttcagatgctctattagcctgcaaaattccaaaaaatttagtcaattt

SEQ ID NO: 40799 - DNA, 971 bp, Heterodera glycines
atatcacaaaagtgatcatgaaaattgtaaattgggagattattggggacttatcagctcggtcctccgcaaacactgattcagtttatatttagaggataaggagttgaaatggtggaattccaaaaaggtgaccaagaaaattgtaatcgaagattattggcgattatcagctcggtcattccgcaaacactgattcagtttatatttcgcgaagaatgagctgtaattttgcgaattagacaaaaatgatcataaagtaacaaatgagagaatttcacattctgctaattaggctttaaatataaactgtttaagtgttgcagacggatcaggttgataagcgccaataacctcagatttactattttcgcgaccccactttttgaattctgacattttcagctcattacgctctaaatataaacagcatcagtgttccggaaggatcgatttgaaatcgccaataacccccaaattacaatttcctactgtaaacttatacagattacatttggatataagaaattgaaatattgagaatatcacaaaagtgatcatgaaaattgtaaattggagattattgggacttatcagctcggtcctccgcaaacactgattcagtttatatttagaggataaggagttgaaatggtggaattccaaaaaggtgaccaagaaaattgtaatcgaagattattgacgattatcagctcggtcattccgcaaacactgattcagtttatatttcgcgaagaatgagctgtaattttgcgaattagacaaaaatgatcataaagtaacaaatgagagaatttcacattctgctaattaggctttaaatataaactgtttaagtgttgcagacggatcaggttgataagcgccaataacctcagatttactattttcgcgacccactttttgattctgacattttcagctcattacgctctaaatataacagcatc

SEQ ID NO: 40800 - DNA, 1203 bp, Heterodera glycines
  unsure (1)..(1203): unsure at all n locations
ttttgcatttaacagacccattttaaaatttctaattagtatagtagtccaaaccttttattatttttttttgactagtcttctggatggggttatccccagtttttagtatccttttttgaaaaacaaaaaattttaataactgattcggttagccaacataccattgccccaatgttcccttcggtttgccaacgggagctaacaatggatgagtttgtttggtttcttttttaagcaattttccgtcattgctcaccaactgttaggcgtacagcaacggcggcacttgcatccgatgcagctgttcacgggctctctaaccctatttttattttttttctatctcttctctgaaaggagttataacaatttttcacaacagttttgcatttaacagacacattctaaaatttctaattagtatagtagtccaagcctattattattttttttgactagtctctgaatggggttatcccagttttagtatcctttttgaaaaacaaaaattttaataactgatacggtagcccaacatccattgccccaatgtacccttcggtttgccaacgggagctaacaattgatgagtttgtttggtttcttttttaagcaattttccgtcattgctcaccaactgttaggcgtacagcaacggcggcacttgcatccgatgcagctgttcacgggctctctaaccctatttttattttttttctatctcttctctgaaaggagttataacaatttttcacaacagttttgcatttaacagacacattctaaaatttctaattagtatagtagtccaagcctattattattttttttgactagtctctgaatggggttatcccagttttagtatcctttttgaaaaacaaaaattttaataactgatacggtagcccaacatccattgccccaatgtacccttcggtttgtcaacgggagctaacaattgatgagtttgtttggtttcttttttaagcaattttccgtcattgctcaccaactgttaggcgtacagcaacggcggcacttgcatccgatgcagctgttcacgggctctctaaccctatntttattttttttctatctcttctctngaaggagttataacaatttttcacaacagttttgcatttaacagacacattctnaaatttctaattagtatagtagtccaagctattatta

SEQ ID NO: 40801 - DNA, 749 bp, Heterodera glycines
  unsure (1)..(749): unsure at all n locations
caatgtcaaaagtcaattggtgaagtncaatgagcgatttcttttggaaatcttcaaaaattggaaactgttgcttttccgattgacaattacacggatgggcgcagtgacgggaattttttagaggatatgacgcaacgcgtaaatgaacttaaactagaggaaggacaagcaacggttgggcatggaagaggcgaatgggcaaagcaattggtggaggagaggaagacaaaagcggaacaaatgcaacaacggaatggtgagaaagaggaaagagtcgggacaggggatacatgcaatctgctgattgggggtcacaatacgctcgaggtacggcccaacccaaacaatatgctaggcgagatagcattggttacaatatgattatgattcaaatatgcaatagtaggggggggggagagatcgacccgcttccatcgaacgaagtccaagggggggggggtaatggttgctttcaataaaaatttgacaaaattcagagtacggaaacagcgaaggtagtgggctcaattgcacatcggcgaatgccatgcgaattcccttgtcatcggttttcgagggtatttcaacggaaggtcaaaaaattgacaacgaagaaaaggaacgaacaaatgaagaggaaacaaagaaacggaaaaaaggacaagaaattgttgaggaaagaaaaggcgaaaaacagcaacataatgtggaaaaggaaagtaacactttctgggacaacgtcaaaa

SEQ ID NO: 40802 - DNA, 808 bp, Heterodera glycines
cttttgtgcttcttctgtgccagaaaataaatgttctctcccagttatttatttttcggtttcggtgggctttagccttctaagcccccgccccccttcgctacgcccttgcggagatccgaatttgaacagcattttggagaaatacgaggggataactttttggagcgcagtgggacatttgcggacggacatttgcggacggacacttgcggacggacacttgcggacggacatttgcggacggacatttgcggacggacacatgcggacggacatttgcggacggacatttgcggacggacacttgcggacggacacttgcggacggacatttgcggacaatttcgtgaaaaataaaaaaaatatcgtaacaaaatttaaaaaattttctgaaaatatggaatggagactgcaaaaataaataaaactttgtttttgggttttaaggcctaatatttaatttcactggtcaaaaagtgcaatgctggtcttttaagtgattaaagtagagttggtcccaagatcggggaagtgtgaatgtcgcctgttgcactcaaattcgggtgagagtgctgtttttatctttagaaaaaacccaaatatttttgaaaatttaatcgaaaacaaaatttgcttgcaatttcaaaatgaacaggctatttaaaaaaaatgctgaacaccagctggctgcaaaaaaatccgattcccgacatttttgggcattagatttccgatttccttttctaaaaatttttggggccctgaaatgctttcctgcttatgaacagtagagcaagaattatct

SEQ ID NO: 40803 - DNA, 828 bp, Heterodera glycines
ttccatgagttttttgttcctgactctaaaaatgactgtcttgtgagtgagaaaaacccggtctcaattaaatcctggttgacggggattcgaatttttattattggacttcgaacgaagaaaaaaaaaatcaaattaccgtatttcctaaaaatagaggccctcggaggctttattttccaacccccctcagcagaagggggaggctctaatttagggggggggggggagggtttattttaaaaaaatacgataatatcgaaatttctaactcttttcctgaaaaattcggaattccgtgggcacaaaatttttttggaaatcgggatttttctccttatacatatatctagagtgccacgggaccgggacctggtagcggacaactgagtaccaaggtcccggttttgaccgggaccgggactagtcccggttttttcccggttttcccagccaaaaattcccggtttttcaacccgaaaaggtcccgttcccgggtttgcccaaaattcccggtcccgtggcactctacataatagatttttgtatctaattgccttcattttttttttgcacatttgctgcgagctcaaactgctcggccaactgccgttcaatttggacgtggactcggagctggtcagtgccgacgagttgttggccaggaatgaaggcggcggcgcaacaacagcagcacaaatgttggccaccaaactgtgtgttgaggaaatgccgtcgtcgcaaatgacggcaaagagtgccgccgacgacgacggcacggaaataatcggcggcggcagcgctgggatgacaacgacagcaacaacg

SEQ ID NO: 40804 - DNA, 1181 bp, Heterodera glycines
gagccaattcagcggaaaccgaagctggaggtgcgcccttggctggcgcagttgtctttgcatgcgactttagctgagctggaggagccgaaattgtcggcttaacagatgggctctttacctcagttgttgtctttacagttggcggaggggctgttgttgcctttacagttggcggaggagctgttgttgcctttacagttggcggaggggctgttgttgtctttacagttggcggaggggcggttgttgacttaacaggggtggcggtagtaggctttgctgttggttttggcgattggggtgcctgttttgttactgtagactgcgttgctggttttgcagttgcggaaggtgctgcagctggagcagcgggcgttttgactgttgttgttggcttaacggggcttgtgacaggcggtggtggtgccgccgaaatttttgtttcttcaaaaggaggcggtgactcctcaagtcgttcgtcttcatttatattatacaaaggaggagagtcctggaggcgttttccactcgcgtcaaacactggcggtgatgacacatctcttttctctcttttcagtggtggtggagaatcaagaagctttgttcggttcctgttcgcttccacctcacggggtgttggcaacagttttgctccgctgcgatttcgcaatgttaccgccaaaaagtctctgagctgttcaaccctgctatgcgatgccttaggtaccggtactcggatcacccgctgtctgtcctcatcggtcgctctgcggtcggtgaagtgaatgtcaatccactgcgcatccaatgtgccaatggttgaccatgagtaggggtaactgatactgtgcagtccgcacacccacgagccgttaaaatgcaaaggctttgggagccggacacgaaatttgttgggctgattgtccggataatccgacacattgctgggcaaaaacacaaagaaactgttcgacatgattgtttatttttgaacaaaatgaaaaatgcatatgctttttatacaagctgagactcagcaatccactcacgattgagatatcctataaatttgacaagcatctcggtggtcccgtccgatcgctatctcttcgtgtaaaccttctcgatgcggtagcttgtctctgcattctttcttacgcgcgccaactcctgctcat

SEQ ID NO: 40805 - DNA, 1388 bp, Heterodera glycines
  unsure (1)..(1388): unsure at all n locations
gagaaattttatacntcacaaaagcgcttgcgtatgagacggagggctgtgcacaatcgccattntattcacagaggattttatatttagaggttatccagaaaagatgctatctctttttttgataaattttatacacatacaaatgctctcgagcatgatagggagggcggtgcgcaatagaccttttatttttgagggaatttttaaatttatactctatcccagaaaaatggctatctctttttttgataaattttatacacatacaaatgctctcgagcatgatagggagggcggtgcgcaatagaccttttatttttgagggaatttttaaatttatactctatcccagaaaaatggctatctctttttttgataaattttatacacatacaaatgctctcgagcatgatagggagggcggtgcgcaatagaccttttatttttgagggaatttttaaatttatactctatcccagaaaaatggctatctctttttttgagaaattttatacctcacaaaagcgcttgcgtatgagacggagggctgtgcacaatcgccattttatttcacagaggatttttatatttagaggttatcccagaaaaatggctatctctttttttgataaattttatacacatacaaatgctctcgagcatgatagggagggcggtgcgcaatagaccttttatttttgagggaatttttaaatttatactctatcccagaaaaatggctatctctttttttgagaaattttatacctcacaaaagcgcttgcgtatgagacggagggctgtgcacaatcgccattttatttcacagaggatttttatatttagaggttatcccagaaaaatggctatctctttttttgataaattttatacacatacaaatgctctcgagcatgatagggagggcggtgcgcaatagaccttttatttttgagggaatttttaaatttatactctatcccagaaaaatggctatctctttttttgataaattttatacacatacaaatgctctcgagcatgatagggagggcggtgcgcaatttaccttttatttttgagggaatttttaaatttatactctatcccagaaaaatggctatctctttttttgagaaattttatacctcacaaaagcgcttgcgtatgagacggagggctgtgcacaatcgccattttatttcacagaggatttttatatttagaggttatcccagaaaaatggctatctctttttttgataaatttatacacatancaatgctctcgagcatgataggganggcggtgcgcaatagaacctttatttttgagggaatttttaaattatactctatcccagaaaatggctatctctttttttg

SEQ ID NO: 40806 - DNA, 1516 bp, Heterodera glycines
  unsure (1)..(1516): unsure at all n locations
aaagtttattttatttttaaataaagaatattattgcgcgatttgcattaaatatattggttacaagaaagagggcaatttaatttttcanatactttcaagcaattcgtcgtccatcaaaaaaatgccgaaaagcgcaatttttatttatttatttttaattgcttttttatgataaaagataaggcggaagaaagggaacgacagaatatttggctggagaagcgacatcaaaaagaaaaaacggcgctaattgttttatgttttatgtgaattgcccacaaatagtcaacgataaaattgtgtaaacattggaacgcaattttatgtaaaagaagagaaaaagtcgtaaaaataaaaatagaataaaaataaaaatgcaaaaaagcgatttattaaataaaacatttaaattacaaaatttaatcggataattaattaaaaaagaagtgatttattaaaacaaaatttgttaaaaattacaaaattactcgttaattaattaattatgccttaattaatattcagaaatgcttttagacagacaaaaatcccaaaaaattgaatgtggtggtgacggttttccgcttaaagctgctcttgctgattcctcactcattgatcggattttgaacattcgaaaaaaaatgtttggagaaatttaattattttttgcaattttcacaattttggcaacttggacattgttcaccactttttatcgttttgtcagattaattaagaaaatacaaatattgggttatacaaattaattaattattcaaaaatcatgctcacttacgtatctaagctctaattttggataaattgtcggtacaggttccgatctcttctaattggatggacaatttaacaactgcaaatttttgtgatgatttgtccgaatgttttttgatttttaatttgtacaatgaatgtgacaaattgtcaaaataagtgatgaattgtccaaataggtgatggattgtcgaaattagtgcgataaattgtccgaatatttttgagataatcttcttctttttttcaaaatccgttcttatgctccttaaaattgcaccattttttactttaactatgctgctaatcattgcttctcatcttcggtttcttctccttctgtttcttcagcaattcattcggtttgtgccaaattggcgattctctctcaccgaaggccggcgaccgccgagttgggcataaatgctaattgaattttttattaaaatttataatttataaattgaatttggttttagcttatgtcattaattaattaaaaaaataaatcttctattaaatatagtttaaaattgattcagattaaaaaaacaacaaataaatttggaatgactaataatttagatgggcaattataaaaaaataatgtctgnaaaacatctaataataatccccatannatattcaaattatatttttttaacttaatgaacatanataaaaattttatattatttttaataaaattttatataat

SEQ ID NO: 40807 - DNA, 719 bp, Heterodera glycines
gcagtgaaaccgttctgagatatgtttaatagggtatacggtaatgccggaattattgaacttatatactgtaaccggaaaattgggtacaaaaaaataaatttgaaaaatagtatttcaaaaccaaaaagcattaatttcacgaaaaatccaacggaatacagtaatcccaaagctattataccgtagtttttgccccgccccgccccccatccaattgctctcactttatccgcaatatgcgtgttcgacccaaggtcggctaaagtgtcataaatggcattttgttggggtgccgcgtaatgtgccgccgtacggcccaacttaaaaaaaatttggcaatttgaaagtcaatgttggcataatgtcttcttctttttttacatggtcagcaatgttgatgaagtcagcaaacgtttggccaatatattcgaccatttggtgccgttcctgaagcaattaggtaattaattaattgtgacaaggctcgacattttgtattctggtcctggtatttctctggatctccctctattacaactccggtcgcgcaaaaaattctgggatggtcctgggcggtgagcaccgctatcctgttttcgctaagtgttgcgcagcgcccggcggcgcacagctagcggctgggcgccgcttggcgaaatgcgtgccatgccgtggggagcattttaaaaaaaaatttggcccgatccgacaacttg

SEQ ID NO: 40808 - DNA, 867 bp, Heterodera glycines
atttttattcttcacccttattcataatataaacctacctaggaccttgttaacatgtaaaaaaaaattggtgcgtttcagaacactttctgaaaaaattaatatgaattaattttgcaaaaataaaaatagaagactcagcattttgaaatttttataacaactgatgacaagctaatgtgataaaacaggttaattcttttcctttcagtatccctgcaaagtttggggcgcttctgataagtttctgaaaaaaaagttaagcctaaactttttggcctgtttaaaaaggaattaaaaatttttaaaatatttattcatctccttttttgataatataagagtcagagtgccttattcaacttgtaaataaattttggatcgcgttcagagcagtttctgaaaaaaaatttatgaattaattttgcaaaaatcaataaaaatgaaccctcctccttaataattttcctgcgcccatggtactcactcggccgcttcgcggcctcgaggggggccttcgcccccctcatttcctggacccaatagcctcaatttagggctgtctttctctctcaaaaattccatatggggtagacacttaacagaatatgcctaggtcgagtagccagtgaggagtgcctgccacaaagaatggcagacttctaccaaagggccaaagggatatccgaagactcacacgtaaggtcgtattgagactaggtttacacgggcccgggtatttgggcaaaaaccgggcccgggtattaccgggtattgaaaagccgggaaccgggtcgggtacaattttaaaccgggcccgtgccgggtacccggtaaaaccgggcattgaaaatttctatttttatt

SEQ ID NO: 40809 - DNA, 1114 bp, Heterodera glycines
ccccccccccccccccccctcactccgtcatcaaaatgagcaaaaagctttgattgcctctcccccccccccccccccttcctcaaaaaatgaaagatgggaaaatggggaggaggcaaagtgcgaatttaaaaccgaaaaagtcttagatttataacacgaatttgcaaacaaaataaactgtgattttccaccaaatttatatatttcttccaaatgtattgaatttaatttggcgtttctttgttcactttttaattaccatttccatttatttaacttttccatttaaattttaattttgctttttaatttcatccattattattttttttaatttttacttttttctgctttaaggttttcccttctcactgaccatttatttcaccacaataagaaacagtgaatttcttacgccaattttttctatgcccctcaaaattcgccggcaaaaacgacaccaaaattcgaactgagcgacgaaagaaagagcagcgaaaaagggagtgacacaacaaaaacaaaacaaccaattggagaggagcaaaaagtttgtggccaaaacggaaatgtccagcaaagaaaatgggcccaagaatggttcggctgagcaacaacagccggggccatcgacggcggacgagcagcagacgaagggcacaacggtgacggcgagggtttgattttggcatttaaaataggaaaaaatggaaatttgagaggggtggaaaattgaaaaactatgacaaatttagttgtaaattttgcacttccaaatccaaaagaatttgccgtaaaaatgtgtaattgtgagtgtgtttctgctgacaaactttgcctttttcttcgatctgtcactttttttgagtcacttaaaatttcctttcccaaaaatattttcccgtttttccccaattccgtcaacattttattgacatttattccattcactctttgctcttttgtcgtcgtttaattgggacgggtgttgtgtttttctgttttttttgggtgtgagaattataaataatggcatgggaaaatgcttttgcattggtgggaaaatccctccctcgccgtccttttgctgatggacgacgacaccccccgg

SEQ ID NO: 40810 - DNA, 732 bp, Heterodera glycines
tgaggccgcgaagcggccgaattaaaccttaaatataaaaaatgcgcggagcgcccgtcctgaggccgcgaagcggccgaatatcccccatgaaatttaaaaacgggcgcgaagcgcccgtcctgaggccgcgaagcggccgaatgtcccccacaaaattaaaaaacgggcgcgaagcgcccgtcctgaggccgcgaagcggccgaacgtctcccaaaaaattaaaaaacgggcgcgaagcgcccgtcctgaggccgcgaagcggccggatccctcccacaaaattaaaaaacgggcgcgaagcgcccgtcctgaggccgcgaagcggccgaattaaaccttagaatacaaaagggcgcggagcgcctttgaggccgcgaagcggccgaattaaaccttaaatataaaaaatgcgcggagcgccctttgaaggccgcaaacgggccaatagcccccctcaaaattaaaaacgagcgcgaagcgcccgtcctgatgccgcgaagcggccgaatatccaccacgaaatttaaaaacgggcgcgaagcgcccgtcctgaggccgcgaagcggccgaatgtcccccacaaaatttaaaaaacgggcgcgaagcgcccgtcctgaggccgcgaagcggccgaattaaaccttaaatattaaaagggcgcggagcaccctttgaggtcgcgacgcgaacgggagtcctccacacaattatgaaatgcctcctcgcgat

SEQ ID NO: 40811 - DNA, 825 bp, Heterodera glycines
  unsure (1)..(825): unsure at all n locations
ttttncatcaaatttttgtttcaaattaaaattctattctttttaggaaaattattatttttaaaaataattttcgaaaaatttaataatttatcataaaagtttatagacgtttttttgaaatttgcaaaatagagatttttttgaaaaatgctaattgtatgtatgaaaaaaaaatttttttttgggccgagtagggagggaaagagattttcccgtttcaattcattgtcaatcaatcaatcacttctttgccgttaatgtcgtccaattcgaagcgggacgcttcaaatttgggcttggcccatgccaactccgactgatcggacggtttatctagcccggcctcgttcacagcgaccacccgataatagtagcagtgcccaggctttacgcgttcgtcagtgtacgcgcagtcgtataccggatgtgtgttcacctagaaaacacccaaatttgaaaaaaatggaaaaataaaaatggtattaaaagtaaacatttagttaataataaatttaaagaaaatttctttttttataaaaagaaaataatttccttgcaaatagagtgaagctagaccgggaattttgggcaaaaccgggactgggacttaccgggacctgagaagccggggccggacctcgatttttgttcgggacagggaaccgggaccaaccgggaaatttaaaaaattcaaaaaaattcaaaaaaaataaaaaataaaattttttaattcatttcaattgaaaataacacaaaattaaatttttattttgtttttatttaataaatccaaaagttaaaagctaaattaaattaataaaa

SEQ ID NO: 40812 - DNA, 1312 bp, Heterodera glycines
  unsure (1)..(1312): unsure at all n locations
agcagtgacagactaaaaatcttataaaaataatttacaattattacttaattnttattggtgtannncaataggtgtcagcaggaaatatgaggctggcagttntattacaatntaaatggtataaaggaagtgctattattagagagggccaattagatagaactcatcaaatcatgcaccattgttttattcgtgatgcgacatttgcgccgcagacacttgcgccgcgacatttgcgccgcccagccaaatcgacacttgcgccgcagacacttgcgccgcgacatttgcgccgcccagccaaatcgacacttgcgccgcagacacttgcgccgcgttttttgcgccgcagacacttgcgccgcccagccaaatcgacacttgcgccgcagacacttgcgccgcgttttttgcgccgcagacacttgcgccgcccagcaaaatcgacatttgcgccgcttttaaaaaattttaatttcaacaagatatttaatcaaattaaattgattaaattagtttcattcttcaaatcacttcattcctaggcagtattgaagggcatgaatgtgtctgatcaaatcatcattgtttttgttctccttggcatcataggcaatgataagccaccttattgcctgatcattttcgacatattttttgacgagggcgatctgcaaggccacgagtcacatcaatttcaaatgatcgcagtcagtctgttttgctgatattcttcttcatttttaatctataggtgtccgaattacggttttgcataagaatgtaggctgctggtatagaaacatgcccgattaaggcatttactgtatacaattgcaaaaaatttggcggacacactaaatacacttttttcagagtaaaaatcatacttttgcaaccttgaaatgttccatctcccgaccaatttttgtattttttaagtcttgccaatccattgtctgtggcaaatataaaaaaggtggccaattcagggtccgttgtacgagaatcaaataacaagaatctgttgccagctttgtccaatataaattctccctttaattttttaaagtttgtgatgtatgcactggtcaaagaaaggaaattagatgtttatctctgtgattaatgcttttctttagttaggcgtttttttgaaattttagtcaataaaattgttgaaattaaaatttattaaagcaaaatgtcgattttgctgggcggcgcaagtgtctgcggcgcaaaaatcgcggcgcaaaaaacgctaaagaagtgtctgcggcgcaagtgtcgatttggctgggcggcg

SEQ ID NO: 40813 - DNA, 1100 bp, Heterodera glycines
tctttaattcttcaaaataaaccaataaacactaaaggtgggtcttaagttttagaaaaatactataaaatttttcaacagttgttttttattgaaatttttgtgtggccatttgtgaagggtggtttaatttcataaataaagtttgaaattaagcttcacacgaggatctggaagtttcaaattttcttatccctcagcgggggattggtactttaattttgcggtacagactctcgtgggaccaatcacgcgaaatcccgcaatttccaataataggggatttagtttgaatcccgcaatttccaaaaataggggattatagactggaatcccgcaaaatccccacgcaggatcccgttctgcgccgggctctacttcacactatcatacctggttgttgttgatggaacagataatcgcaatgatattactctaaaacaaaatttcaaaaattaattttctttttttacctaccgtattcatttccctaattgctgcagacagcttttccgcttcaatggtggcatcaaaatttttcttggccacaattgtaggcaaattttcggccaaacattggccaatcacgacgaacaaaaggcccagcagaagcagcatggtgttgttataattcagcttttcttgtgtcatttttcatcagcaaaaaaaagaaaattgataaatatagtgaattttcgcaaaacggaaatgcttaaattgccaaaatttttatgtgtgaatgtctcattaataacgccataatacggctgaacatcatctaataatcaatacccataaaaaaatactttgaacacgtaaaagaaatgccatatatttacgccaacacattttttggcatcgtaaatgccacccacgcttccggaaattgcgtcaattaaaaattacttcgaatgaaagtgtcagcaattatgggagagaatgattttcagctgattatcatcaacacccactcttttcaaattgttaattttttaaaataatattttcaatatttatttattcatggaaaacccctcaaaaaagtggttacgtttaaaacacacaatttgtctgatcattttaaaatattgatcagattt

SEQ ID NO: 40814 - DNA, 799 bp, Heterodera glycines
  unsure (1)..(799): unsure at all n locations
tctcgctctctctctctctctcctctctctctctctctcgctctctctcgctctctctctctctctctctctcctctctctctctctctctctccatttccatctcctctccaatccccaattagttccgttacttttgtttttttttctcccacccttttccatgtgttccacttgaacttttcccccgcttttatcaaatttattaccccataattaccatcattagttcaccattcaataatttgttttaatgcactttaatgcttagacctactgctgctggtggagttcattttctcaaaaaaaaagaatttatatttcaaatttattttgtgtaattatttattccgtttaataaattcccataaaattccgatcgaaaatcaatcgatcaattaatagaatcatgatcaattctttgatccctatccgagtataatcttgaaaaaagaatcaacggactcgggatttattctaatcacccaattcccctccaattctcggcttttaaaaattcctttttttgttttttggcattttctcgccaatgtttcggattaataatactatctcttagaaatataggaataatagcccatattgagaaatttttcgaataactttattatttttcttatttttttcaaaaaattttaaataaaagagataaatttttttttcaaaaaaaaacagaagattttaaagaaaaattacaaattttacataaaagaagtcaaattcttttttattctcgttttgtaaatacataaatttttttttctnatatgttcgacct

SEQ ID NO: 40815 - DNA, 1289 bp, Heterodera glycines
  unsure (1)..(1289): unsure at all n locations
gtctgggaatggcaccaacattttttgccgatttcccactttgttttttgcacattgtttcgacttgaacgataaatgtaatccgccatttttgacagggataaatttttcattagaattaaatgcacataatgaaatgacaattaacaaaaatgggagataatctccacgtaaaggctcagaattgacgtgaatatatcaaaaaagaaatgctgtggcatatttttgttgggtgggggcaaaaggcaaatgaaaaataaatttggggagggacaaatgaaattttggaatggacatttacaatggaggcattacttaattgaatttccaattttataaagaataattaaattcattttgaaatcaattaaatatttacccacgcctaattagcactaattgagtgtccgtttctctgcttcagaatctcgacattcccatcgcaattctgcagtccgaagcgcttaagccgcgcgcctcttcactgttcttttggtttgctttgctcgcctttgcgatggtttcgattgcgtcggccgccgctggcacagtgttcgcaagcggtcgcattcgcagccgacaacggcgatacgcaaaaacgtggaagccggaattcccagcacaagagtcgaaaagtgatccataattttgaattacaaaatttaatttcttatatattttaaaatggaattttcccatttttagtcgccaaaaattcgctggcaactttgtgcggtggggtcggccctggccactatcagccgccgctgattgacggcaacacacaacagcatctgttcaacgcgtacacgcaacacaaccaccaccagcaaaatgcctaccaattccatcagccgcagcagcacagcaaatatttgatgttcaatgccggcagcatcagcacggacagttgcgcgtcgtctaccgccgcgtcggccattccgctgattcgcctcgcggnccgtctgntctgtttgncgngccntgtgcccgccntctttgccttcggccgcgtcntctgccngcgncngcgggggcctgggtgcggcngtgggtttttttggnttcgttgcctttgtttttggtnttgtttgttttnnttnnttntttnnnctctcccttntttgngggctttcctcttgggnttnnntnnngnntttttgtttttnntnnttttctgtctntttcntcngctnnctgtccggtagaaacagccttttgggcccgcccnntntcnttctttcgtctttaagagcaaacagcagacaattcactcaaattcgtaataa

SEQ ID NO: 40816 - DNA, 955 bp, Heterodera glycines
gattagcatcggggttacgagatagaaaattgtcttaaaaagagatagccatttttctgagaataattcacattttccgcagctctggcggtaatggaaaaaattttgaagaggctctgcggaacggattagcatcggggttacgagatagaaaattgtcctaaaaagagatagccatttttctgagaattaattcacaatttccgcagctcttgcggtaatggaaaaaattttgaagaggctctgcggaacggattagcatcggggttacgagatagaaaattgtcctaaaaagagatagccatttttctgagaattaattcacaatttccgcaactcttgcggtaatggaaaaaattttgaagaggctctgcggaacggattagcatcggggttacgagatagaaaattgtcctaaaaagagatagccatttttctgagaattaattcacaatttccgcagctcttgcggtaatggaaaaaattttgaagaggctctgcggaacggattagcatcggggttacgagatagaaaattgtcctaaaaagagatagccatttttctgagaattaattcacaatttccgcaaatcttgcggtaatggaaaaaattttgaagaggctctgcggaacggattagcatcggggttacgagatagaaaattgtcctaaaaagagatagccatttttctgagaattaattcacaatttccgcaactcttgcggtaatggaaaaaattttgaagaggctctgcggaacggattagcatcggggttacgagatagaaaattgtcctaaaaagagatagccatttttctgagaattaattcacaatttccgcaactcttgcggtaatggaaaaaattttgaagaggctctgcggaacggattagcatcggggttacgagatagaaaattgtcctaaaaagagatagcccatttttctgagaatta

SEQ ID NO: 40817 - DNA, 1192 bp, Heterodera glycines
  unsure (1)..(1192): unsure at all n locations
ttacctttttttaatcttaattatcttaagaaaaatcaaaaatatgtaaggctatacaatatagggattaaaaaacaaatatgaagacaaggccttggattaggagcgaagcaaaaagttgagtgaatgcaaatcatgacaagatcctgttctaccgggctctaatagaaatctattttttaaaataatttttaagataaataaaaattataaaaattcgcgaaataaatttttttcctaaaaatgtaaaaagaaaataaatgttatttatcgtgaaaaaaagaataaatgaaaagaaattttatctcctcaatgttttttaatcctcatttaattcttcttcaaattgtttcctccatttgaaaatggtccgttgattaattttcaatatttttgaaattttctcgtcactcatttttgggttttctcttttcattttccaatacattttcattttgtccattttttctttctccgtcattccttcacccattccaaattgtttcttccatttttgaattgttacataacttactccaattttcttcccaatttcggcataatttctcttccattcttttgtcgaatattttcttccattttgtttatattcatttttcattgcattaaatttttgcacaatttcaattttttgtacatccgtttttgatttgttgtgccatttgtatattcctaattctttgatccatttataaattttatgtcgttttgtgcncaatttttttgcgattttcaattcaattttattccattcttttgatgaatattttcttcctttttgtttgatcctttctttaatttgatagtatttttgaataatttctctttttttctgttcattttctttttcttcccatttttctccaaatatttcttcaaatgttttttgttccgctttttccttttctgctccaatttcaattttaataattaaaaatacaattgaaaagaataataagcaaagtttcattgctgacaattttttgataaaaattattattagtagtagggccgcaacttttattgacgaaaaatctcgaaatagttaactaaaatagtgagtaaaaatgccaaaatagtgacgaatagtgcataattttcagccaaaaattgagcaaaaataatttttattattcactatttgcagttgcaaatgagtaggactgggatt

SEQ ID NO: 40818 - DNA, 1009 bp, Heterodera glycines
  unsure (1)..(1009): unsure at all n locations
agcattttaaaatttgattgaccaatccttggaatgctactggtagngcttttagcttttttaggctaagtaacttcctttaaacaaattatagagtctttaatcaaactctttaacaatctcatttatccccccccccctcctcaaattggtcaatcttccgatcgtttttcctccactgaaaaagcaccatattattttctctccctccccccccccccggggggattcgtttttgtccatcgattgattggtccgttggtcgggcgaaactctctaaatttccccgtactatctcttcattctctgctatacagcctctctcatcttacgtttactctctctctctcctctttttttattatgttaataattctgtagataattatcaaatcagtgcctaattagttgaaagaaatgtttaaaaaagtgacgaaaaaagataataaaaaatattgttctttttctattttggataataattcatttaattttatttttattcattttcccctaattactttttgatcaataaattaaaaaacatttatatagattatttgcctctgttttttttgttttgtttattccttttttaatcttttcccttttttctcccccccccccctttttttgcactttttgcccattggaagtgtctgctgctgctgttttcctttttcctgtgaaggacgtctcgaaaatcgcttcgtccgccggtggctggctccgccggtcaccccgcggggaatgcaatgggcggggaggggcgggggacagagttttttgggctacggtcatagggcagcggcggaggaggcacaaaaacatttctttgagttgggctatgctgtggtgttttgttgtgggttttgttggttgaatgctgaccccnnnnnccatcataaatatattacacttttatcattttatttattcaagtttcaagtttttcaaattaattttaaaatttttttcaactgtttaaattattacccattttattttt

SEQ ID NO: 40819 - DNA, 950 bp, Heterodera glycines
ctttccccttccctctctgtttccctttagcccaattgtttccttcgtcctgctgaatcagtctcggcttttctctcttcatactatgtctggcttcggcttcgtccgtctgcttcgtctccctccctccgatcgcctcccttcctccgcttcctccgtttcctccgttgctgctgattctgatcggagtttcgcactctccgtgctcgtctcgtccccttccctttcttccgcttccgtcctcctcactttattcgtccatttttcttccccgttctcttccgcttctcttctcctctctccgcccgtccaatttgtccgaatttctgagaacaaatcacttttttgggaagtgaaagtgaatgccgatcaaacggaagagggacaaattggggacggaggcggcggaacaattcgctacaaaatcgtggaggaatactgtgaagaagagagaaaaatggaggaaaaggaggggaacagagaggaggaagacgagagagcagcagacgatgaggaagtagcaaaagggacaacgcaacagcaccaaatgcaattcgagattgatccgatcgacggaattgtgcggtcccggactgaactgtccgcgaaaaagtcagttgaatggcaaaagcaaagcaaaagcataggctgatcattcatggcacaattgatcggttgaaggtgttcactgtggacagttcgagtcggtgcttttcatgtgatcgacgaatggaatctcaatggggcgaagggaaacgatgcgctcatccgaatacgcgtatcgtcgcccgcttcatcctcacccgcttcatcctctgcttcatcttcctccccttcatccgcttcacttcttccggccgcccatttcggatgcatctttgtcttccccttcgccaattcgtcctcctccactgcgtccgttctcccttcgccttttgccattattcgaa

SEQ ID NO: 40820 - DNA, 1236 bp, Heterodera glycines
  unsure (1)..(1236): unsure at all n locations
ctgtgcccttttggtcatgccacaactttcctctccgaatttttggttcgattggcacgtcctcgcgtcttctttgtcctgcaattgcgcaatgttttcgtctccaatttgccgttctcgacactctcgaccgcctcaattagcccttcggcgatgaaaacaccacgattattttggcatatttttgaggaaatccgagaaaattggtccatctccaaagagcctcaataatgatgctcaaattaaactaattaggttgcgctgcttttccatcgcccccattcatccggccaatttgccccaattaccgtaaccgacggccgaagcgccgcccctccgggcactgatgggctgctgaggcgaagaaatggcgaacggcacacgcataattaattatttgagtgaatgggcggaggcgccactccaccacaaataatccctgcagatttactggcggacatgccgtatttcttcacttgcatttcccctggggcatattaattgcccaattagcaccgatcgcattgaaatgattgcttagagttcgcgcaacttttgccaactcaaagcagtacgaatgaaacgcctttcatttgcttcccataaatgttgagcatgtccaatccaataggccatttggcagtgattgacgtgtcccacggcaggcgaaagggtggcagagcactaattagcatattttgccccgtaattttgtcgtaataatcccatttagcggtttctcacccaaaatggactttttgcttggcttttgcggctcctccgtttcctcctcttcctcctccgcatttactcatcatagcgaagggcagcaggaagtgaagcatcgaaaacagcagcacaatttggagcagtacgaagaagaaagcattcagaaaaatgaaaggcgaaacggcggagaaattgcggagagggaaaaaagcgaatcggcagaggagaagaagccattttcaatcgttcgactgcttctgaccaatggcaccagacaaagtggaaaatggcaaaaggaaacgacgacggaggacgacgggccgaagatggacacgnaaacggagacgcggagaaacgaaggccanaggcacaccctccgcccaatgggcgccactttcgctgtgtcgtcctcctcccctcaccttnacgcttcctgcnngctctccgtcgcccgccctcgctgcttctccccgcgctctctgatgctccgtctccgctgaatttgca

SEQ ID NO: 40821 - DNA, 830 bp, Heterodera glycines
ccaattggccccgtcattgctcagcgaatgtccatcacttcactgtgtctctttcaatgatggcattctcacttttccacccgatgacagtgccaatgcgtcggatggctaagcggtggccaaatggttgttcacgccttgtttgtatggtgtgccgaaggtgatcagatgctttgtgaattcaccgctggatcaatggtcgtcaacgatagaacagattaaagcggtgattatccttatttaattaagctttctatgattttttgtcccatttttaggcattttccaatgcttctttggttactttttgcattcactttctaatttcttctccgctgtgctatttgatcggatcaacgaagtgacttgggagcaattgacacttcaattgttgcctcttccgttgtctaattgcacgggatggaagaaattggaaaatgtgtgggaagaaagaaatgattgatcgacagaacccaattgacattttgataagcgatggcgaatacggcgacgtaattgttgattattttggtttgtaactttctttaaatgttagaattctcttgttttctcgtattattacattattcagactttgcgctttcgaatgataccaaaaagatagggtttgttcgaacatggaaaaagttattgtataaaaacccgggattgtcaattgattggactcataaaggtcgattggatagatagttacctcttgccaacacttctgacaatgacatcattcattttgctgcaacaccaattgactccagttgaattggtcaatgaacgaatctacgaaaaactgactctgcgataagctctga

SEQ ID NO: 40822 - DNA, 904 bp, Heterodera glycines
  unsure (1)..(904): unsure at all n locations
ggggagagaaagagggggagggaaagaaagagcagagggaaaagaaaaaaagatggaaaagagaggaaaagcggagaaaaaatggagggaatgggtgagaggacaaagaaaaaaaggagaaaaacagtgaaaagggatgggggggggagagattgaaattgcggccacagaagacccgtggagattttgcaggtgcgaaccgaaggtcagcagaattggtgaccgatgaaagaatggtacggatgggccaaaagaatgtaacatttgaaaaataaactatcttttctgcaacaatattatacattttgttgtaattggcgacgccgtgccgaactctgtatataatatatatatatatatatatatatatatatatatatatatatatatatatatatatatatatatatatatatatatatatatatatgtaaagattctttttaagagtttgacaaagtgttagccccgagagagtctccccatgacctctggggagacgattgttttcacccaaaaagtgcaccagactgagatattggagcacattagccatctcccttaaattgtaagataattttacggctttttaattacagccaaagcttcttccttatactttgctcaaaagatttttttttacattcttgttatgatgagggatggcacttggcagaagcgaagaacagaaacggcacttgacgatggggcgggcactgtcccgcagctgctgatcggcttttcctgttcaaatccctcaaatgccaaataaaaatgaaaattaaccaatttaacaaagtctgtttaacattctcaagctgtgacatgactctaattgcatnaaaagaccaaaacagttcataattatactctccttcttttttgataaattcataatttttac

SEQ ID NO: 40823 - DNA, 1473 bp, Heterodera glycines
  unsure (1)..(1473): unsure at all n locations
taaaagtgatttacaaacacagaaaagagtataaaagagtgtgagactgagaagagtcaaattcggaagactgcgaaattacaataaatgggaattgtggagtgtgagcttatattcccgcgtcagacgccatactcgcgaagattgaatttggaagggccagcaaattttgaggtgtgtcgaattcctggattcgccctctgtgcaaaacgatcacgcggtcgtagtccataatggtcgcgagacggtgagcaattgtaaaaatggtgcagttgttgaacttctgccgtattgtgtcctggataagagctgaaacagagggaagaaatgttcaaaatagcaaatgccgaacgacgaatgaatgtttttaccgtccgtagccatgtccactgaagcagttgcctcgtccaacaccaaaatgcgactcggatgcagcaaagcccgtgccaaacacagcaattggcgttggccgatgctaagggaaagattaaaaattaataaaaaatgaagcaaatgtcatatttgtcaaagtttacctaatgttctctccgccctcacttatcgaatacattaattttgcaggcaaattgctgacaaattcacttaagtgcgaattttcaagcgcttcccaaacttcggcatccgtgtgatggttgaaagggtccaaattaaaacggagggtaccggagaagaggccgggatcctaaaataaacagagggcgaataatcactaattgtgagtcaacgaatgcctgcggaattatggtcagacgcgagcggaggtcatgcagccccaactgagtaatgtcgacgccatcaatgaaaatacgaccacccgtaggctcaaccattcgaaacagtgccaaagtcagcgaacttttgcctaaatttgtcaaattaaaaacgaaaagaacaccgacaaaggacctgccccagtacgtccaacgatgccgacacgttctgctggtcggatggtagcgtgaatgtcgtacagcaccaaatccaacccagaacggtaccgagtcgagtagtgatcctgcaaaactgtcaaatcaaacattttacagtaaaaattcattacgaagtgaatttcgccatggtttggccacccaacgggcggttctcggcctgggattttccatttggcttcggggatgacatccgcgtattctttaactcgctccacagaaacaatgctcgtttcaagtttgctaatctgccgaacggcgaaattaagcgcaaaagtgatctgaaaaatggaaatgaaccatcgaattggaaaaatgtcacaatacatttagcgaataagagacggagagtccgaggatgccggcacttgtcgacccacgagtgatggcagcaaaaagcgcagcgaacaaaacgatacagtttccgatgaactccaatctgacgcttagccatctgttggctacgcaaccgaggtaacgacactngaaacaatacaagagctaa

SEQ ID NO: 40824 - DNA, 1017 bp, Heterodera glycines
atagggaaagctattcccggaaggatttcggtctcccccataaatctggggcgcatcggttcgggggggactgcccccgaaaacaaaaaaaatcgattttttcaagtgtccgtttggggtactcaaacaattatggggagcaaaaatccaacgcagaattaaagtacaggctatagggaagctattccggaaggattcggtctccccataaatctgggcgcatcggttcggggggactgccccgaaaacaaaaaaatcgattttttcaagtgtccgtttggggtactcaaacaattatgaggagcaaaaatccaacgcagaattaaagtacaggctatagggaagctattccggaaggattcggtctccccataaatctgggcgcatcggctcggggggactgccccgaaaacaaaaaaatcgattttttcaagtgtccgtttggggtactcaaacaattatggggagcaaaaatccaacgcagaattaaagtacaggctatagggaagctattccggaaggattcggtctccccataaatctgggcgcatcggctcggggggactgccccgaaaacaaaaaaatcgattttttcaagtgtccgtttggggtactcaaacaattatggggagcaaaaatccaacgcagaattaaagtacaggctatagggaagctattcccgaaggattcggtctccccataaatctgggcgcatcggttcggggggactgccccgaaaacaaaaaaatcgattttttcaagtgtccgtttggggtactcaaacaattatggggagcaaaaatccaacgcagaattaaagtacaggctatagggaagctattcccgaaggattcggtctccccataaatctgggcgcatcggttcggggggactgccccgaaaacaaaaataaatcgattttttcaagtgtccgtttggggtactcaaacaattatggggagcaaaaatccaacgcagaattaaagtacaggctatagtgaagctattccggaagga

SEQ ID NO: 40825 - DNA, 1001 bp, Heterodera glycines
gcttaacttttttttcagaaactgatcagaagcgcaccaaactttgcagggatactgaaaggaagagaaataacatattttaaatattatctagtcagttcatttaaataatttttatccaaaaaatttttttttgggttttcggggcagtccccctgaaccgatgcgcccagatttatggggagaccgaatccttccggaatagcttcactatagcctgtactttaattctgcgttggatttttgctccccataattgtttgagtaccccaaacggacacttgaaaaaatcgatttatttttgttttcggggcagtccccccgaaccgatgcgcccagatttatggggagaccgaatccttcgggaatagcttccctatagcctgtactttaattctgcgttggatttatgctccccataattgtttgagtaccccaaacggacacttgaaaaaatcgatttttttgttttcggggcagtccccccgaaccgatgcgcccagatttatggggagaccgaatccttcgggagtagcttccctatagcctgtactttaattctgcgttggatttttgctccccataattgtttgagtaccccaaacggacacttgaaaaaatcgatttttttgttttcggggcagtccccccgagccgatgcgcccagatttatggggagaccgaatccttccggaatagcttccctatagcctgtactttaattctgcgttggatttttgctccccataattgtttgagtaccccaaacggacacttgaaaaaatcgatttttttgttttcggggcagtccccccgagccgatgcgcccagatttatggggagaccgaatccttccggaatagcttccctatagcctgtactttaattctgcgttggatttttgctccccataatttgttgagtacccaaacggacacttgaaaaatcgatttttttgttttcggggcagtccccccgaaccgatgcgcccagatttatgg

SEQ ID NO: 40826 - DNA, 786 bp, Heterodera glycines
ttcgcaaacacgaaaaagaaagtgtttttcctaaaattagagaatggtccaggaaaaaatatgtatttacataaaattgccagccctactaataatatttcaattaaactaattattttgcttttaattaaaaaaattacttttaatttgatcacttgcattgtacttcgaccagattgttggaaaattttttgctcgatttttatccgtttagactgaaccctattgcttgtcctcaatttctattcaaaaatattttaagtttgacaaatttggaaatttcttatgggaaatctatgaggttcaatctcgagcggagtccttgaaaagccacctccatctcgcattagaatctttctcgagcttctcgtttgttagcattttcaattttgctttgacacctccaccccatcacccaacttaacaaatccacaaatccagttccttttatacgttgagagcagaacatttggaaatgattgattggtccgcacaaatcccaccgaatttcccccattttcaagttccattggcagtccctcaatatttgcagcgtcagcggagatcactcgccaaatgaccacaaagagacaaatcattcgggtcaccccaaggcgcacattttcgctgtcaaatttgggtgaatttttaaaagcaaataagtgaaaagaaaaaccaaaatcccataaaagagagttatggcatttcagatgaacttttatgctttttgttcactcccttttttatataatgtgcgaaatttgtttttaaaagttaagctgaatt

SEQ ID NO: 40827 - DNA, 739 bp, Heterodera glycines
tttgctttttgtgatcccctgaaattttcattggcatattcacttttaaaagcatttttgcgcttaggcggtgccatttgttagtactagtgcaggtgctaaattaaaaacaaaagagaaaaacaataaagcaataaataacaaaataattagccaaaattaacagcaaaaaaagaaatataatgctaaaattaaaaaatatttgcttaaacattacgccaatccaaatttataaagaaatttgacagatttttcggagaatcaacaaatcaggacaaaatttggtcgctacctcaaaatcaggacaaatctgacaaatcaggacattttaattttatcagatttggacccttcaaatcaggacaaatctgataaatcaggacagatccgaaccctgcattaaaagttaatgaaaattaaatggcgcccccacaaaaaatctcagcggcacctaacggatccctttaaagatgattaggcagctggtccctcctccatacattcaatatctaaataatattatttggccacattttttctcttctcccctctcttaatttcgataaaaattaatttttgtcatttttgtgtgtatttttttatgttttttgggtaatattttttctatttattcatttctgcaggcacggattatgtgatgtatgtgctaattgttgcggaaagccaactattgcagaagagattgcaaaaatttatcgaatggcactacaaaagctga

SEQ ID NO: 40828 - DNA, 975 bp, Heterodera glycines
  unsure (1)..(975): unsure at all n locations
atgttagaaatattaaatcaggaccttgtgtttgagtttntaaanagttaggttaaaaaatntaaagaattaattaacaattgtttcatttttgtaatttgattttatttatttttatacattattttgaaaaaactaaattatataatattttttattttgatattttgttgaacagtttaaagtttataaaccgaaattgaatttaattttttgttattattcagcatttttaaattacatcgcaaattttatttaggcttttcatagtctgatattatattttcaaagctttgttgtagattttttgtttctgttttgtagaatattttctctctttttaaaaatttgatttactatataaaaattttattttcgctaagttattaattataaactgtaatattaatgcttacatgttatttttaattttttatttattttgcttgttcttataaaactttaaaaattttaaaaagttaaatgaattactttttttaattaatctatctgaatgatcataaaattttaattatcattattaaaattgattggatgaaagaaaggataagaaagaattcaagagttaataaatagtttatcataaaacagcatgaaattaaagaaaataattaaaaatttattttaactatatatttcttataaaaataaagagaatttgaaaagctttaagtaaaaaatatttatataaatcatgaaagaaaaatctaaaatttattaatatattaaaaaatatttttaaagacacaaatttgaaggacagttctttttaatataaaatgtgataaaaaaaatttttaacattaaaaagagttatttttgaatatattattggtttgttattttaattaataggttttatgtgtctattttcgtcatttgaaatttttctgtttcatattataaattataattttgttacattatcgaaaaactaatttatatatatttttt

SEQ ID NO: 40829 - DNA, 971 bp, Heterodera glycines
tgcaggtcaacttggttggtaccatagtttgcggtaaaaaaatgagaaaaaggagagccattttttggtcaagaattttttttgtttgcgtttcaaatatcgtaagattgtttgataaggccagacaagagaaggcaactgttggtaccaagtttgcagtaaaaaaatgacaaaaaagagatagccattttttggtcaagaattttttttgtttgcgtttcaaatatcgtaagattgtttgatagggccagacaagagaaggcaactgttggtaccaagtttgcggtaaaaaaatgagaaaaaagagataaccatttttggtcaagaattttttttgtttgcgtttcaaatatcgtaagattgtttgatagggccagacaagagaaggcaactgttggtaccaagtttgcggtaaaaaaatgagaaaaaagagatagctattttttggtcaagaattttttttgtttgcgtttcaaatatcgtaagattgtttgatagggccagacaagagaaggcaactgttggtaccaagtttgcggtaaaaaaatgagaaaaaagagatagccattttttggtcaagaattttttttgtttgcgtttcaaatatcgtaagattgtttgatagggccagacaagaaaaggcaactgttggtaccaagttcgcggtaaaaatatgagaaaaaagagatagccattttttggtcaagaattttttttgtttgcgtttcaaatatcgtaagattgtttgataaggccagacaagagaaggcaactgttggtaccatgtttgcagtaaaaaaatgacaaaaaagagatagccatttttttgatcagaattttttttgtttgcgtttcaaaatcgaaagaatttttgatagggcccaaaaaaaaaagcatttgttggtacaagtttggcggtaaaaaattaaaaaaaaaaaaaactcttttttgggaaaaaaattttttttgtt

SEQ ID NO: 40830 - DNA, 1283 bp, Heterodera glycines
  unsure (1)..(1283): unsure at all n locations
tagttttttcccaggggattttttttaaactgaatatttgtttggataccatgtaggggtaaattgtcaataaatcaaaaaggtgggncccngggataaggggttattccctcgttttgtcaaataaagttttgttctagggaacataaatcataatgtggtggacagaatttctggaaggttacggtattcccaagggattcttggtcatgtcatagtttagatcttatctttaaatgggacgttatagttttaggcaaaataaaattttgttctaggaaatataaatcataatgtggttgacagaatttctggaaggttacggtattcccaagggtattcttggtcatgtcatagtttagatcttatctttaaaaatgggacgttatagttttaggcaaaataaaattttgttctaggaaatataaatcataatgtggttgacagaatttctggaaggttacggtattcccaaggggattcttggtcatgtcatagtttagatcttatctttaaatgggacgttatagttttaggcaaaataaaattttgttctaggaaatataaatcataatgtggttgacagaatttctggaaggttacggtattcccaaggggattcttggtcatgtcatagtttagatcttatctttaaaaatgggcgggattttcatgtgtagtaaatatttccgctttaccaaaaatgtcaacaaccaaaacaacgaccaaaatcttgatgacttactactcaattaatacaaaaagaattttaaaaattaaataaaagctaaatataaaatgaaaaaaacagaaacctaattgaaaaagaatgaaaatttctaaaaattattaaaaataaattgaaaataaaagtgcccagtgagcgaatgacacgatagcagtagtaaagaacaagatacacgagagaatattattaaaataacattacatttaatcaaaatataaatttaaaataccaaatttaaacaaatattttttattattatctaaataatttaaaagtcaaagctcataaaaaaatttagattataataacaagaagctcgttttgatgggacaaattttggcaaatgtttatataaattcttaacaaaaattttgaaaatctgtttaaaagtcggaagatttactagaagcttttgaattttacttgatatttttgtacatttttgaaaagtaaaatcctattaccactngaattanaggtcaaagaatgtttgagagcaaatatataggaaaatattaagcaaacataataatac

SEQ ID NO: 40831 - DNA, 204 bp, Heterodera glycines
caaagcaaaaaagaatggagcagattattccctctccgccggccgaatttttttttaaattttattaaaaaattatttttaattgacattttctttcctccgtccaaaattcaccttgaattgcggcgatcagcggctggcccgcccgggggctgaccaggttgtacttgaggcccatcagcagcgacgcctccgccttggcct

SEQ ID NO: 40832 - DNA, 931 bp, Heterodera glycines
aggaattccaaccgcattctcagaataattacgccgatactaattgttctggaatttgtttctcggcgcgtttgtttgggaaaaatttggaaaattggctatctcattttctgctcaacagtaataggaattccaaccgcattctcagaataattacgccgatactaattgttctggaatttgtttctctgcgcgtttgtttggaaaaatttggaaaattggctatctctttttctgctcaacagtaataggaattccaaccgcattctcagaataattacgccgatactaattgttctggaatttgtttctcggcgcgtttgttttggaaaaatttggaaaattggctatctctttttctgctcaacagtaataggaattccaaccgcattctcagaataattacgccgatactaattgttctggaatttgtttctcggcgcgtttgtttgggaaaaatttggaaaattggctatctcattttctgctcaacagtgataggaattccaaccgcattctcagaataattacaccgatactaattgttctggaatttgtttctctgcgcgtttgtttgggaaaattttggaaaattggctatctcattttctgctcaacagtaataggaattccaaccgcattctcagaataattacgccgatactaattgttctggaatttgtttctctgcgcgtttgtttggaaaaatttggaaaattggctatctctttttctgctcaacagtaataagaattccaaccgcattctcagaataattacgccgatactaattggtctggaatttgtttctcggcgcgtttgtttgggaaaaatttggaaaattggctatctcattttctgctcaacagtaatagggattccaaccgcattctcagaataattacgccgatactaattgttctggaatttg

SEQ ID NO: 40833 - DNA, 1539 bp, Heterodera glycines
ttcaccattcaaattggggcgcaaaacggcacacgccaatggcactgtttgtgggggaagtgcgccgttcgacttcctccacatttttgctcacccatcgcgttctttgttccatatattcgtccaatgtcaccgacttcaactgacaattggaggaattgatgcgcattttagcaaaagtaattaaattattaaattgagtaaataattagagaaaaatttgcggtcaaatttttgtgttttttttttctttcaaaaaaagcaaaagcaaaccagcagaaggagttccaaattatcgtaattgtcattgaattagttaatgaaatataagtggagagaagaggcgactgattgatttgtcttcggtcgctggcaccgccgggggggggccacccaaagggaaaaataaacaaaaaatgggagggggggggggaagaagcccaatttagacgaggaagagaaggaaaaacaaacaaattttaaaaaagacacagccaaaatgcttttggctaaaaactgctcctctacgaaaacatttgtgttaatggggggggggggagagcataagattggttgaaataaatgtcagattcatgatcagcgacctcgaaaagccccaggaataagtttttacgcctttttatgcaaaaaaattttgctaaccaaatttgagttagaaaatttctcttgagggatagaaaagataaaaagatgtgtgacgagagagttgctgcggatgggtatctgcagataaaaaaatcttcagctgcagatagttagcgctagcattgtgcatagggattttatttgcagatttttttatctgcagctaccctatccacatatcgctagctacagataaatatccttagcattgtgcataccagcaagaagagagaggtgcggtaaattgaatacaaattgaaattggacagataattgaacagaaattggatatttgcgcgaaatcgattgagcataagcaccagggtctttttatgataaaaattgaactgaaatatttattaatttgcaagaagtatagccacttcttccaataacggctcatatgaaaaggggataatcaattaatgaatggattgaccaaggctttttgaagggaccgagggttgaagaggtcagcggtcaaatttgttaatggacagggttaccctttgtccttatttgtaagatttgttcttattttgagggtccaaatcttacaaatgtgaaatgtccttatttgtaagatttgtccttattttcatcttattttttggattcagggagaaatttagatttttaatgataatttttgaaagaaatgttttttgaagcgaattaatatgcaaaatcttgacaagattcagttaaatattcaaatttttctctcggcggtttcttattctcttaaaaaaattagctcaaaatcgtaattttgtcatttttgaacaaaatcgttaagaaatcgcataaaaaattacaaaaatttttccggcggcgcctattagagcaggggtgatctgttcttatttctaa

SEQ ID NO: 40834 - DNA, 1273 bp, Heterodera glycines
  unsure (1)..(1273): unsure at all n locations
gtccaaaaataaattcaaaaagtggtaacatttcactaaatagttgaaaattccctttnaatattttatttatgtgagatttgaaattgcaaacgcaaattctgaaatttcncagggctttctatcaaaatntaaaaaaaaagaagtctggtgattaagctggcctgacagcttagacggtaaacactgatttggatggaaagccgatcgcagaagcaggcgctaatggttcgagtccttccactaaataggctaacccaaaaataacaaaagtgaaatgatgcagataattcaaattttaataactagtaaaagccatgattgattaaccccagcccgcgggcgggaaacaacgaaaattataacttaaacaaatatttcttttatttaatttttttaagccaaaataaaatttttacaaaaatttcatttgtacattatgtaacacatttttttttatctgcaattaaaaaaaaaattaatcattcattaatttgttgttctctccgccttctttggtaggttgacgaatgtacgaacatttggctccaaataatgaaaaggagagcgcgccgcggttgtggttgaaataaaacaactttacggcttaaaaaaaaacataaaattggacctgaacaaatcccttcaaaattggtaaagtggcacgacacatcaacacggcactaacaaaggctcgaaaagttggccgcgtccctacaaaaagcattaaatttacaacaaaatggataaaatcataaaaaaaactaaaaacgatttaaaatacatctctaaaagtaagaatctatttcaaaaaatgctttattcaaaattcattttctttaatattgtttttttcttatacatctaacactggtttgggtcaattttgttgttttgagctattttttttttgctttacactactaaaggctgaaatagttgttgccattcttttttttattgtttttttctctcgagattttttttcttcttgttatttctttgcctcccgactaattaaaaaaaataaaaaccttcataactagaggacttccttcgttccctgcatcattatgcacacagggcgacacttccacacacaatgttgcaaaacgaatattggtagaacaattaacacccgcaaacagcatttgtggtttattgccaattttaattatctgaaatgagaataaaaaataataataatataaataataagtgaaaagctcaaacaatagcggatttggcaaaactaaattttatttatttattt

SEQ ID NO: 40835 - DNA, 1127 bp, Heterodera glycines
ttaagcatttcaacatatatagaaatccgaattataatatttgttctcgaaattttataaatagatgcaacttgagaccaaaagtgataagaaacatcgtggccttggaatcgctttcgctacaaaaattcttccacatacgaattcaataagcttctgtgtgttccatatctttttttgtgttcttaattccatgcttaagaaatcaatgtaaaacgaatacatttataggcatttaaaaatgtatgttaaaagtatcaggtaaactagaaaagtaccgaaatttttgcggaaattatttcttttatgactccaaaataagtgtattaatattgaacgctcttaaaatgttcgaaatcccttgaactttttctatcggttcatgcattttttgcttaaggaattcgattttcgcttgctccttttaggtatttgtatagaatggtcaatttttttaattacctctcttttgggttcgttttttacaatttttctttttgtatattatcgtatcaaaattacagtgcaattcgtgtgctgctggaaaagtcgcccagcttgctgcatgaacgggacccgacaaacggaaacacggtaaaaacgaaatcgcaaaaaaaaaaaaatttcaggttgccttaaaaattttgatttttttttcggtcccattttggcattcttcatttaaaccaatttattcttcaactgtgtgcttttttgaccaaaattatttgatttagttgacataacttaaaaatctcgtttttatggcaaaaaaaaaaaaaatttttttttccccagtcgtcaattacaatttccgattgccaaactgtttaagacttacggaattccgatgccggaaaaatgcatcttccatccgttcttaattttttcaaaaaatttccaccccaaaacagtgtttgcatgcagccaaccagaaggcctcgttgatgagcttgcttcagctgaagcacaatgagttggacctgaacgcccggaacaaggccggcttcaccccgttgcatcagttcgtgatgcgtggagacctaggtaaaagagcggacggaaataatgagggcaaattggcatcccaattttttgttttttccaaattttgaccgtccctgccc

SEQ ID NO: 40836 - DNA, 1349 bp, Heterodera glycines
gttttttgaatttttttaagtgcaaaagtggtggtgtctgcaaaaaattttcacccgggtttaaaaaatctaggaaaaattagtaagcatttgtagtgttccgatacgtattcctgcataatttggtgagcccctgatcaattacaaattatttatggacgatcaaatttttagaaatttttatttatttttgcataattaattcataaatatttttttcagaaaatgctctgaaacgcaccaaattttatttacatgctagtttaggcactctgatgctttttctatcaaaaagggagatgaataaatttttaaaaatttttaattcctttttaaacaggccaaaaagtttaggcttatcttttttttcagaaacttatcagaagcgccccaaactttgcagggatactgaaaggaaaagaattaacctgttttatcacattagcttgtcatcagtttttataaaaaattttcaaaattctgagtctcctattattttatttttttttcaaaattttgaagggcggagggggggcgaaggcccaccacgagccgcgaagcggccgagtgagtacctcggtgcatgaaaattattaaggaagagagttcattatttgtttattttttgcataattaattcataaatattttttccagaaaatgctctgaaacgcaccaaattttatttacatgttagtttaggcactctgatgctttttctatcaaaaagggagatgaataaaatttttaaaaatttttaattcctttttaaacaggccaaaaagtttaggcttaacttttttttcagaaactgatcagaagcgcaccaaactttgcagggatactgaaaggaagagaaataacctattttaaatattatctagtcagttcatttaaataatttttatccaaaaaattttttttggggttttcggggcagtccccctgaaccgatgcgcccagatttatggggagaccgaatccttcgggaatagcttcccgatagtctgtactttaattctgcgttggatttttgctccccataattgtttgagtaccccaaacggacacttgaaaaaatcgatttttttgttttcggggcagtccccccgaaccgatgcgcccagatttatggggagaccgaatccttcgggaatagcttccctatagcctgtactttaattctgcgttggatttttgctccccataattgtttgagtaccccaaacggacccttgaaaaaatcgatttttttgttttcggggcagaaggcccgctccgatgcgcccagatttatggggagacctttgacgaccgcaatacttccctatagcctatactttaattct

SEQ ID NO: 40837 - DNA, 1279 bp, Heterodera glycines
  unsure (1)..(1279): unsure at all n locations
agtggcagggacggggtgtatgacaacactgccaccctggatgactcatccactttttctgcgatgtcgacattcttcctttcctggatgtgttcaagaagatgacgatgtggagttccacttnttcgtattctgcgtggagcacctcannccattcctganccactcccagagcaaanatgcttctcacncaatttctttgaagaccttcacttgggactccggctcccagaccttggccaactcattcacttctttcttcgatctcgaacccaagacaatcagacaatcagcaccatcgaacttccgagcccttccttcaaagcgtgcttcaatcatcatgtcaacctctcgctccatctcaatctggagagctgctccaacaacatgctccatcgccacaacatgatgtttagtaagctccgcggagcatggataaaccttgggcgtcatgtttgcattcagatttggccactccaacagatgaggacgaatgcacgcaactgcaccgaaaaattcaggtgtttcggctcttctttccgttcccagtttgaacggagaagaatcaggcagaatgtatcccattgatacaagtgagtcctgtggaatgttggcaacaaccaccgtcacaagtgagcccagcttgaggtcttccggattgatgccatcaagatgacgccgatttatgcgtgccgaaaccgctagaccacagcacgcgatgtttgcgtgaacgatttggaatgaaatttcgtaaatcctaaatttcatgatacatttaaattttgagagggctgggtaaattttcgctaaagcgcataaatcagcggcctaacaaaaatttcataaattcaatttgttcaacaaaaatcctctgaaaacaacccctttttcgaagggaaaatttcggagaaaaatcccagattttttcaggttataaggcctgcttcaaacgttcccaaattttcaaaattccaagacccctcaaaacaaaacaaacttgccggattttgccgtgccgtaggccgacccagcagcggtgaaaatcatcgccgcagtaacgccaagcgagccaaaaaaagggccatacgccgcttgctccgctgcaataagtgccgaattgtcaccggacatcttcaaatgttggcacgantttgtaaaatgctaaaattagaaattagtcgtctggcaaaatcaaaaattttttaaatattnaaaacagaattcaggaattcggattgtacccttatttttcatacattattatttttatgaaaaacga

SEQ ID NO: 40838 - DNA, 1191 bp, Heterodera glycines
tagagaccaatatttgagaagtgagttagaaatgataatcttcacgattcctttacaagttcgatgctctaattaaccgcgataaaaacatcctaatcaattaaatagcttctgagataataaggtttatcataaaatttcttttaaaaataaaccctcaattattggaatgaacgctactttccaaacatgcacgcgttttgcgctcgagctatttatcatcgggcttgtcaatccaaagcgaaacaacaaagatggtgttttgaacgaataaagggcataggttattttgaagaagagtcaaagaacatgcagcaataagcctgcaaaatctaataagtggaaaatacatgagtatagaatttattttcagaaagtgtcaacagacttttggaaaaatatatttgcaatttatcaacaattttgagaagtgagttagaaatgataatcttcacgattcaaaccaattttcgttgctctaattaaccgcgataaaaacatccgaatcaattaaatagcttctgagatattaaggtttatcataaaatttcatttaaaaataaaccctcaattattggtatgaacgctactttccaaacatgcacgcgttttgcgctcgagctatttatcatcgggcttgtcaatccaaagcgaaacaacaaagatgctgttttgaacgaataaagggcatactttattttgaagaagtgtccaagaacatgcagcaataagcctgcaaaatctaataagtggaaaatacatgagtatagaatttattttcagaaagtgtccacagacttttggaaaaatatatttgcaatttatcaacaattttgagaagtgagttagaaatgataaacttcacgattcaaaccaattttcgttgctctaattaatccaaagcgaaacaacaaagatggtgttttgaacgaataaagggcataggttattttgaaaaagtgcaaagaacatgcagcaataagcctgcaaaatctaataagtggaaaatacatgagtatagaatttattttcagaaagtgtcaacagacttttggaaaaatatatttgcaatttatcaacaattttgagaagtgagttagaaatgataatcttcgcgattcaaaccaattttcgttgctctaattaacctcgatagaaacattcgaatcaattaaatagcttctgagataa

SEQ ID NO: 40839 - DNA, 1002 bp, Heterodera glycines
agcaggtgtggaaggaagggaggaagaagccaaattttgcacgttcattcgactaacgaggaacaaaaaaaaaagttttttttctaaggccgaaatctctgtggtgaccagtggcagtagcaccagaaaagaaaacgcggaggaggtggaaaaggaggacaatgatttgcgaattttgcatcaaaaaagcaaggagaaagcacttgtgacggaaggaacggaaaacaatgttcgacaattttctacccaattaaaatttaaaaaaaaaattgccccaaaggcgtctcctgtcgtcgtggtcagctctcccgcttcaacgccgcaatcgcccatcaacaacaacaacaacaatgtactcactcattaacttaaattgttttacaaattgttcctcacattcaggcatcatcgcatgccatcgccggcatgccaattccaactattccatcatcgccatcaacagcagtcattaaaaaaccgctcatacagaatcatcagcaacatacgtcaccgcccccgcttatggccattactgtgccgccgccttcgcttcatgtgcctccaccgtcgttggcgttgactgcggtgccaccgcctccgctcatcatgccgtcgcagttggcgatggccgccaccaccacaaatgcctccgttgctggcggtgctgctgccatccaaaaacatggcggcccacaacagcaacaaatgcacacgcattcaccaacggcggcggcggttgatcggccaattggtagcggaattctacacagaattcaatgtgaaccaagtagtgtgtgtgatcgtcgatcacttcgtattaattagattttctgatcagttttgatcgggtgcacttcattttccactcccgcgtcgtttccccgcctcgaaaatttaaaaaaagggaggcgggaaacgatctgcaccggtcctgatcatctcattttgatcacttagcactactaacactaacacacggtcatggagggtaaaatatatccg

SEQ ID NO: 40840 - DNA, 175 bp, Heterodera glycines
cgaatttggcattgaaaagaatgccaaattcatttgcggtggacgaaaggaccttgtctgctgaagcaagtgaatgcccgtgtttctgtccagcaaaagttttagtggagcgaatgcgacatggacagtcaaaggcatagaatgggcatcgaattcgtccttggcaatctgtgga

SEQ ID NO: 40841 - DNA, 1001 bp, Heterodera glycines
tcctaaaaagagatagccatttttctgagaattaattcactatttccgcagctcttgcggtaatggaaaaaattttgaagaggctctgcggaacggattagcatcggggttacgagatagaaaattgtcctaaaaagagatagccatttttctgagaattaattcacaatttccgcaactcttgcggtaatggaaaaaattttgaagaggctctgcggaacggattagcatcggggttacgagatagaaaattgtcctaaaaagagatagccatttttctgagaattaattcacaatttccgcaactcttgcggtaatggaaaaaattttgaagaggctctgcggaacggattagcatcggggttacgagatagaaaattgtcctaaaaagagatagccatttttctgagaattaattcacaatttccgcagctcttgcggtaatggaaaaaattttgaagaggctctgcggaacggattagcatcggggttacgagatagaaaattgtcctaaaaagagatagccatttttctgagaattaattcacaatttccgcaactcttgcggtaatggaaaaaattttgaagaggctctgcggaacggattagcatcggggttacgagatagaaaattgtcctaaaaagagatagccatttttctgagaattaattcacaatttccgcagctcttgcggtaatggaaaaaattttgaagaggctctgcggaacggattagcatcggggttacgagatagaaaattgtcctaaaaagagatagccatttttctgagaattaattcacaatttccgcagctcttgcgggaatggaaaaaattttgaagaggctctgcggaacggattagcatcggggttacgagaaaaaaaaattgccctaaaaaaaaaaagccttttttctgagaattaattcacaatttccgcagctcttgcggtaatggaaaaaattttgaagaggctctggcggacggattagcatcggggtt

SEQ ID NO: 40842 - DNA, 1257 bp, Heterodera glycines
ccccccccccgcccttcagagcacgacaaatatttcaacaaaaatttttaaaaattgactagagcaattgaacgctaacggacgacctaatggaaaaaaatccccgaaggagagaatttaattaaatccattccttcgggggaccgtgccgggtgccgcggggtaagcagtgctggttcgtttcatcacggcaccgaaccttttggctagtcagcaatcgttgcttaacttgccagatcggacgggtgcgcatgattccactgttccaagcaccccaccaaaagcaaaacgatataaccaaaatataaggaaaatttttttaaaaatttttttctccatcttcctttttgatactaaagcatcagagtgctaaaattaagttgtaaataaaatttggtgcgctttagagcactttctgaaaaaaatatttatgaaacaaaaaaatcgattttttcaagtgtccgtttggggtactcaaacatttatggggagcaaaaatccaacgcagaattaaagtacaggctatagggaagctattcccgaaggattcggtctccccataaatctgggcgcatcggttcggggggactgccccgaaaacaaaaaaatcgattttttcaagtgtccgtttggggtactcaaacaattatggggagcaaaaatccaacgcagaattaaagtacagactatagggaagctattcccgaagaattcggtctccccataaatctgggcgcatcggttcggggggactgccccgaaaacaaaaaaatcgattttttcaagtgtccgtttggggtactcaaacaattatggggagcaaaaatccaacgcagaattaaagtacagactatagggaagctattccggaaggattcggtctccccataaatctgggcgcatcggttcggggggactgccccgaaaacaaaaaaatcgattttttcaagtgtccgtttggggtactcaaacaattatggggagcaaaaatccaacgcagaattaaagtacaggctatagggaagctattccggaaggattcggtctccccataaatctgggcgcatcggttcggggggactgccccgaaaacaaaaaaatcgattttttcaagtgtccgtttggggtactcaaacaattatggggagcaaaaatccaacgcagaattaaagtacagactatagggaagctattcccgaagaattcggtctccccataaatctgggcgcatcggttcggggggactgccccgaaaac

SEQ ID NO: 40843 - DNA, 1880 bp, Heterodera glycines
  unsure (1)..(1880): unsure at all n locations
cgtccaatccaacgtcacttcccccacgccgtccagcacggtccaacaggaccttcacgcactcgccctccatggcacttcgccctccccaacggcactcccaccgacgaacggaggcacgagcagtacaaaagcagaagaaaggcggcaacagcagacgaactccccgtgggtaagcaatattgagattggataagttaaacagtgccacttcggctaatgcaactaatattcacaattgcttttggtgttggtcgcgcccactccgctccacccagccaattctctgctgttcactacgagtgccaatgctatccatcacaaaattggcaaatgaatgtggaaacgatgggcgaaccaacggccaataacgacaaaggaaataaggatttttggaagatctttagctggccattaaactcagcaaaaatccgtacttttagtttttaaaggggctcagtatgggataaatctgataataaggccagctacagtgtaaccacgtgaaagatgccaaacaaacaaagccaatgccaggaaaaattatttattgtcatgccgatttaatcaaatgtataattaattattaagacactaagagattaatttcctgataaatgcacaagcactttcattcgttaccggataattcctaattaatgtccaaaagctcagcaaatctcagctaattcgcttccttctcattctctccgctggcttttaagttgcttcttggacgtaagaagcacgatgctttgccaaaatgcgcaggagaggacggaatttcagccaccattgtttgaggggcaaacgatgctcaaaatcggtctcagcggcgagctcttccagcggagagaagacgacttcacgaccgatcagaccgaaaatgaggaaaagaaagctcacaatcagttaaccgactgaaggacatccaatttncggaacaaaaaggaaaaggacagaaaaccacgacactattcattagaaactaaccgagcaaagtggcagtatcgggtttgtccgcgttgcatctttccgtagttttgtcgaagttagcgttgatctgtgtgataagatggttcaacgcacgggcgcctaactttgtgcccatcgttgcggtcgaatggagttggcttgcctccctgttgagggtggccaagaatgttgatccgagtgctgaactaaaaggcaaggcaaggttgggagaggataacagaacactgattttctcaccaactccttcctatcctatttttttacatacaaacgcaatagaagtcgaaaacacccaacgaacgactgtgtgatttattaaaagatttgccaaaaatggcaattttatgggttaaggaaattctggtacatttcttaattatattttcggctttcgaggggggggacaccaccgactgtagcctccgttggaaaggccctggttgccctcaaaaaacaaaattacattaatagcacttgcctctcccttgccctcttcgctgaataacttttgtacaaaagtggtgtcgtaattatggctggcgccctccgactgcactatcaaataacgttgcacccccttttgcattttctgactgatcactttgacgtcctctttaatgtctgtaaaatacaaaattgaccaaaaagaattcacggattacccaccgtccaccgtgaatttctcctcgaaaatgtacgcattgtccgcccccgtggcgatggncgacaccgtggccaaatagncgcagtgccctcccatcgtctcgatgagaaaacacgncgtttggacccattggcgattggtttatggtgtccaccatttgcagatggcattgatagccgtgtccgatcctaaatgacgaaaataaatatttatttatttt

SEQ ID NO: 40844 - DNA, 1783 bp, Heterodera glycines
  unsure (1)..(1783): unsure at all n locations
acaaanatgcaatgcatcacanaatttacatctaacattcataagaccaagtccatgttcatgagcattcacataagaccctgctgcataaacattaatttcaccttgtctaatcactctctgtctaattctttgctgttctagacgtaactgtctctcatatgcattctcttccgatctttgactattatttctatttctcatctgttctaaacgcaaacgacgttcatttgcattttcttccgttcgttgactattatttctatctcgcatctgttctaaacgcaaaactctctggttttgtgattcgttttctcttctcattctctcacgttctctctttcttttcaaatactcagttcttctcctttcttcaaattgactatcactcatacgtgacggtccagcaataccaatatctgaattcagagatacctggctttcgccaccaacaacatccattcttgaccgtttactataattatgctcttccaatatatcataactgctctcaactacttcataatcattatcaaaaacatatgcatattccaaattctgttcattatcattacttctatcattcacaaatactcggtctaaattcattataacaaaggaggcagtagaaagtttaaacctgaaagaacattacataacaaaatcatttacaaaataacaaatatataaatgtgaaccaaacaacatattcaagcaagtgtgaatatttaataaaatgattaaaaataaaaatgagtgggtcaaaaataatgcaaggtcaaattatctctcattaaaaagagaaaaaatcaaactgacctgttatcccgttaatttttaaaattttcaaaaacatcacattttgtagattggcttcgatatcgtaaaacatccatttgtaaaaaaattgcaacttgaatcagcacaacatgatacatatcaaacaacaaaactttcatttactaacaattcgttttcaattaatcataacataaacaaaaatttctgctgataaccaaacaattaaattcatatttaaaaaaattaaatgtgacttttttcacaaacaattcattagcatttacaaacacaatcaaatttaaattccaattctaggtcttaaattcattacaaaaatcagcggtagatattttaaaccttgaaacaaactttgaaaataaaagaatgtacacaaaaacaaaaaaaagaagcatttcaactttttcttttttcgctcaaaaaaagcagtaattaagttaatagtttgcagatgggggagagggtttttttttaaaaacatataaaagagaatcgttattgcacccacccccaaattcaaaacaaaaactgacctgtaaacgttaatttaaaatattccacataaatttcattcagcaagcggtcattcagcaagcggcacgtaatatatcccaactgcatataattatccacccgaacaggaaaatttgagatgtagatttacattgctttctttcaatccattaaaggcttgttcattctctttttactatacaaaacatttttttcattcaaacaaatatcaaaaatcaaatcagattttttttcgtatgtattataatcaaaaaagtaccaatagctttttaagaaacaaacaattttcatatcaaaccaaatctaattcagttttctaatcaaacaattctccaaaatcatttacataatcaaaacataaccattcatatcaaaaaataaatcaattanacataaataaataagaaataaaaatttgacagcacaaaaa

SEQ ID NO: 40845 - DNA, 782 bp, Heterodera glycines
  unsure (1)..(782): unsure at all n locations
agggaggggagtggaaggtaagaaggagaggaggagaaaagaggagagggaagggaggggggagaaagggaagcgggagaggaggggagaggagaggagaagaggagaaaagggtgaggaaaggggaggaggtgagtaagaggaggtaggggtggggcggggaagagaagagggagggggaggggtaagagctaagaggtggaggttatgctaatgagtgactgtgtcgttggtctgtcttttcttgctttggggttttcttttctaattttcttttctgccaaattttctcgcatttgtcaaagtttaagctatcaatgcttttcgtttggtgcttcaatgttttctttgttttggttttgttttgttctgcttacgtttatgactcatccccccccccctccccttttacgcatttatcgtccctttccctcccccctttttcccttttcccctcactttcttccctatttatgattcattgaattaatgcaacaaaaaagaatatcctaaaattttatcagcagaagagaataaatttgaaagtgctttgatcagcaaatggacaattaaaaaaacatttttatttaaatttacgtgatttatctttggcatttttcttttttttgattttttttcatccgccgattaatttccatgtgtaaattttgtcaagcaaagagaagcgacaatttggcagcagatcaaatttctcattgtgtacttaagagagcactcacattcaaatgtttcttttgctgacaaattctttccccntaaaa

SEQ ID NO: 40846 - DNA, 1074 bp, Heterodera glycines
ttatcttgggcacaataaggagtttttggggcgagcggtgccgataagcgcggccgaggaaatattttcagaatttttaacgaattttgttaaaaaatagccaatttttttggcatttcctcttttactcttcgcaagcccccccccttttatatgttaataataatacagattaacaagaataagtcagatgaaatcgaaatatgggtagccttttaataaaaatagaaaaaaaaaattcatttttaaaaaataatcttacaagaaatcgtctggaaaaataatccaaaagtcccagttacggatcaaaattacggaataatcctaaaaatccgtaacccgtaatccgtaatgatatttttgaggttcggctcagcacgggcataagccaaggattctttggctaaatgctccactacctgaatcggtgccaccatttgcaaagtcgggctttttgtaacggattgttgtaaatttggtacaaaattctattttcgacaaagtatttggccattgtgatcagcagacggacactcagctgtgcttttgccaccttgaccatctcttggcaattgtcaggctgatcagcgcattggttactcacacagtcaacgaccatttgttgtaattcataaattcttgaattgattgaccgaaatatttcaattgtcccgagtcggacaccgatgtaaatcattttgttgcctaaaaagccagcgcggaaaatgctttaaccaatcagtggtattatgcctcaacattaaataaaaaactatggtcaaaaactcgagattgattgaaccgaaacctcaactagtgatgcttgagactgaaggttcccgcaccaagcgactgagaccaaaaaaaactagagactttacacgagtcgagactggagacagactttcgagcatcactaccctcaaacttcggtacggcgatcggcttctctgaaaccaaaccactcttacaatcttagctaccagcccattccattaatccttccattttatggctctttatgcctccgctttaaagcgttttaaccatccgccgccgggggccgtagtaaaa

SEQ ID NO: 40847 - DNA, 764 bp, Heterodera glycines
ttcgctcgcgcacctcgcgctagccgagctttgaaaaaatttattatcttttctctctctctcacctcttttctttctctctctctcacctctctttctttctccctctcctctttttctctctctctctctcttcctcctcttttctatctctctcctcttctctccctcctctttctttctctctctctctcctcttttctatctctctcctcttctctccctcctcttttctctcccttctctcctctctttctttctccctcttctctttttctctcttcctttctctcctcttctctctctatctcctctttctatctctctccttttttctttctctctctctctcctcttctctcctcctcttttctctctctctctctccttttttctttctctctctctctcctctgttctatctctctctctctctctcctcttttctatctctctcccccctctctctcgcttctcttatttttatctctctctctcttatttgtctctgtctcattcactcccatactttctctctcttttttcctgtttctctaatcatttctctctcctttactctccgctctttgttcctaactgtcttcatctctctctcttcttcactctttcttacaatacaacctatctctattatctctgttttttcacttcatttcttccatccaaataaaaacaatcgcgtcaaaactttatttaaattttttgtttactttgtgacacacacggcaaaattaatatataga

SEQ ID NO: 40848 - DNA, 996 bp, Heterodera glycines
  unsure (1)..(996): unsure at all n locations
gatcattttagcgctcataatgggatgtataaagcgatgtagnnaagaatgggaagcgttaaaattgtntgagaagctttttgagcgtaattacgatttttacttacaccattttttgctaggcttagatcacatgcgattttcggcactctgataattttagcgttcataatgggatgtataaaggcgattgtagaaggaattggaagcgctaaaattgtttgagaagctttttgagcgtaattacgatttttacttagaccatttttttctaggcttagatcacatgcgattttcggcactctgataattttagcgctcataatgggatgtataaaggcgattgtagaaggaatggaagcgctaaaattgtttgagaagctttttgagcgtaattacgatttttacttacaccatttttttctaggcttagatcacatgcgattttcggcactctgataattttagcgctcataatgggatgtataaaggcgattgtagaaggaattggaagcgctaaaattgtttgagaagctttttgagagtaattacgatttttacttacaccattttttgctaggcttagatcacatgcgattttcggcactctgataattttagcgctcataatgggatgtataaaggcgattgtagaaggaattggaagcgctaaaattgtttgagaagctttttgagcgtaattacgatttttacttacaccattttttctaggcttagatcacatgcgattttcggcactctgataattttagcgctcataatgggatgtataaaggcgattgtagaaggaattggaagcgctaaaattgtttgagaagctttttgagcgtaattacgatttttacttagaccattttttgctaggcttagatcacatgcgattttcggcactctgataattttagcgttcataatgggatgtataaaggcgattgtagaaggaattggaagcgctaaaattgttgagaagctttt

SEQ ID NO: 40849 - DNA, 885 bp, Heterodera glycines
aaaaaaaattttttttttttttttgccataaaactcaccccgctagttatgtcaactaaatcaaataattttggcccctaaagcacacagttgaagaataaattggtttaaatgaagaatgccaaaatgggatcgaaaaaaaaaatcagaatttttaaggcaaccagaaatttttttttttttttgcgatttcgtttttaccgtgtttccgtttgtcgggtcccgttcatgcagcaagctgggcgacttttccagcagcacacgaattgcactgtaattttgaattttgatacgataatatacaaaaaggaaaattgtaaaaaacgaacccaaaagagaggtaattaaaaaaattgaccattctatacaatatacctaaaaggagcaagcgaaaatcgaattacttaagcaaaaaatgcatgaaacgatagaaatagttcaagggatttcgaacattttaagagcgttcaatattaatagacttattttggagtcataaaagaaataatttccgcaaaaatttcggtacttttcaagtttacctgatacttttaacatacatttttaaatgcctataaatgtattcgttttacattgatttcttaagcatggaattaagaacacaaaaaaagatatggaacacacagaagcttattgaattcgtatgtggaagaatttttgtggcgaaagcgattccaaggccacgatgttttttatcacttttggtctcaagttgcatctatttataaaatttcgtgaacaaatattataattctgtttttaattatgttgaaatgcttaaaaatcaatgtaaaatgaatacatttataggcatttaaaaaggtatgttaaaagtatcaggtaaactagaaaagaacaaaattt

SEQ ID NO: 40850 - DNA, 1395 bp, Heterodera glycines
gcagcggtgaattgtataatccacattctgtttttgagcgatgcggaaaaaaatggcgagtgttattcccagtcttggggctcaaaaacaaaaaggaaagcaatcttcgttaatcccaattttttgcttaaaagcaacgagaaaaatcggatactgaactcgaatgccttcaaaatttttccaattttatactgcgcacgaattgagggacacaactattcaaaatcaaacaaattcaaacaaactagtttatttttaagtcagaggagaattaatatcaattaaatttagaagagcacagtttaagatgggaaagaaaacatatctatatagaatattatctttgcttttcgtatcacaaattaaacaattgggaactttttattgattgttcttagagggaatgggtaaatataaaataaatcaaatcccttactatatattaagtgaggcgaagctccgcccactttttgcccttttgaatttgcgcctaaattggtgttttgttatgaaggggaaagagaaaaataaaatgaaaaagattatttggatggagagcgtttttggttattagaaaggaaaagaaacacatgttgtttttcttaatggtgtgttatgatgattgtttcgtcatatcgatcccaaatattcccacttctttttgtttcatcattttccatacctattttgttttttgtttttattcataatatatgtttaatgtaaagccttatttttttattccattcaatttcattttttcgtgatatctattctgtatattttttcttttttttctttttcgttaaattacaaaaaaacccattttcaaaagttaaatttgtttattggtcttcaaaaaaatcacaaaatcattctaaagccgtacatctttaaattccgattatagtacttttatcaataaagcttaaaaaaggtcgaaaccttccatttgcgttttttgattgtagcatatattaacataattaaattatatttattttaattaatttaaatattatttattttaatccattttttgtgttttttttattttttagctttttaataaaatcacaaaaagacaaattttcaaatttaagttagtaattagccttctaaaaaatcataaaatcaagctaaagccttacccctttaaattccgataattattaattatatcaattaaaaaataaaaaaaggcttaaactttccatttgcgattttttgattatagcatatgttaacatcataattaaatcggattttcttttaattgttgtttattttttagattcataatggttcgaactaagcaatcctttcctcctgcggaacaatgttcctcatcttcgttacaaaatattaatctatctacttctggaaatccgacgg

SEQ ID NO: 40851 - DNA, 675 bp, Heterodera glycines
cgctacgaaataattttgactcttttggccttttattcgatagaaatgcctttgggggaattacggagattatcccctcctcgcctcgcattaaaatgccctcaagggattattatcttcagcggcacgaaaccttaacggaaaatcatccgaacgaagagaaaaaatgggtcgttacgtttgactcggggatttcctcataatccctcaaaattacaccttttgtacatataatgatgagctttttgagggaaatggcgtaaaggacgaaaaaaacgatttgggatttgttgataaaaacaaaaataaaaaaaagactaatgagtaatttgtgaagcaaaagcttaatggggtgaaaaagtcacacacaaaaaaagggacggaagagaatggaaatgaacggtggcggagggggggggaagagggggaagggggagagagacaagggaagggggaggggaggggacgagagggaatggctgtgttaaaagggacaaatggaagtgaaatgtgagaagaaggcaaaggggaggggatgtggtcttgttcacagcatttcactttattggacagagcaattggagactttaggaaagcaacaaaaaagaaaaagcgaatttcggtaggggcgacagtaaatgttggcaaatggacacacgaaaatggacggggtac

SEQ ID NO: 40852 - DNA, 903 bp, Heterodera glycines
agaaaaacgaaatgaactcaaaaaaagagaaataattgggaaaatattataaaataaaagagaaaattaagcaaaaaggaagaaaatactcaacaaaagaatggaataaaattgaaagaaaaatagcgaagaaattggggacaaatcgaacgaaaatttataaatggatcaaagaattaggacttcaacaacaaatacagaaaagttacaattcaaaaagtgatgaagaaaaaatagaaattgtgcaaaaatttattgaactgacaaaagaatataagcaaaaaagaaaatattcgccaaaagaatggaaacaaaattatgccgaaatttgtaaggaaattggagttagccatttcataattaacaaatggaagaaacaatttggcattcgatatatgagaataacggagaaagaaaaaatggaaaaaatgaaaatttattcgcaaataaaaagagaaaatccaaaaatgagtgataatgcaattgcgaaaactgtgaacacttctcatcagaatatttttaattggaagaagcaatttggagaagaaatgtttcagagaacaacagaagaagaagcgtgaagtgccttgtgcttgcttttcaatttgaaaatatttttttggatatctttttcaattttagtttcagtatttactgaattagtaaccccctagcttctaattcagtaaaaacggtatttgggctgggattttttatgccataaaaatgaccttttttggcattttatattttctttaccattattttaattgaatttaattaataaaaaatattttaatttaaaattattattttttttcatttttaatagcctaaaaacccataaattaaccaaatatttggtcattttttgacaaattctgttaacaaatctcgctcaaa

SEQ ID NO: 40853 - DNA, 1206 bp, Heterodera glycines
tttcaatatcgtaagattgttcgatagggccagacaacatctggcaactcgttggtaccaattttgccgtaaaaaaatgagaaaaaagatgtttgatagggccagacaagagaaggcaactgttggtaccaagtttgcggtaaaaaaatgagaaaaaagagatagctattttttggtcaagaattttttttgtttgcgtttcaaatatcgtaagattgtttgatagggccagacaagagaaggcaactgttggtaccaagtttgcggtaaaaaaatgaaaaaaaagagatagccattttttggtcaagaattttttttgtttgcgtttcaaatatcgtaagattgtttgatagggccagacaagagaaggcaactgttggtaccaagtttgcagtaaaaaaatgacaaaaaagagatagccattttttggtcaagaattttttttgtttgcgtttcaaatatcgtaagattgtttgatagggccagacaagaaaaggcaactgttggtaccaagtttgcggtaaaaaaatgagaaaaaagagatagctattttttggtcaagaattttttttgtttgcgtttcaaatatcgtaagattgtttgatagggccagacaagagaaggcaactgttggtaccaagtttgcggtaaaaaaatgagaaaaaagagatagccattttttggtcaagaattttttttgtttgcgtttcaaatatcgtaagattgttcgatagggccagacaagagaaggcaactgttggtaccaattttgccgtaaaaaaatgagaaaaaagatgtttgatatttttagacaagagaaggcaactgttggtaccaagtttgcggtaaaaaaatgagaaagagatagctattttttggtcaagaattttttttgtttgcgtttcaaatatcgtaagattgtttgatagggccagacaagagaaggcaactgttggtaccaagtttgcggaaaaaaatgagaaaaaagagatagccattttttggtcaagaattttttttgtttgcgtttccaatatcgaaagattgtttgatagggccagaacagagaaggtactgttggtaccaattttgcggaaaaaaatgaaaaagagaaaagccattttttggtcaagaattttttttgtttgcgttcaaatatcgaaagattgtttgaaagggcccgaaaaaaaaagcaactgttggtac

SEQ ID NO: 40854 - DNA, 322 bp, Heterodera glycines
ataaaatcaaactaggaaagtgaaaatttttttaccttcttttgttactatgtaccaaaggtgaaaggccaaaaacttttctctgttttttaccgcaaattcgtaattatcataattttttttgttttaatttagttgcttctgttcgcattgtgaaggtgttcggcataattgtggctttttgtctttgcaatgccatcgattcggaagaggcgaccaattgacaaacaagaacaaaaacagaaaaagtatctgtgctcattcattttatgttgccttattgacattagttcgttctttgctttttgtctaaatttttaca

SEQ ID NO: 40855 - DNA, 848 bp, Heterodera glycines
  unsure (1)..(848): unsure at all n locations
ctgtaaataattgagcattaaaatttatttttntaaattaaattnttgtcaaatttntcatntgaattgtggcacataaagcacagccaagcagatttgaaccccagaccctcgcctcatttggactacactaagggatcaataattaaatttcaaaaactatccacggattgagtcagttcaaaaaaaggaaatatatgtaggcaatgatgagaacaagaacggcacgataaacggatcacctaatccgattttatgcatacgggtacaacagatatgcaatggaatacaacagtttgtaaagaaatatttaatccaattatcatatatccatccatccataacatcattccatcgcattcacgggatattttttgaacagcgaatttttgaagaaaatctcgaagacggacgaacatgcaatgacaatgcttagcactagggttgagcggtaccggtaccggtactggccggtaattaccggtttttttggtaccggtaccggtaccggttttttcaaaaatgaaattaccgttaccggtttgtctagtaccggtaccgccggtaaaaatttgcactggtaagaatgggggtctggtcgagaaaagagtaggaaattggtgaagaaggagaaatttttgagaaaaaattaaattttatttcatttagtcatgggattacacacatgcacatgtggtgtagtggttaaactttctacctttcataatttttcgcctgggttcaattccccacttggatagaatattcctcacattttctttaccattattttaattaaaattttaattttaaaaaatattccaacttttttctttcatgttaagcat

SEQ ID NO: 40856 - DNA, 1200 bp, Heterodera glycines
  unsure (1)..(1200): unsure at all n locations
tcgctaatcacgaatatgaccttagttttggcaaattccgaatcccgaactcggacaaaagtcgaagattcaaaattgatttttatgtgtgagaattttgaatttcgacttttgttctagttcgggtccgggattcgaaattagtcaaaattaatgtcagatttgtgattagcacccaggaaaacccaacataaatatgttttaaagacttttagaaaagaaaacatttaatttatttttcaccgggacaccaattattcagtatcaccaaaatatggatgaaatccattttttttaagtcgtgaatttcatgtcagttttatcattagccatttttatcaacgattattcacaatgaattaattaaatgtacatacacataaaatacaatggaaatggacgaatttacggtaagcaagcaaaggtcaactacaatacaaataaattagctaactaactatacacaatacaatattgttggaatggcatagtgccagcaaccatcatttgggccacataaaacgcatcaatcaaccatcaattaattaattaattcatttctgctgcttcattgttgctgaccacttgacccgggagtagcggtgtcgagaagactgaaaaataaagatttaaattgtattttaagctcattcaatttttatggttccaatggcattttatgagtccaaccaattaacaatccttgatttttagtgccacacaatcctgtcaatttcaaagatgctgggacattagacaaaaaaccattaaaaattttgttaacttccaaaaaaggttaatggcctgagaatcccaaaaaaccatgcttttcgagcatttttgatcataacttttttgctcctgtaaaaaagcattgatcattttaattaaattgttgttcacccctcgtcaaatccgccgtctctgatccaaatgtccatccgtttcggtcgagcagcacacaattctttccactcattttcccaattttcccaaacccatccaattggacaacggaggagctcaattcatctgtgtcatattgttccagtgccaattgttcgccagtcgcttcgttgatcagttcaaatggcaaaaacgagccaaccaaagtggnacgaagcgtcaagataatgacngaagtcactcgtgaagaagcatttgaaaatgcctanaaatgngacaaaaaatcatttaaaa

SEQ ID NO: 40857 - DNA, 845 bp, Heterodera glycines
aaattttttcatttcctaggggtttattttttcaaaaaattttagagagatttttaagggagtatttttcttttttattgcatttttgttaacaaaaaattttgggcaaaacgccaaaataggcaattaggttttttcaaaatttttttaggcttttaggctctaaaaatacaagcctagaaaataggcactaataactaacaactatcatgtttttcgtgtgttttaggccactgggagctcaggaaaaaaataggctaaacctaaaaattgcatctctatttataacttatattttggcaggtaaaaacccaacgcgtttttggccaactcgttctttacgtgttatatgtatatgaactgtctaacttcgcgctgtctgcactcctacataaatatatagacaaaaaacgagttgggccaaaaaggagttgcgtgtcgccctttttgcatagtccgtatttatgccatttttggtgttttttagtccatttattttataaccctgattattaggtattattttttgtatattatgcatgcatataacgtattcacagtaaagcaactttatctttaaaagcatacaataggaaaagtggaatacattaaaaaagatagaattcgaaataagaacataataagaacaacaaaaatcccagcccaaaaggtcactctgcacaaatgatcggtcggccaccatatgacgacgattacgatcttttacaagcaatcagacaaaagaaaattgcaaggagcagcacaacaaacgaaacgattgcaatcacgataacatcatagagacgcttatgcgaatagtaatgaccaccataacgatcataaac

SEQ ID NO: 40858 - DNA, 951 bp, Heterodera glycines
gaaccgttttgagtagattagactataaaaaattgaaaattttgaaatcatgtttcccactcctttctcccaggggtattattttgtaaagtctttttttcaaaataaacttttcaaaccccatttttcgcaccgtgaatgttatttttattgaattctgaaccgttttgagtagattagactagaaaaaattgaaaattttgaaatcatgtttcccactcccttctcccaggggtattattttgtaaagtctttttttccccaataaacttgtcaaaccccatttttcgcaccgtgaatgttatttttattgaattctgaaccgttttgagtagattagactagaaaaaattgaaaattttgaaatcatgtttcccactcccttctcccaggggtattattttgtaaagtctttttttccccaataaacttttcaaaccccatttttcgcaccgtgaatgttatttttattgaattctgaaccgttttgagtagattagactagaaaaaattgaaaattttgaaatcatgtttcccactcccttctcccaggggtattattttgtaaagtctttttttccccaataaacttttcaaaccccatttttcgcaccgtgaatgttatttttatcgaattctgaacgttttgagtagattagactagaaaaaattgaaaattttgaaatcatgtttcccactcccttctcccaggggtattattttgtaaagtctttttttccccaataaacttttcaaaccccatttttcgcaccgtgaatgttatttttatcgaattctgaaccgttttgagtagattagactagaaaaaattgaaaattttgaaatcatgtttcccactcccttctcacgaggggtattattttgtaaagtctttttttcaaaataaaaagacaaaccccatttttcgcaccgtgaaatgttatttttatt

SEQ ID NO: 40859 - DNA, 1000 bp, Heterodera glycines
  unsure (1)..(1000): unsure at all n locations
ccctaattcgggatttcaaaaaaccaaaatagacacataaaaatcggctgaaaaaaggaaaatacaccgtctaaaaatcgaatttttgacttcagccccccccccnccccccgaagccaatggtctggctacgcccttggatcggacattttgacagtgaaaatttttaaaatttgtttggttaataattggcaaaatatttgcaatttcgaaaatattaacaaaatatgtatattgtaaatttttatcaactctctttaatttcagcagaatacgcgggtggcacgctttgaaactgatttggcctgtgctgggccagtcgatcaggtgctcagatttatgattgattaactaataaatcaggctgattaggccaaatttgtagcactttcaaaaatacaaaataaagttaaattgacttatttttggctcatataaaattatattttattgatttctagagaaatcccccaaaagcatttttttaatttttcagactttatgtattaaaagagacacccggcggcttttatttggaaggccgttctaatactgaatttttcgaaaaatgcccatcatgcacttctcataatttcaaaagaaatttagggggagagtaaaaattatttatggaaagtggcattttctggaaattctttttttcaacatttcgctttttgcagtttcttgacactgaacaatcagcaacttaatggactacaatttgtcacctcaaccacagtgttgcgtgactgtgccaacctgcgcggcatcgaatttcacagattgccttatctcggcgaaatcatggatgaatttgacagcgacattgagatgatggacggtgaaggaggtggtggtgaacacatttatgtcattgaagacaataatgacgaccaattggcggaggaaattgatcagcaattcattggcattatggccaattttggcgggaacaatgccgggcggggcaattggtgccgcaaagtggattaatgga

SEQ ID NO: 40860 - DNA, 926 bp, Heterodera glycines
  unsure (1)..(926): unsure at all n locations
ttgtacctcttctaatcactgttcttctgtttgcatcactgntgggcctcttctcatcacttttgtatttcttctaatcactgttgtacctcttctattcacagttgtacctcttctaatcactattgtacctcttttaatcatttttgtacctcttctaatcactgttcttcctcttttaatcactgttgtgcctcttctcatcacttttgtacctcttctaatcactgttgtatgttctgatcactgtcgtacctcttccatttacttttgtacctcttttaatcaccgttgtacctcttctaatcaccgttgtacctcttccatttacttttgtacctcttttaatcaccgttgtacctcttctaatcaccgttgtacctcttttgaccaatgttgtacctcttctaatcacttttgtatctgttctaaaatttaaaaaacggccgcgaagcggccgaaaagaacaacaaaaattagaaacgggcgtgaagcgcccgtctgagtcgatcaaaatttaataacggccgcgaagcggccgtcaaagcccaacaaagtttaaaaacgggcgcgaagcgtccgtccaaggccaacaaaatttgaaaaacgggcgcgaagcgcccgtccaaggccaacaaaaattgaaaaacgggcgcgaagcgcctaacaagctaaaaaacgggcgctaagcgcccgtataagttcaacagatttaaaaaacgggcgcgaagcgcccgtccaaggccaacaaaaattgaaaaacgggcgcgaagcgcctaacaagctaaaaaacgggcgctaagcgcccgtgtaagttcaacagatttaaaaaacgggcgcgaagcgcccgtcttgagcctcgatgtggactaaaagcctctaataattttttaaaaattcaaaaaaatctctccaaccaattcgat

SEQ ID NO: 40861 - DNA, 1005 bp, Heterodera glycines
  unsure (1)..(1005): unsure at all n locations
accccgatgctaatccgttccgcagagcttcttcaaaatttttccattaccgcaagatttgcggaaatgntgaataattctcagaaaaatggctatctctttttaggacaattttctatctcgtaaccccgatgctaatccgttccgcagagcctcttcaaaattttttccattaccgcaagagctgcggaaattgtgaattaattctcagaaaaatggctatctctttttaggacaattttctatctcgtaaccccgatgctaatccgttccgcagagcctcttcaaaattttttccattaccgcaagagttgcggaaattgtgaattaattctcagaaaaatggctatctctttttaggacaattttctatctcgtaaccccgatgctaatccgttccgcagagcctcttcaaaattttttccattaccgcaagatttgcggaaattgtgaattaattctcagaaaaatggctatctctttttaggacaattttctatctcgtaaccccgatgctaatccgttccgcagagcctcttcaaaattttttccattaccgcaagagctgcggaaattgtgaattaattctcagaaaaatggctatctctttttaggacaattttctatctcgtaaccccgatgctaatccgttccacagagcctcttcaaaattttttccattaccgcaagagctgcggaaattgtgaattaattctcagaaaaatggctatctctttttaggacaattttctatctcgtaaccccgatgctaatccgttccgcagagcctcttcaaaattttttccattaccgcaagagctgcggaaattgtgaattaattctcagaaaaatggctatctctttttaggacaattttctatctcgtaaccccgatgctaatccgttccgcagagcctcttcaaaatttttccattaccgcaagagttgcggaaattgtgaattaattctcagaaaaatggctatctctttttaggacaattttct

SEQ ID NO: 40862 - DNA, 950 bp, Heterodera glycines
  unsure (1)..(950): unsure at all n locations
tgacataaaaattattagaaaaaaaaattcaggggggtgctaaaaccncggaagtaccaaaattttaacgttgaaatgctatttttgagcccctttcttcatagcatatgcgcagaaaaatatgttaatccacataatttataaccctacttattacattaggagtctaaaattgactcgctgtatttaggagtcaaaaacagaacattttgcaaaattatgttatttacaatttattcaatcaaagtgttatcaatagggactcaatttttaggcaaatgcctaaaatttttgcgcacttaatacgcacagataagcacaaaaaacgcattttccacttggtttgcggtgcggtgtctacgatgacttttataatgctatttttgcctatttcggggtttttgtgcctaatgtgcctattttagactttttgaaaaaatccttaacaaaaatgcaataaaaacggaaaacacaccccctaagaaatgacccgaaaaatttttcaaaaaatacacctctaagaattgaaaaattttcacaaaaattgatccacaaaaatttaatatttttttcttaataaaaatttttggtttaaaattttgttctttttgataaaaactttaaaatatttaataatttcatttataattgaaaatttttatattttttgctacctaataagcgttaataaaaaattttatttgcctatttgaggatttttgtgcctattttatgcctattttgctattttttctaaatttttaggtgcctatttcgcgattttttgggcctaaaaaacgaatccctagttatcaaatattatattcttccggtaggggagggttcattgccgctgtttcattttgccagcggtttcattgccagtatgtttaagcaggtatctaatttgttttttgtcaacttttatggctactgaatcctaacaaagc

SEQ ID NO: 40863 - DNA, 1055 bp, Heterodera glycines
  unsure (1)..(1055): unsure at all n locations
acaaattatgtatatttatatatacaataggcatggatttntgatgcaaaaaaataaaaaataaataattnntaaacagcaaaatatttttatatattgncgcatagttactgtttttccacgcccaagtacaaatgaacgtttcaatttaaatatgcgattgttttcaaattttgttataaaatgccgtacctatcaatatgagaggcccgacatgaaatatggtctaccatctcctcaatataaacacgtatgcatatactacagtatgattagtaaatagcctttttaatgagatccctaaaatggccggtatgaactttatagctttttttgacaaatcccagccataattaatcatttttaaaataccaatcctctaatacaatagtcaaaattccggccctgatgaagtgattttcaaaaaaaacacaaagaaatttattcaactttaatccatcaccatgctaggtgatcgtgaccggtgcagaggaacacggactgcccaccaactacattcagtggttgcgcgaaaattttgaggacaatggctatgacgggcctgtggaagtgaatctgaaggcacttgagacaatgccgaggccgactaagaaaagaaagctaagccacaaaaaagaaggggaagctgaaagctcgaacatggcgctgaacaactgatggatgagtgagtgagtagccgtggagttggctttgtgttgatcagcaaagaaatacagaaaattagcaaccaaattaatcagcagaatgacaaaatattttttatttttttgcaattattagataaattttcaatttttagcaataattctaaaaagcaatatattttttttgtgtgttaatttctaatcccgctaaaggattgggattcaaattttagcggaacgggattttgtgtgattaatcacaaaaaatgagggattgcggactggggatcgagcgaaacccgcttttaaaatatattttctaatctttcatttagttttttatattaatctatcatgaactataataaaaaaagaaatatttattataac

SEQ ID NO: 40864 - DNA, 925 bp, Heterodera glycines
cattcttaccagtgcttgtttttcccggttcccggttgccctaccgggaccggaacctgagcttttcaaaatccgggaccgggaaccgggacctcggatgaccgggaattcccggtcccggtcccgtggcactctagtcaatactcaaatcatttaaaaaaaattaggtactattttgcgttttgtttttttttgaatttctgaaagatacgttgcttcgattatatttacacgggccctatacccggttgaaccgggcctgccgctagacccagtcgggcaccctggcccatgaaccctaatatatggactaaggacgactgcatttgcttttagagattgttttatgcgattttatattttttgttctaggttctggatcattattaatgggtatattctatttattcttggtttcgtttttcgcattgatttgcagcgacatcatttgcactggttagttaattattctcccccgtttatttgaacgacaccaaactcgttttgggtaaactcgtttttgcccaactcgttttttactttttttttttgtttgtgaattggtcatgtgttttatttgttactaaaattttagaaaatcctcatattactcagaatccctgccataaatgacgataaggtcagaataccgaaaaaggatttaatccagaaatgaaatcctaaattgagttcaaaatacggtcccgaaatcaccgatacctttttttactaacagattttgtaaatggacatgaattttgcttaaaactcaaaccgacttaagttgatgcaaatcgtgtccttttgcgagacgtcacttcgctgacacttcagcgtggccaatacacttccgggccgccgttcgtcgcccgttgcgcagttggaatgtgtcgaaggacagcctatgggaagtgagtgaagcgaa

SEQ ID NO: 40865 - DNA, 842 bp, Heterodera glycines
tatgctccgaacaattaaaaaccaaagaaattcataattttgaccaaaaaaaatttttcgacattttgtcaaacctgtcggcactttgtcccacccaccccgaacattgttagacctctccaaacattgtccaaacaaaacaaaaaccccattttccctgctccccgcactcatttccccacaaagcccgcacaccctgaaaaattctatcttttttaaaaagttttccggacaaaaggtctactcaaccttgggctagggacccaattttttttttaaaataaccgccttaaaattctctacaactctgtctccgatgtccctatttgccaaagcaaaacaaaaaccactaatagcaaaaaagtgaaaaatggacaaaaatttaaaattttgacattttgtccgattcgtaactctgcgaatccggaaccaaaccggccaaatttttttttaaaatgtccgcaattaaattccctacaacagtttgtctgatgtcccgaattttcccggcaaaccggaagccgctatgggcgaaaaaccgggcgccagcccaaaaaaaaccgatttttcgaccaattttccggacaaatgaccaacttaccctgaggctagggagccaaatttttttttaaattgttcctctcgccgagctctatccaatggcgcattagcgccggacttcccgattcgttaaccccatgcttcctccggcgctaactttctgagaccccgacccaccccaggggctaaagggggtccgccccttcaacttagtgctggcgcgccaattttttttttaaaagatgcgccatcgttaggagcatcttttattgctcttcacc

SEQ ID NO: 40866 - DNA, 1688 bp, Heterodera glycines
  unsure (1)..(1688): unsure at all n locations
taatcggggttaagattattggactggagtcccggcttttggctccgttcgcgctccatcgtcaattcccgaaaattctggcctctctctcttctttacacccattttttgcctcattttcttgagaaatcgtaaagggaggaaccgacaatgccgacatgcaccacataatgggaaattaaaaagttttcttcaatttcttacaatgactcgaaaccgatcgaatttttgcctcatttttcttttttttttgtttacaaaaatcagaattatttttattttcggtaatttatgtaaatgattttttccatttatttttttattcgttttcattgcatttttttttgcttattcaacaaaaactgctaaatttgcgttcgtttttcccatttcttttcattgatcggcaaaataatttttttataactttaaattaatctttttattctttgaagagtacggctctgctggtctctttctatggcaatttaatctcttttttcgtacttttaaatttgtcctatggtaaattgtcgcattgcctaccgtaagaaattcttttaatttttttgttttttttaaatttttccttaaattttaaaagtttttatctgacgaatatcattgacggagtgcaagagataaaaatttgcgcatctgaacagtgcccaacgggacggataaagccaagaaaaaggcctatgattggatttcggcttccacaaaacggcggaaattgtgacggagggtgggaattttcaaaacaaaacataaaattgttaaattaaaacatttttgaatacctgttgagacttaaactttattcatattaatatatctgtctaattaattaattatatcaattaattcaatgaattaaatccaatccgattacaagcgaatgcgcagtataaaagaccaatgatgatcatagaaatagctcaactcattggtgtggcataaactgcgcacagtgcaaatgccaacaaacaacagcacagtttttggcaccattatgctggtgccatcaattgttccgcttcattagcttaggataaaattaatttattaaaataattgtcataaattaaataattattgcctatcgaattattggggaaaatcaacgtcaattttcaattgtctttgatggaaaaataattggcgtgcgttttagctattttgactaaatatgatggaactattaaattaacaaaattattatttaaattttcagaaagttttttttgcttcctgtttatgagagcgccatgcaaagagcctttttatgtcatcttcgtcaaaatggggatatatttttaaaagattatgccgaactttggctgctcgagtttgacatggtgcggataatgaaacagcagggggagataaagctgttagtcagtcgcagctgcaactgcaccatggaagaattggtaatgcaatctttgactaattggacgtgctttggcatgactaatggcaattttccaaacaaaatgatatttgtttgtttttatgtatttaaagctgcatgtatttaaagctgcattctgtaaggaagaagagctagctgctgctggacggtcggttaaatcgcggaaagcgcggggtatccaaaagctagaagctntanataagattggactttcanaaaatttgtccaattcttanaaacagacaaatct

SEQ ID NO: 40867 - DNA, 962 bp, Heterodera glycines
  unsure (1)..(962): unsure at all n locations
tatgagcgctaaattatcagagtgcngaaaatcgcatgtgatctaagcctagaaaaaaatggtgtaagtaaaatcgtaattacgctcaaaaagctcctcaaacaattttagcgcttccaattccttctacaatcgcctttatacatcccattatgagcgctaaaattatcagagtgccgaaaatcgcatgtgatctaagcctagcaaaaaatggtgtaagtaaaaatcgtaattacgctcaaaaagctcctcaaacaattttagcgcttccaattccttctacaatcgcctttatacatcccattatgagcgctaaaattatcagagtgccgaaaatcgcatgtgatctaagcctagaaaaaaatggtgtaagtaaaatcgtaattacgctcaaaaagcttttcaaacaattttagcgcttccaattccttctacaatcgcctttatacatcccattatgagcgctaaaattatcagagtgccgaaaatcgcatgtgatctaagcctagaaaaaaatggtgtaagtaaaatcgtaattacgctcaaaaagctcctcaaacaattttagcgcttccaattccttctacaatcgcctttatacatcccattatgagcgctaaaattatcagagtgccgaaaatcgcatgtgatctaagcctagcaaaaaatggtgtaagtaaaaatcgtaattacgctcaaaaagctcctcaaacaattttagcgcttccaattccttctacaatcgcctttatacatcccattatgagcgctaaaattatcagagtgccgaaaatcgcatgtgatctaagcctagaaaaaaatggtgtaagtaaaatcgtaattacgctcaaaaagcttttcaaacaattttagcgcttccaattccttctacaatcgcctttatacatcccatttatgagcgcagaaaattatcagagtgccgaaaatcgcatgtgatctaa

SEQ ID NO: 40868 - DNA, 681 bp, Heterodera glycines
  unsure (1)..(681): unsure at all n locations
ttctcaaaataagagatagtcatttttctnggatataagataaatttaaaaattctctgtgaaattaaatggcgattgcgcaccgcacttcctatcatgctcgagagcatttgtaacgtataaaatttctcaaaataagagatagtcatttttcttggatataagataaatttaaaaattctctgtgaaattaaatggcgattgcgcaccgcacttcctatcatgctcgagagcatttgtaacgtataaaatttctcaaaataagagatagtcatttttcttggatataagataaatttaaaaattctgagaaattaaatggcgattgcgcaccgccctccctctcacgctcgagcgcttttgtaacgtataaaatttctcaaaataagagatagtcatttttcttggatataagataaatttaaaaattctctgtgaaattaaatggcgattgcgcaccgcacttcctatcatgctcgagagcatttgtaacgtataaaatttctcaaaataagagatagtcatttttcttggatataagataaatttaaaaattctctgagaaattaaatggcgattgcgcaccgccctccctatcatgctcgagagcttttgtaacgtataaaatttctcaaaataagagatagtcatttttcttggatataagataaatttaaaaat

SEQ ID NO: 40869 - DNA, 1223 bp, Heterodera glycines
ctttttccataaactttttgggaaccgcgggggtccggtggcgccggtaggcgccgccgggaaaatttttgaaaatttcaatgcaatttgttaacagattttcaccaaaattaccaattttttagtttttgagccaattttttatgaaaaaataagttttgggggcccgacggtgcagataaatagaaattttgaccatttttaacagatcttcactgaaattttggggcattttacactcacgaaatgaattaaaatgtaatttttacgcttcaataacaaatgatatgtataattcaaaaattttttttgtttgcctaattgtaattttacaactgttaacatgtgttttttgtcaaaattgtaaaagtgtctgaattaatttttaatacactcctaaaaatggaaaaatttacaaaaatttatttagtaaaattaatatttcttgactaccaatttcactttcagtttgtcatctttctcatttttgaaaaaaaaaaatcataaaaactcatgtaaaaacattttttctggcgttttcagggtcgtagaacagaatacggcattcatccgattcaattccgtaccactggacccgaattcgaacaatgagttaaaaatttattttttctaaattcatactaattgttttgggagaattaaattttgagcatttgtttattgtttattgtcaataaagaaaaagtccacaaaagggaaaaatccgcttacattgaggacaaaacattaatttaaaaaatgtcctcaagaaagcgcaaaacaattaaaacgagatcaccgccaaaaaatatatatataatgtgaatcaaataaataaataaaaagtcaaatattgaccaaatcacttttagttttaatgaattaaaaattcgactttaattttttcccggtctattttacaggaatagagatagttttaattttatttttaaattgatttaatgagtttatttcaatgagccttttatcgagttggttccaaattttagttacccgcctgcaaaaggtatagattttttgcctaatttatatttcgagttaagtctataaaagggaatgttaaagcgttcagaaggttgaatatttcaaagggattcagatctgttcggccataaattattttatgagccatgaacagatcagacagctttcgcctgctttcaagtgtcggcagttgcaggtattctaatctttgttggtat

SEQ ID NO: 40870 - DNA, 1161 bp, Heterodera glycines
  unsure (1)..(1161): unsure at all n locations
tggttaagatgcacattattttcatttttttggttttacttatcncaacctttattttgtttcggatataaaaattagttatgctacaatataatntaagaaataaatttaatgtaatttgcaagatcctttataagtataataatttgttcatttaatgaacttacttgttatattagatttatatattattttaatttaaagacataataatctaaaattttgagttttatgtttttgttatttcactgctcccacttgtaaatgcggaaatttaacaaaaaattgtgaataattgtttgcataattctaaaatacattttaattaaaatatgtgttaatttgtttattaagaatcttcgattgcattaattatttaataatttatcgttatgtaagctcagaaataattgccgatctcggatggcatcgcctattcttgaaatatctcgcgggaagctctgttttcgataaattcgaataggctggcatttatccacgttttgcaaatttttgtgttaaatgctattttacctttgtaaataaaattacaattattaataacaaaatttaattttaaaaataatatttaataaattctcaaattattgtttaattttttagatcccagtacttggaattgtaaaaaataggttgtattttttcgttcgttatttcttttaattttttaattattattaatttttaatttatattttcctcagctttagtttaattctttattttattcgttttaattcctgtaccagtttttcaataaaaaaaatcaaattgtatcctgacatttattttttaatttaatttaatgtgcatgttcctatttcacaggttccattttttgttgtttcttacttttaagtcaaatgataatatatgaatatattttattttatatctatttacaacattctaatttatccagtaactggaatttagatttttctttaaaaaacggcacatagtaaatggttaaaaaaagaatttaaatttcaaattaatttattaagttgcattttaattttctagttggctttggaatagtttttanattatacgttgtttatttattaaacaatattctacatatttattatataatattttatcattttataaatgataatggagaaaattttgaac

SEQ ID NO: 40871 - DNA, 1093 bp, Heterodera glycines
tctagagtccaaaaatgggccaaataatggaccaaaatatggataaaaaatgccaaaatatatattgtaaacccccaaaaatcccaaaaaaggtgtgcatatttaatatttgcttaaataaacctaaaaagtacaataaacaaccaaaaaatggggtttaaaacttaaaaatgcatatttttttattgttgttcgttgtatcaaaaacacctccaagtttgccaaatttcgaaaaaattctcattaaaaaaaagaaatgttcgcaaaaaaatgacgaaaatatttattgaaaatgccaaaatgacgacgaaaactcaaatttttcgtgttttgtggggtgtaatttttaaaaatttccaaaaagttgatctttaggggtgtatttttcgtttttttttcatttttcttttgaaaatttccaaaaaatggccaaaatatggactaaaaatccaaaaatggcgaaatatggatttattcccgaaaacccccaaaatatggatttatatggactaaaaaccttcaccaaatcaaaaaattttaacgcagaaatgctatttttaagcccctttcttcatagcatatgcgcagaaaaaatatgttaatccatataatttacaaccctagctataactcgtttcattcccaactaaactgaacaaatagtactaggcttttctctgcacagtggggcgtacccatagtgccgaagtgcataaatagtgaccgttcctttcatattttgattctctccccattcattcgcaatttgccttttctcttcattcactctctttcctcagacttttattattttattattgtcaataaatatttgtgttctttggacacaaatttgttgacagattttaccaaaaatatccaagtttgcgtcaaataaaaaaaccgtggaaacatttttctgcttaggttttcagggtttctgaccacgaattaacaccaattgaccaattcataatctctaaaccgaacccagaaaacaaatttttcgagtttcggattttgttcaaatttaggttaagaattaagaatctgttgaaaaggaggtaatccttcggaattgatgtcccgacgg

SEQ ID NO: 40872 - DNA, 1008 bp, Heterodera glycines
  unsure (1)..(1008): unsure at all n locations
agttgcttttaatattaaaaattagcgaattatcttatccaaatttaccactattaatattgatgcatccaccgtggggttgttctatacggcttgtatgcgtctttaattataacattcctcgtatgaacacctgtgaactctgctttgacattctttcgtcaaactttgtcagttgcttttaatattaaaaattagcgaattatcttattcaaatttaccactattaataccgaggcatccaccgtgggtctgttctatacggcttgtatgcgtctctaattataacattcctcgtatgaacacctgtgaactctgctttgacattctttcgtcaaactttgtcagttgcttttaatattaaaaattagcgaattatcttatccaaatttaccactattaatactgaggcatccaccgtgggttgttctatacggcttgtatgcgtctctaattataacattcctcgtatgaacacctgtgaactctgctttgacattctttcgtcaaactttgtcagttgcttttaatattaaaaattagcgaattatcttatccaaatttaccactattaataccgaggaatccaccgtgggttgttctatacggcttgtatgcgtctctaattataacattcctcgtatgaacacctgtgaactctgctttgacattctttcgtcaaactttgtcagttgcttttaatattaaaaattagcgaattatcttatccaaatttaccactattaataccgaggaatccaccgtgggttgttctatacggcttgtatgcgtctctaattataacattcctcgtatgaacacctgtgaactctgctttgacattctttcgtcaaactttgtcagttgcttttaatattaaaaattagcgaattatcttatccaaatttaccactattaataccgaggaatcacccgtgnngtgtctatacagcttgtatgcgtctctaattataacatccctcgtatgaacacctgtgaactctgctt

SEQ ID NO: 40873 - DNA, 475 bp, Heterodera glycines
  unsure (1)..(475): unsure at all n locations
cgagaattgctgaaaaaattaactggaaggatgggcctccttagaacgatcccttncggtattacaaattaaaaaaaactacgtgtttcggcccttccatagacacaccaaacaagaaagctcacagcaataaataaataaattcgaatcgaagattcatcccccgtgtgttgtgaacttcatattttcttaatctatctgttgcaattctgtctttgctttttaagacattaatgagccttcaagaaattttttgatgaatggaaaaagtcttgagttatttttgtgttaatgagttgattcatagagctgttgattggccttcaacaagcaataaaataacataattatagctttctcaacttatgcattgctttttgctccttatttatgcttcctatttgttagttatttatttattgctgtgagctttcatgtttggttgtctatggaagggccgaaacacttagttttt

SEQ ID NO: 40874 - DNA, 958 bp, Heterodera glycines
ggcttaccaaaacttcatcgaacctggctctttctattctctttcaaatcgccccaaattttttttacagcttaactaggccctattaagcttatttccagaaaatctcgcatgaattctcatttttaaattttttatagatttttaaatgtttggatttttttggcttaccaaaacttcatcgaacctggttctttctattctctttcaaatcgccccaaattttttttacagcttaactaggccctattaagcttatttccagaaaatctcgcatgaattctcatttttaaattttttatagatttttaaatgtttggattttttttggcttaccaaaacttcatcgaacctggttctttctattctctttcaaatcgccccaaattttttttacagcttaactaggcgatattaagcttatttccagaaaatctcgcatgaattctcatttttaaattttttatagatttttaaatgtttggattttttttggcttaccaaaacttcatcgaacctggttctttctattctcttttaaatcgccccaaattttttttacagcttaactaggccctattaagcttatttccaaaaaatctcgcatgaattctaatttttaaattttttatagatttttaaatgtttggatttttttttggcttaccaaaacttcatcgaacctggctatttctattctcattcaaatcgccccaaattttttttacagcttaactaggccctattaagcttatttccagaaaatctcgcatgaattctcattttaaaaattttttaattgctttttaaatatgccaaaaaatgtaggcttaccttttttagtgaaaattcgatcactcatattttttgctaattgagcagaagcctaccaaacttcgcagggatactccccggtaaaggaggtaacttacactgaaatgagcgccgagctagctgg

SEQ ID NO: 40875 - DNA, 445 bp, Heterodera glycines
tttgtagtgttccgatacgtatccctgcaaaatttgcgttagcccctgatcaattacaaattatttatggacgatcaaatttttagaaatttttatttatttttgcataattaattcataaatatttttttcagaaaatgctctgaaacgcaccaaattttatttacatgctagtttaggcactctgatgctttttctatcaaaaagggagatgaataaatttttaaaaatttttaattcctttttaaacaggccaaaaagtttaggcttaacttttttttcagaaacttatcagaagcgccccaaactttgcagggatactgaaaggaaaagaattaacctgttttatcacattagcttgtcatcagtttttataaaaaattttcaaaattctgagtctcctattattttatttttttttcaaaattctgaagggcgggggggg

SEQ ID NO: 40876 - DNA, 1189 bp, Heterodera glycines
ttctttcatccacaagctctcttatttttcagcaaaggggtcacaattgccatagacgaagacgtcataatatttttccctccatccctccggaagaatgatcgtcgggtagccctgccgtttgaggatcaaattgaccaacaaacggcagagccgcccgttcccgtcgaccgcaggatggatgatgcactatgaaaattaacaaataaaaatatatatttggcaatcggacagaatggatgataataaattttagctcacaatcagattattttataaagaatcgtcaaatgttgatttttaacttgggtattatttttcattggttttactaatttttaaaataactgaaatattattctaagcctattagtagggttcaaaattgtatgcactaaaaaaatgccaaatacgcgcataaaatatgcactaaaaaccccaattaataatttagaattgactttaaaataccaaaacaattgctaaggagtgtttagagaattgaaaaaaaattttttgtttttcaaaatttttatatgcaatttcgaatttttaatgtttttattaggtataggctaaacaaaatgcattatttccaaaaagtctatccttagtgctgtacttttgggacccacgcgtttgggcgccagcatgtttttccactataacttttttctttgtcatcaaatccaacattgttgatatcattcaaaagctcttaacatgctctatagccttaccaaaagcgaaaagattttcaacctggaaaaaattttattaagaaaaaagttcaaaaatttcgacttttcgcaatcgtgaatcaatagcttagaaaaagcttctaaagatgtattaagctttcgaatgatatcaacaaattgtttttgaaggtttttgctaggattggtcacgagcggtcacagcactttttgtcgcatttaaaaaaaaataaatcagttaaaaataaatgcgggatgaattattttgaaaaaattcaaaaataagaaaaaatgtaaatacctatcgaaagattacgaagaggaaaagcttctactctaaatttctaagcaagaaaattataagcccatttgattaaaaatcatagtttttataaaatttaactcatattaaaaaagcgaaatatggattttccattcaaatataatttttttttttaaattatttttgg

SEQ ID NO: 40877 - DNA, 1413 bp, Heterodera glycines
  unsure (1)..(1413): unsure at all n locations
ttcctattagagttcgactaaacaattaattgataatatatcaggaatatatttnaggcaaaattattttaaatttaatatattaataattttatgtgctagaaatttatttatattattaggctttttaataattttgatgaaataattatataatcaaattacgatttttttgtattaatttaaaattaaaaatatcttaagagtgtaaacatgaaacaaaattttcgatctacatgtagattgattatttgtattaattctagttttaaaatgtaaatgcaattttgattttttaattttttttttcattggaaaaatcatttttgaaggagggttttcttttaaaaatgttcgatcgtttcttaatatggatattttcgtatttattgaattcttctcaaagaattttgggagaaagccaatgcgtgttctgcactagaatcaaaacaaacataaaactcgaaaagtagcttaacaagcatatctatttcatcaaacgaagggaggtttaggaaaatcaaatgaccaaaattcaatcaaaattcttgacaaaaagcaaattttaaagtggaaaagagcaaatcaaaaaaatgaaaaaatgaatttgaatatgataaatttattaaattttcatttttaattgcacccctttcagtgccgttgagttgagtgcattcatagtaagaaagtgatcaacagggctgcaaaaaacatgcaaatatcggtacttttatttgcatattttgggtttttatgcatatttcatgtatattttgccatttttcgtcaaatattttccgatttgaatatctcttttgattatgcctaaaattaaatccaaatttgaatggatgcgcgagtgggtcaacagtgagcttcactgccgaaaagcttgagaaatttttgatttgcaattacaaaaacaaccgataaaatttatgaggaataaaattttttaattaatttgtacccctaattttcaagtttttttgtgcatatttggcaattttatttgcatatttaggtcatttttcgtgcatattttttgcagccttggtgatcaattttcatttccttctactcttttgccccaaacaaaggtcattattcatttatttgtttacctcccatttgtcctttcgtcgtccgcttttgcttcagtttctgtttcttttgttgcttcatctgctggttgtgctgttgttctttgattttttctgcaatttcattcataagcttctgagcaattttggaaaaataatttcggtgagagtaattattctaaaaaaattaatataaaataactacttcacatcagcagggtaataacaaagaaataaacgcattgcttanaaatgcccaaaatattcgtcatagtttttgtttgttaattctaatttcattgttttg

SEQ ID NO: 40878 - DNA, 614 bp, Heterodera glycines
caaacgcgccatgcgagcccacgacgcctcccccgtgcaaaccatgcccgcagggaccgcccggccctccaggaccacccgggtcacctggtgaccctggcgaggccggcacacctggacgaccaggaacagacgcatctccaggatctccagggccgcgaggaccacccgggcctcccggcgaacctggaccacaaggaccacctggcgagcccggagtgcccgcgcagagtgaaccgcttgtgccgggagaacccggagagcaaggagaccaaggtaaaatgctactaattgattgggtgatcatggtaatgctgctttgccaacactttaggaccgcccggaccccccggtccgccagggtcccctggcgccgatggcccacccggtccgccaggcccaaagggcgagccggggccggatggactgcccgggcaggacggacaacccgggccctcgggaccacccggacccagtggaacgccgggcgagaaaggcatttgtccaaaatactgtgccatcgacggcggagtgttcttcgaggatggcacgcggcgataaaagaattggcattttggaactcaccgtcaaaccactaaaaatgggcaactttt

SEQ ID NO: 40879 - DNA, 1189 bp, Heterodera glycines
acaagtaaaagttgcacacatcgaccgccgtccatagacaacaaagtgccaacagccatttgaaagtgatgtgcttgccccgggctttgtacctgcgaacgacacgaaatgccaaaagaaaattaaaatgaaatcaccaaaagggaaaaataacaccgcacaagcggtcgaggccaatggcaatttgaagcgcaacggtaacagcggagccaatgatgggaagaagctgaatggagaggcaaaagcggagggaaaggtagttgaagccgaagaggaagatgaagaatttgaaggtgaagccgagcagcaggaaggaggcggagaaggcgtaaagagcgatcagaacattgcaatgggaatggagtgatctgagggagggaaaaggaaaggaactcggcgccgacgggactcgaacacgcggccaaccaaaccgaccgcgcaattacgcattattttctcccgtaatttttgtcaacaaatgggaagcttatttcgattattttctgacaaacttctcctaataattgccattaaaatgtcaattttctccggcggcctctcgccacccccggacatccccccacacataattaaatgcaaaacgtgctattaaaaccaataatatgggacgccgagactccgatccgatccgaaacttattgtgcctcgggattccaatttcctaaaatttttgggtgacgcatttactgatttaccatatttgtgtccaaaaaaatcgacaaacaaaaaattaaaacatgaaatgatacggattagagaaattatggcatttttggagccctgtaattatggattacggagttctatatctacgtccagccctgttttataaacgacagactgatcaactctggtcgatctgatcttgatcaatcctttacaaacggtcttgacgaatgcttcctcatcagtcttggtcatctttctcccgatcagggctgggcgtaactggttttcaattacggaaatccgtaatccgtaattacggcgattttctccattacggaatcccgtaatccgtcatgacgggggtcaaaaaccccgtaattttccgtaatccttaccccgaatccgtaattttcaaattttaattttttttaaatatttttcaatttttattttaaaattcaataattttttagcaatttaaaagcatattaaaaagatt

SEQ ID NO: 40880 - DNA, 1040 bp, Heterodera glycines
ctttttagaaattccaaatgcgagtaagcagtttaatggcaacaagtatatggtcaaatttgtgctctaaatatgaaagacccttgtggaaggaggccgccacataatcatgagcaatcacgtgtcctttttagtagaaattcccaaatgcgagtaagcagtttttaatggcaacaagtttatggtcaaatttgtgctctaaatatgaaagacccttgtggaatgaggccgccacataatcacgagcaatcccgtgtcctttttagaagaaattcccaaatgcgagtaagcagttttaaaggcaccaagcttatggtaatatttgtgctctaaatatgaaagacccttgtggaatgagttcgccacataatcacgagcaatcccgtgtcctttttagaaattcccaaatgcgagtaagcagttttaatggcaacaagtttgtggtcatatttgtgctctaaatatgaaagacccttgtggaatgagttcgccacataatcacgagcaatcccgtgtcctttttagaaattcccaaatgcgagtaagcagttttaatggcaacaagtttatggtcatatttgtgctctaaatatgaaagacccttgtggaatgagttcgccacataatcacgagcaatcccgtgtcctttttagaaattcccaaatgcgagtaagcagttttaatggcaacaagtttatggtcatatttgtgctctaaattgaaagacccttgtggaatgaggcgttcgccacataatcacgagcaatcccgtgtcctttttagaaattcccaaatgcgagtaagcagttttaatggcaacaagtttatggtcaaatttgtgctctaaatatgaaagacccttgtggaatgaggccgccacataatcacgagcaatcccgtgtcctttttagaaattcccaaatgcgagtaagcagttttaatggcaacaagtttatggtcaaatttgtgctctaaatatgaaagacccttgtggaatgaggccgccacataatcacgagcaatcccgtgtccttttagaa

SEQ ID NO: 40881 - DNA, 1448 bp, Heterodera glycines
tggtggtggcttcatcattttgttcgctaattgttttgccgtgccgttgtcgttgcgcgacttttgcgatttttgtcggcctttgcctttgatggtcgccgcctgctgctgttgttgttgttgctgctgaggacactttcgcttccgtgacaacgaatggtgacgcaacagcagcaaatcatggacatcgaaaaagaaaaattgaaaataaatataaacatagagacaaattttaacaaattatttaattaaataaatttgtttgagaatttttgtctgaaatatttttaaaaaataactaatttttgtgctaattatttatttatttaattaaggcaaagtaataaaattcttatttagcaaaatttagcatgtaataaacaaataaaatgaaaataaagttaatttattatgtaacttactaaattttggcatgaaaaaaaaatatatatattttatttcaaaccaatttttaaaaacaattttattgttccaaaataaaaagtctttctcaaattcaaaaatgatgattaaataataaaaattctgtataataattaataattaggcctcacatttatagttttttcactatttttttcctgagctccccgtggtctaaaacgcacgaaaaccatgtttttttgggctattgttaagctacttttcgagttattagcaactattttatagttttttatttttagcaactaaaaaactataaaaatttttgaaaaaaaactattttcaactatttttgcttgtgaataaaaatttgttacgaaaaatgcaataaaaacgaaaaatacacccctaagaaatgaaaaatttctcaaaaattcatctccaaatttatttatttatttttttgacgagaatttttgattttaaaaattattggtttaattttcttacctttttggataaaatttgtcattttacacccctaaatttgaaagtttttagcaactattttcccatttttagcaactattttgtgggttttttagaaactaaaaattaattattttggcactttttagcaactataaatgtgagccctattaataatatattttaatcagaattaatttttaaataattttaaatgttcggaaataaaatgaaaaaaaaactaaattcaaaactttaaataataaaatttctaataaaattgttaatttccgctgctttattaccacgcttttcctctgtttgtgtggttgatgatgacgcgtttcgtccgccggtggcgacgttcgcccttttgccgtacattacgcgcgtgcaccaccgctgccacagttggcactccaacggcttgggcaggccaagtttgccaaggcacggcaattcgttcccctatgggcagaagaaataaaaatttggaacttttccaagcctggtgaggaatttttaaaaaaaattcctaagctagagaaagtcga

SEQ ID NO: 40882 - DNA, 1633 bp, Heterodera glycines
  unsure (1)..(1633): unsure at all n locations
tttttataattcatgaaaattttttgaattttcaccgtttttgtttttgttaatttgagggaatgcacttactgattcattcaatataaaatttttgaaaaatcgcttagaattntagttttttttctcgggatttcctttaaaaatttttaaacttttcgggggagggtggcgagctgcttctttttttgtctcattttccgatgcttttctacttacaaattagttccattaattaaggtcattccggtgacagtatccatcaccagatgaaatacaacgaattgagcaccgaagtgttcacccaaagtgtgctcatttccacggtcaatcgaatcaaaaacagaagcagcggagaaacgatggagaacattgtcaacaaaacgaacgtgagtgcgtcctgcctacatgatgggagctagcagtttgtccctcccttccgccgaattttatatttttcaagcagaattttttttattaaataaaaaatcctagaaaagttttctgtgatttttcttaaaattgttggaaaaccctattaatttaccataaaatttttgaaaagattactgagatattataagaaatttgaacaatacggagggggggggaggaggaacgtaggctcgtcctgataagaatagggattgtatttgatatgctttttaatcaagttttgaatttcaggtcaaaatgggagggctaaactatgcactgccaatcatcagtgacgggtaaggaaatgtgtcatcatcagatacaaaaaaaggcttacaacctccccccctgccgccgtatcaattccccgtgaaatatttaaaaaaattttcaaaccaaaattttctttaaataacttttcattttttttgaaaaattctttctttaaattttcttgcaattttccgaggggaaacaatacggagggatgtggaaacgaacttccccgttccgatttatttaaaaggtttttttcgttactgtcatttcatgttgcgcatttttcagcatgctcatggagacattggtgatcggttttgccgtcaaccaccccgccggtggtttcggcatggattcggaccagaaaaatggcaacggaagcaatggcacaagcgacacgggcagtgacgcggcgagtgacaatggcaacggcgccaacggacacaaaccgcagaaaaagccgcaagtcttcgagaagagcgtcccgtcagtggtcggggtaagaagtgaacacagtcaagggacgacggagcaggacaaaacgtcgtcgccgaaacgtcgtcagccaaaaaggccgaaaaatttactaacttagaaaaattttcaaagaaaaaatttttagaatttttcttctgaaaaatttctaagttagtaaatttcacggaattttccggcgctttttggcatgacgaatttttgagaaatttaagtgatgttgttttttgagggggcaccaataatgaaaaacaaaaatgtttcccttaaaatttcgactgaggatatcgagttgggtttttgcttaaaaaataaatatttttcctatattttttacacaatttctctttagtattccgcaaacattggagagaataacaatttcgaatttgtcggcgactacaaataccaagtaattttt

SEQ ID NO: 40883 - DNA, 1553 bp, Heterodera glycines
tgtcctgtacaccacacaagtaccgaaagttgcaaacgaaaataatcaacaatcactaaattaatcaaatgtttttggcaagcctaaacgctgagattttatgtgttagcttcttaagtctttgtgctttcaaatggcgggtggggtccggccgggagtttttcgaattagtgcaatttgttaacaaattttgtcaaaaaaggaccgaattttgcgattttagtcttctggttactcttcgttgggaaccaattgaatggatatttaatcattttcatcatttgtccgttcgcctctgcctctataagctcatatctatagttgattcagtggcagcgcagccatctttattattattacccaaaagaacattcttcaggatgaagaaaaaaatgaattttaaaaactttttttttgattaatttaaataattcctaatccactttaaaatttttttattttgtttgtttttggcagctcttttttgtcccacctttgcgcacacttcgcatttgtaccgcttctcctgttgatgtgtcaatttgtgatttttgtaattgccgttctgatggaagccttttccacagtattcgctgagcaatgaatgggaaagataaaaataataaatgaaatggtaaacaaagaaacttttcagtttgctatttaattatccatctttcaaataatttaatggaaacatataatcaataaacaaaacacaccatgtgtacggcttgaaccctaaattaaataaaattaaaaacattaatcattggcatttaagttaattaccggtgtgaatccgcaaatgcgtatttagagttgaggaccttaattaagcatttggcgtaaaatgaagcaagtgtaaataagcatttcacttctttttttaatctctgatttacctgttgaagcatttcccacaaattttgcactgaaaaggcgccgattaaaccaaatttaaattaatttgacttttctcatttcatttttttttaccctgtgcggtttgtcctccgtgtgaatgattttgtgtcgacaaagtgtcgaagcctggcgaaaggcctttccgcaaaccttaaattttgccaatttttcataagtgaataaaacggcactttgcattgaaacggtctggcaccggtatggacctgaaaagcatttaaatttaaatgataaaattaaattaaatcgatcaatcaccggcatgtgccgtgtcaaattgtaatgggcactgaaagttttcgagcacaattcgcacttgaactgctgcgggttcgctgcttgtccatgcttcaccttcgcttcgtccccattttcccctccttttgcttttttcgtcatatttttgtcgctgtccgacggcgatgccgaagaagaggaagaggaagaagaggaggaggaggaggaggaagaggtcgaatttgatgggcacaatacctttttgtctgtcccattcttttgactgtcgccaattgacacttttcgtccaagcacaaaggaagaaccttttaaaaattcttaaatgtatcttctacatttttaaatcacct

SEQ ID NO: 40884 - DNA, 988 bp, Heterodera glycines
  unsure (1)..(988): unsure at all n locations
agctacggtcgcactccgtttcataaattctcccgtgtcctttaacctactttatctcgggaacagttctctccgcccatgaatcgtccccccccccccgaaaattaaaaaaatttcaaacagaaattttaaaaaaatacaacttagaaacttttttataagaaatttcaagaaaacatttttgtctagtgatttttgcaaaaatttttccaaaaaaaagacttaaaattttactatttttttcctttaaattttcgtataaaaaatttcaaagatttttttatgtggggggggggacgtaaatgaaatgcgcccctgctgatagcagccaaagtaacctaaatacgtacaattctcataataaaaattttttttttttgaaaatttattttactggcaattttccttttagtttaaaaaagatgttttcacaaaacgaaaggcaaacatatgcacaagccatagcggaggttggaaaacccgaaattttattgtattaaaaatagtgaatttaattaaaaggtggacaaaaaataaaatattgtataaactaattaattagttaaaatcaataactagggcttccttttttatgtaaatacattttttttcctggttagcaggaaaaacactttttttttgtgtttacgaacaaaagttgggacttttatttacatattttttacatattttcggatttttctacatattacatatgtacatatttttatacatgttttggacttttccgtacatatttcgaaattttttcgtacatatttattttttttttacatattttgggaatttttgagaatttataaaaaatttctttaaaaattttttttttaatttttttgaaaatgtatatggcataatgtcactatttttcaagaaattttaaggtctgacgcaattttttttttttgatcttttgattcagaatgctctgaaattttataattttgcattttcctccccanaaatt

SEQ ID NO: 40885 - DNA, 247 bp, Heterodera glycines
tgctggcgatgtgtgaactgctcgggatgagcgcaaacgtaccgaccgatatctgcttcagctttaccggcctggtacagcgcggcggccgcaccgggccgcataaggatggctggggcattaccttctatgaagggaacggctgccgcacattcaaggatccgcagccgagcttcaactcgccgatcgcccgcctggtgcaggactacccgatcaagtcctgtgcggtggtgtcccatattcgcca

SEQ ID NO: 40886 - DNA, 1144 bp, Heterodera glycines
  unsure (1)..(1144): unsure at all n locations
tttaaatattatttatccaaaaaatttttttttgggttttcggggcagtccccctgaaccgatgcgcccagatttatggggagaccgaatccttccggaatagcttcactatagcctgtactttaattctgcgttggatttttgctccccataattgtttgagtaccccccaaacggacacttgaaaaaatcgatttatttttgttttcggggcagtccccccgaaccgatgcgcccagatttatggggagaccgaatccttcgggaatagcttccctatagcctgtactttaattctgcgttggatttttgctccccataattgtttgagtaccccaaacggacacttgaaaaaatcgatttttttgttttcggggcagtccccccgaaccgatgcgcccagatttatggggagaccgaatccttcgggaatagcttccctatagcctgtactttaattctgcgttggatttttgctccccataattgtttgagtaccccaaacggacacttgaaaaaatcgatttttttgttttcggggcagtccccccgagccgatgcgcccagatttatggggagaccgaatccttccggaatagcttccctatagcctgtactttaattctgcgttggatttttgctccccataattgtttgagtaccccaaacggacacttgaataaatcgattttttatttcataaatatttttcagaaagtgctctaaagcgcaccaaaatttatttacaagttaatttnagcactctgatgctntagtatcaaaaaggaagatggagaaaaaattttttaaaaatttttccttatattttggttatatcgttttgcttttggtggggtgcttggaacagtggaatcatgcgcacccgtccgatctggcaagttaagcaacgattgctgactagccaaaaggttcggtgccgtgatgaaacgaaccagcactgcttaccccgcggcacccggcacggtcccccgaaggaatggatttaattaaattctctccttcggggatttttttccattaggtcgtccgttagagttcgattgctctagtcaatttttaaaaatttttaattcggaagtaaacaggccaaaaagtttaggcttaacttttttttcgacctgca

SEQ ID NO: 40887 - DNA, 1241 bp, Heterodera glycines
tcaaaaaggaaaattacccaactaattaataataaaaaaaaatgaccgaaagacataccgtgctgattgaagaaaaggagagaagtgagacccgcaggacgtcatgtgagttcagcgtctgccacccttctgtcgtttcgggtttccgccgtagtgcatccactggttgtccgggccacgtcttccttgacctcttccatactgtggtgccaaagtaggcgcacctctttgttgaccaccgctgccagatggaccggcttgatctgagggccctgtcgtctgtaggcaggaaagtggcgattctggaattggaatgagggagctcgcggctgctgtgattgttgttgtccaaaggcattcgttcggtccaggcgcaacccatgcttcaatgcccaactttcaagaaagccttcatcctccaccgattctcttttggccgaatcaaataggcatgtcgacgacctcacgagtgttcgtcccaaaagtgccaaaacatactcggctcggactacgcttgttcttgttatcgccatttcgatgaaacgtttccacacttgtcctgcatttattgagaccaagtctccaatgatgaagacagcgtggcgagctcttgaaagagcaacagtagcccgttgatcgtcttcaaagaagtgcatgttgtccgtccttccggatcccacctcggagtattttgatcttgttgtcactattatgatgacatcgcactcctgtgcctgataggcatcaactgtgagtgcacgaacaccgcagtgcttcagctttcgttcaatttccgaagtttggtacgtgtactaattagtcccacaggacattcttgaaccggcagaaggaaatctgagcccgtgatgagtgagcgttcttcagcgcttcttgctggaatgagttgctcattgtgcaattcatatgaggcatagctgatgagctttgccaaaaatggatggcttctgtacatctttgtgaggaatgtatagttcgtccctatcgaagcctctgcttgaaggatgacgctttccaatccatatcctgagtggaagatgtcaggcagttcttgcagatgcactccgagctgatgacgatcgcccgtcaaaagcaatgccttgagcttgggcatccgcgcaaccaagtgaaccaccactgcccactgagcttgagtgctttcatcaaagagcaaaacgtctgcatcagtgatgtttccttcaccatgaagtaaattcgcagcc

SEQ ID NO: 40888 - DNA, 1113 bp, Heterodera glycines
tttgaaaagctttttgagcgtaattacgattttacttacaccatttttttctaggcttagatcacatgcgattttcggcactctgataattttagcgctcataatgggatgtataaaggcgattgtagaaggaattggaagcgctaaaattgtttgaggagctttttgagcgtaattacgatttttacttacaccattttttgctaggcttagatcacatgcgattttcggcactctgataattttagcgctcataatgggatgtataaaggcgattgtagaaggaattggaagcgctaaaattgtttgaagagctttttgagcgtaattacgattttacttacaccatttttttctaggcttagatcacatgcgattttcggcactctgataattttagcgctcataatgggatgtataaaggcgattgtagaaggaattggaagcgctaaaattgtttgagaagctttttgagcgtaattacgattttacttacaccattttttctaggcttagatcacatgcgatttcggcactctgataattttagcgctcataatgggatgtataaaggcgattgtagaaggaattggaagcgactaaaattgtttgaaaagctttttgagcgtaattacgattttacttacaccatttttttctaggcttagatcacatgcgattttcggcactctgataattttagcgctcataatgggatgtataaaggcgattgtagaaggaattggaagcgctaaaattgtttgaaaagctttttgagcgtaattacgattttacttacaccatttttttctaggcttagatcacatgcgattttcggcactctgataattttagagctcataatgggatgtataaaggcgattgtagaaggaattggaagcgctaaaattgtttgaaaagctttttgagcgtaattacgattttacttacaccatttttttctaggcttagatcacatgcgattttcggcactctgataattttagcgctcataatgggatgtataaaggcgattgtagaaggaattggaagcgctaaaattgtttgaggagctttttgagcgtaattacgattttacttacaccatttttt

SEQ ID NO: 40889 - DNA, 2025 bp, Heterodera glycines
  unsure (1)..(2025): unsure at all n locations
ggttttgattttaggatttttaacgatttttccagagaaacggagaccctttcaaaacttagttttcaagctcttcgactggtttttttcggaaaaattcggttttttccgggaatagaaaaaatttttgccctgagcgggacatttgagtcccgggcctataactcgtcagggatcggttttagccaaaaattgccttagaacatttttgtagagcattntaaatgctatcgaatggtgtactatatgaaaggaaattttcaaaaattttcgagctaggccccctagaaattttcaaaaattttttttgggttgaaaaagagggtgaaaaatatttttctggggtaaattagggtcctgagcacaaatatgatgtttattttaagtttcagattttttggaattttttaaaaattcgaaaatatttttaatttttttggtccttggaaatttgggttaaaatttgaaaattcataactcaatgaaggactgctcaatttaagtgaattaaagctttaaaaatagcaaaaaatcgggagaattttatgggatttatttgggatttctatcttctaaagaaaaaaagttattccagaaattctggaaattttagatttttcagaaaaaaattcagaactcccttctgaaaagtcattctgtaaaagtaaaatactacaaaaattcgcaatttttttctctataatataaattttattttacatttttatctcttttttgcgaattgttataaaaataaaagtgatttttggtttcgggaccataggggggtgaccaggatttttgggtggaaaaattttttcaccgaaaatattccaaaaacatgtctttaggggtagtttatgacgctgatcacgaatacgtgatcacattttacttttgacatcgttaagacctcagaatccctgtgtgattggggattctgaggcatcattttgaggggggggggaagttcgaatccggccggtgtacattatttttctatatatttttgtgctatttttcagtgcgtttaatttatatttaaagatttgttgtaaattaataataaaagaatttatgtaaaaaataataattatcttttaataaagaatttcatatttttttttaattgaatttataaaaattaatttcatattaatttaaatattcaattcttgtacatttcaaaattctctttttaattaataaaaggaataattaattttattttttaaaatttataataaattgcattcaatttttgtacctcttttaatcacttttgtacctcttttaatcacttttgtacctcttttaatcacttttgtacctcttttatcactgttgtacctcttctaatcactgttgtacctcttctaatcatttttgtacctcttttaatcactgttgtacctcttttaatcatttttgtacctcttttaatcacttttgtacctcttttaatcacttttgtacctcttttaatcacttttgtacctcttttaatcacttttgtacctcttttaatcactgttgtacctcttctatttactgttgtacctctcctaatcactgttgtacctcttctatttactgttgtacctcttctaatcactgttgtacctcttctgatcactgttgtacctcttctaatctctgttgtacctcttctaatcgctgttgtacctcttctaatcgctgttgtacctcttctaatcactgttgtaccacttctaatcactcttctaatcgctgttgtacctcttctaatcactgttgtaccacttctaatcactcttctaatcgctgttgtaccacttctaatcactgttgaacctcttctaatcactcttctaatcactgttgaacctcttctattcactcttctaatcgctgttgtacctcttctaatcactcttctaatcacttttgtaccactcctaatcacagttgtacctcttctaatcacttttgtaccacttctaatcactttttgacctcttctaatcactcttctaatcactg

SEQ ID NO: 40890 - DNA, 996 bp, Heterodera glycines
aatggatgcttcaaatctgcaagaaattagattggcaataagtggttgtaaaaaactttggggtaatgaattattttttgaagtgagtcaaacaccctattagtgctttgctgtgccgagaaccggcaggcaatggatagctttaaatctgcaagaaattagattggcaataagtggttgtaaaaaacttttgggtaatgaattattttttgaagtgagtcaaacaccgtattagtgctttgctgtgccgagaaccggcaggcaatggatagctttaaatctgcaagaaattagattggcaataagtggttgtaaaaaacttttgggtaaggaattattttttgaagtgagtcaaacaccctattagtgctttgctgtgccgagaaccggcaggcaatggatggctttaaatctgcaagaaattagattggcaataagtggttgtaaaaaacttttgggtaaggaattattttttgaagtgagtcaaacaccgtattagtgctttgctgtgccgagaaccggcaggcaatggatggctttaaatctgcaagaaattagattggcaataagtggttgtaaaaaacttttgggtatggaattattttttgaagtgagtcaaacaccctattagtgctttgctgtgccgagaaccggcaggcaatggatggctttcaatctgcaagaaattagattggcaataagtggttgtaaaaaacttttgggtaatgaattattttttgaagtgagtcaaacaccctattagtgctttgctgtgccgagaaccggcaggcaatggatagctttaaatctgcaagaaattagattggcaataagtggttgtaaaaaacttttgggtaatgaattattttttgaagtgagtcaaacaccctattagtgctttgctgtgccgagaaccggcaggcaatggatggctttaaatctgcaagaaattagattagcaataagtggttgtaaaaaacttttgggtaatgaatt

SEQ ID NO: 40891 - DNA, 906 bp, Heterodera glycines
  unsure (1)..(906): unsure at all n locations
agttgatgtaactcgacatataccgcacaaactccttaccctcgcgggattgttagtcgcatgcgatgagctctataagctctttcggatgcgggttgagccgtgtcaatacaactcctccctgaaggcagcaaaggctactgtcctcgtgcgggaagagtagttccccccaatgagagcacttcttgtcgccaatcttaccagcattcgaatattctggataattctttgccgcagctgcagcacagctccaatccttgtggacaaggtagcaacgctgcgtacatgcagtgtctcgctcaacagcatttgttgataatcgacgtcttggtgcaggtgaaggagaacggataatcgaagcagtctcccgtcgacctatgcagcactgatcgccttgtaggcgtcttccgcggtgggggggcgaaggcccaccacgaaggccgcgaagaggccgagtgagtaccttcggtgcaggaaaattattaaattttaaaaattttttaattgctttttaaatatgccaaaaaatgtaggcttaacttttttagtgaaaattcgatcactcatattttttgctaattgagcagaagcgtaccaaactttgcagggatactccccggtaaaggactaacttacactgaaatgagcgccgagctagctggctcaaaaaaattttcgaaaatctgagtctttcgtttttatttattttttgcaaaattaattcttaaatattttttcagaaagggttctgaaacgcaccaaattttatttacatgttagtttaggcactctgatgctttttctatcaaaaagggagatgaataaaatttttaaaaatttttaattcctttttaaacaggccaaaaagtttaggcttaacttttttttcangaaactgatcagaag

SEQ ID NO: 40892 - DNA, 2031 bp, Heterodera glycines
aagccaaaaaagaatgaatgctccaagagaaaaaccaaacaagaagccaaacacacggcgaggacaaatcacaattgaaacaaggacaattccaccaataattcgccccactacaacaattattccacccacaactcgcactactacaaccgctattccaccggcaactcgcattatcacaacgacaataccaccaataattcgccccactacaacaattaagaggaccgactgagagagggaaaaagcgaagagcgaatgaaggcgtggaaggaatggacgcagcaaaaaaatcaatgggaaagtggtggcacggcacaaggagggaaaagattttttgagaacacgctgaaatccgcagtgatctcggcgaacgaaacacgagccatcccaccagaaggaatgagctggaaacgtcatgtttcgagctttcaaacagcgccgcctggccccggcttcaagcgccgataccacgacgtgagcccaatcagaagaatggacaacacgggacaagtgacgtcggcggcgagcggaacggaagaaaagattgtgaaaattcgaaaattgttgctacaggccaccgacttaatgggagaaatggcggacgaattgttcccatataagaaataagggggacagcaaaaggaatatcaaaaaaaaaccaccaaaattaaacaaaaaataattaattacatacattaaccattatttttgctgccccccccccccccttaattgattacaaaatgaaatgtttgggtaaaaatgactgccctttgccttcggtcattttccctccctttccttttcacacacgctaaaatttctcgccctctcttttttctctcattctattttttcgttctatttccttttcttcatctctatctctctctcttcatctgtctttcatttttgctcgcctgaggaaacgccacaactcaccgatgaccgccccgctcacagaggaagggctgttcccggtggtgttcgtccccacggcaaacgacaccaacaaaagcaacacgaaatttttcggcttaaatttattctgctgaccgcctattgacgactttttaccataagagtagtgaccgggaatggtgtccgttcgaaaaatttgattggatgattaatttaaaaaaaaggctaaaatttcgaataatttggatacggctgacgaaaaacgatggcaaagtgaataactcgaaaaatgagcacatcaaacgaaaggaactgttggatgagacacccacccacggccactgatgtgctgaaaaattcttttgtattccatatttcttcaacaaattcaaattcgtcgccgcggggacgaacataacgccgggggcgtcgtttgttgctgaaggggagtgttgtgcccgcctgggcttgggccacctgttgaaagcacctccacggatttcgcccttcccttctcttcccaatctttctatctctctctctctctctctctctctgttttctctttatttctctttctatctctctctcgtgcattactctttctctgattgctccatctcaaaatgttggccattgtccccgcccccgcccctttccccaatcgctctaatcagatttaaggggagtgatgttgggatttgagtcagttgttgatcactcggccattttgatcattcaccatttcccttgccttttgctacacattctggtcaataaaccttttgttattggcttgacattttgggggagcagcattttggggggagggatgccctctcccacatttcaggttctgcctgaaatgcttggagggcccaacattccttcgcgtattttccccgcttattatggggcttctggggtggatggggaccatttcacccgaaccattcccatatataaaaatttgttttgtttttatttttccctcttttttcacatttaataaaattccaaattaatttaattttttttttcccatttttaatccccttttttggccccacaaggcaaaaaaaaaaaaaaaaaaaaaaaaaaaaaaaa

SEQ ID NO: 40893 - DNA, 945 bp, Heterodera glycines
tgttatctgaatatttacaagcaaaatttaagaccatttccaaagaggaaggaacaaaaatttttgcctaaattttatattatattgttgaattgtttgaaatgcatctgttgtctgccgttttgaaatttttcaacttttcgcgaaaagatttcccagaaaatgcatgggacaaataaaaattaaacttctattatgatcaatttaaatttcctatcagtttcgggtttgctttaaacacgctggcctatgaaaaaatggagttttatggatgtcaaattttgggacttttcttcgacgtggccatcagcgggttgtttcgtgacaaaaacaaaccagtttgatgttattcgaatgagctagacgcgctctacattttcaaatgtatcaacaaagggtctaccgccactccctggcgagatatggcctgtcaaagcagaacggggccaataaatttgaatttttgttaatcttcggcagttgcctttatttcgagcctactctacttgtgcatcttttcccaatatggcactgcttccgaattattgaactgtttcacgactgattgttgagataatttttttttccgattcctttatctccaagcatgagccttataagtgattgttcatatccttctcttgaaaaaaattgtcactaaaaaaaacacgttttctgaatattaacaacaaaaatttttagacactttctaaagaggaaggaaaaaaatttttcatttgcctaatatttatttatactgttgaactgttggaaatgcagctgatgccgtcggaaaagctccgatttttttggggaaagtttttttctttcagtttcaccactgattgttgaggcaatttttttcgccaatttcttttgtctacaaacattatttattgcgttcatcctgtagtgtgtaaaaaattttcagtaaaaaaaacttgt

SEQ ID NO: 40894 - DNA, 963 bp, Heterodera glycines
tcatcattccaattctcttttctatttgtaaattttcttttgattttcacctaatttttttgcaatttttctttcaatttttgtccatacttttctcgagtattctttccaatttgcttgaatttctctttttattttatgaaaattttccacaatttctctcttctatttgtcatttaaaattcggatttgatcataaatttgtccattatttgttgtcattggcaattggccacaaatttcttcacaatttgtggacatttcttcactctccgcaccttccaaattttcatcaaaattttgatcaaattgttgatcattttgtccaaattggttattctgatcagcattttcttcataaattttctgagcaattcgaaaaatgtcttcttctgttccatcgtcacatccttggccaaatatttcattaaaacttttttcttgctttattttgccagcctcaatttggttaattgctttttcgaatattaatgcgcataacacaatataaatattaataaaattttcatgattttttgtaaaataaaatgagaaaatattttaaaaatgcttctaatattattttaatccaattaaattattattcaattcggcttttgaaccaaacagtcaatagatcgatataatatgattttaaacaggaaaatgcaaagtgcatatttgttattatgaaaaatccacttacaattagtttcgtaataataatgaaattgaaaactgcaaaaaaatgcagataattttagacgaaaacactcaacattttttatattataaagataatcattaattagcaaaatttaaatccacaattttaaccaattatcccttttatacaataatattaaaaggtgtaaaaaacaaatacagacaaattttaaagtcaaatataagcaggcagacaaaaatcggtaaagaaaaatcgtaatttttttaaaacatttg

SEQ ID NO: 40895 - DNA, 1130 bp, Heterodera glycines
  unsure (1)..(1130): unsure at all n locations
atttttaaaaaattcattaaaaatgtaaaaatttttttgattaatttctataattcgtatatttaaaaaaaagtttctctaatcagaaggtaaagcggatttataaaatgcaaaaagtggcggttttatcaatcaaacgaactagagcctacatttccaacgcaattcagtcacttgcctgaagcacattatcactttggaagcggacaaggatggcactgtacccttttgacttgttcagttggtgttcacgacgttcactgatgtggaagaactgacaaaaaaaaatattgtgctttttgaaaaggcttttcaattgaggcctgagatgctttatcatttcataaatatacagtatctcatagggagtgatcgcgtcaaattttttcgtgatcggggttaataatttacatgattagtggggactgggtaatttggggatgatctctgattcgcacacagagagcgaaatttgacctctgatcttattgaaggtaagaaaaattaatatatattttaaaatatctattgcacttttttaatagttttttacgacttaattatttattatttttgtgaatccagaattactgtggttataataacgatttgtttgctagcaccaatactttctggggaatttggagaattattgtgactgagtattgggctttaattgaagctgactattttgtttcatgaataatgtgtaacgagcgaactaaatctcattctttttaataacaagaagttccggtttttaattagtccataataatgacacggtcgtcgccctgtgattttacagctgaagatgcagaagcggcaattctcggccttttgccaccgcaacgataatttttcaatttcctatcaatttttactacggataaactccaaaatcaacaataaaattcttcaacgcaatttgaatttcttctaagattttgaatgaagtgcagcagaggctttaaaacccaatgagtgaactcaattcattttttaaaattttgttttctgtttttaaaagtttaatgtctttttttatttttgttaaatttgaaaaaaaaataanaaataaataaaaaatattacaaaaattttgtttgtttttattgtatatggagaaa

SEQ ID NO: 40896 - DNA, 882 bp, Heterodera glycines
ggcactccccacgatccgatgcgctcagatatatggggagaccgaatcattccggaatagatgcgctatagccggtgctctaattctgcgtgtgatttttgctcaccatatatgtttgagtatcgcacccgcgcacttgagaaaatctagattttttgttttcggggcagtccccccgaaccgatgcgcccagatttatggggagaccgaatccttcgggaatagcttccctatagcctgtactttaattctgcgttggatttttgctccccataattgtttgagtaccccaaacggacacttgaaaaaatcgatttttttgttttcggggcagtccccccgaaccgatgcgcccagatttatggggagaccgaatccttcgggaatagcttccctatagcctgtactttaattctgcgttggatttttgctccccataattgtttgagtaccccaaacggacacttgaaaaaatcgatttttttgttttcggggcagtccccccgaaccgatgcgcccagatttatggggagaccgaatccttcgggaatagcttccctatagcctgtactttaattctgcgttggatttttgctccccataattgtttgagtaccccaaacggacacttgaaaaaatcgatttttttgttttcggggcagtccccccgaaccgatgcgcccagatttatggggagaccgaatccttcgggagtagcttccctatagcctgtactttaattctgcgttggatttttgctccccataaatgtttgagtaccccaaacggacacttgaaaaaatcgatttttttgttttcggggcagtccccccgaaccgatcacccagatttatggggagaccgaatccttcgggaatagct

SEQ ID NO: 40897 - DNA, 1032 bp, Heterodera glycines
  unsure (1)..(1032): unsure at all n locations
tttcaatttgttcatttttagatgcaaaaacctactcctttaaaccgccccaattcttctgtctccaaaacccttgcctgcgggcttgaaaaaattgtgaatttgagtggaaatgagccactctcggtgccggtgctggcggatcggagtgatccgctgggactcaagtcggtccaacccgacgcggtgccaatggagagtgctgagggcaccaaggaagtggaaataatggaagtggatgaaatgagtggaggaaaagggaaaagggatgaaatgggtaaagaaaaggtgaaaagtggtggaatggaagaggaagaagaaagtgagggcagtgaaagtgaactgctcggagaaggtggatttggttcgatacaattaaaccccagcctgagggcgggaaataaagcagttgaaaaggaggataaggggaaaccttatctgatcgcccaagtgaggggcgatggtgtgatcgccgcccggatgaaacttttctgggatttcccggaattggtttttgtcccgtttagcctcttcgacaacgcccagccgatcgaaatcggcgacactttccgcctacataagtgcgaatggaccaagagcgagacaggatgggaagagcgcggagattggctctatgaagtcaccggacggctcaactaccaagccacggcgacggacgtgagccgactgcgccaacgcctccccactcgtgcggtcggcattttggtcgacgtccagagggcccgtgacagacacgtcaaagtggcgctggtctcagcacctgagctaagctgcgtcatgcgagcctaccgtcgccacttcccggccgaattcacggagaccgacatccggtaccgatccgttgtccgtcttcaacttcggcagatcaacagtccgccatgggtgctgtattcgcagcaatttgcgtacgttttgccatccgattttggtaagaaaaggngtgatgagctgctccttcatcatgtnaacgtaatttactggncgtgagcccgagccgatgggctatgagtt

SEQ ID NO: 40898 - DNA, 1643 bp, Heterodera glycines
ttgtttgtttggtttttaatcccttccccgcccgttcccttcctgtttcctccttaagtttccctccgccgcaaatttgccccactttttcccccgcaatcgcaactgtgcgaaattgtccgcccattttctcccccaataaaaaatcgctggttcgccaaattttccctccaaagtacgttgctcccccaatttgtagtgatcagcccatattaagtgtaaattaacaatattcactttttgcccccaattttttatctctttccctattccatatttaaatggccccaaatcactcccaattcacattcacttcgcttttacgggcaatcaatgcctatccctttgcccgcgctcacactctctctctcttccgttttctttccctttacccatgccttaaccatttcttttcctagtccctttctctgtccaaattgtgatacattatcatcccggtccctcattggcattccccggtttctctctttggcactgtcccggtttttcccctatttctgtgattgttccccccggtgacggcccctctttctgtgatcagtcccaatttctgtgatgaccatttgtccgtgattttgtgatcatttgtcccccggtgatggcacatttcttttgtaattttttgtattggatcaccatttctccaacatgaggaacacctgcggtccctcgatgtcctctccggcattgttcagctctcttgtcagtcgttcgagctgaagcaggaagtcttttgtgtctcggagacttcggcacgtcttgagattggccagctcaaagtgtagcgccctgatgtgctcttcaggtgcgccgtaagtgtccttcagcaactgaaggaccgtctcgtagttttggtcctccaggcggaacccagcgatgagttcccgtgcttctccgcccagaagattgcggagcaagttcagcttctgtgctttgctgattgattggctgccgatggccgatttgaaggactcgtagaattcgggccattttcgcttttgaccgaagaatttgtccagctggattggctggaattgatagagcggtgccgtgaatgtaggagctgctattggaggcgttgcagtttgtggtggcggatttgcttgctgatccgctcttgcttctctttctgctctgcctcggtaaagtttggcatcggcactgagcgttgcttcgagatcccgcagatcccggagtttggttgtggctgcgtcatggcgttcagcaattttctcatacgtgtcgaatttgacgtattctttctcgcctttgtctttttctgttccttcgaggcggtttagtaggtcaatccaattgttggagaggtcgcgtagattgtccagttgtgcttcaattgtttggacttctctgttgacgcgtgtgcattgagcctccaatttgactgcgttttcccagtttgagaggtcggcgtctggatgtagtgaaagtgccgtggttgttctggcattatccagcgccttgagtgtgaatgtgatgcccttctggattaggcttgccattgtgagttgtttgccgtgggctttgcgctgttaagttgttctggtgctgccttttcatttgcggttccactgccttttgttgaccactgcttttttgttcga

SEQ ID NO: 40899 - DNA, 972 bp, Heterodera glycines
  unsure (1)..(972): unsure at all n locations
ttgttttttgcataataatcataaaatattttttcagaaactgctctgaaaacgcanccaattgttanttgcgagttattttaggcactcagatgctttcagtatcaaaaaggggagatgaataaaaaatctaaaaatttttaattgctttntaaatatgcgaaaaattttaggcttaactttttttttataaactgatcagaagcgaaccagattttgcgagggcatcaaaaagacaagggaaggcccaccacgaggccgcgaagcggccgagtgagtaccttcgatttaggaaaattattaaggaagaaagcttcattatttatatgtttttagcaaaattaattcataaatatttttttcacaaactgctctgaaacgcaccaaattttatttacaagttattttaggcactcagatgctttcactatcaaaaagggagatgaataaaaatctaaaaatttttaattgctttttaaatatgcgaaaaattttaggcttaactttttttttataaactggtcagaagcgaaccagattttgcgagagcatcaaaaagacaaggaaaagcactgctatgatgctaactccagtaattctgaatttaaaattttttattaatttttaaagcttcactattttatttttttagcaaaatcaattcataaatattttttcagaaactgctctgaaacgcaccaaatgttaattaaaagttaaataaggctctctgatgctttttctatcaaaagggagatgaataaaatttttaaaaatttttaattcctttttaaacaggccaaaaagtttaggcttatattttaaaaagtttcatcgaacctagcgcactaaaatcgatataatctctccaaattttgcaggccttctccattgtaaaggactaacttaacctgaaaaaatgccaacgcattgttgtttttaaaatttttcgaaattctgactttttcatta

SEQ ID NO: 40900 - DNA, 987 bp, Heterodera glycines
  unsure (1)..(987): unsure at all n locations
tccaaaaaaatggctatttcttttttgggcaattgggtaattggaatttctttggaaacaatgcccagggctgtcatcagttgttatgctctaaaaatgattttcgggccgtttgagtatatgtgaggtatggacggtccaaaaaaatggctatctctttttttggcaatctggtaatagaaatctctttggaaacaatgacagtggctgtcatcagttgttatgctctaaaaatgattttcgggccgtttgagtatatgtgaggtatggacggtccaaaaaaaatggctatctctttttttggcaatctggtaatagaaatctctttggaaacaatgacagtggctgtcatcagttgttatgctctaaaaatgattttcgggccgtttgagtatatgtgaggtatggacggtccaaaaaaatggctatctctttttttggcaatctggtaatagaaatctctttggaaacaatgacagtggctgtcatcagttgttatgctctaaaaatgattttcgggccgtttgagtatatgtgaggtatggacggtccaaaaaaaatggctatctctttttttggcaatctggtaatagaaatctctttggaaacaatgacagtggctgtcatcagttgttatgctctaaaaatgattttcgggccgtttgagtatatgtgaggtatggaaggtccaaaaaaatggctatctctttttttggcaatctggtaatagaaatctctttggaaacaatgacagtggctgtcatcagttgttatgctctaaaaatgattttcgggccgtttgagtatatgtgaggtatggacggtccaaaaaaatggctatctctttttttggcaatctggtaatagaaatctctttggaaacaatgacagtggctgtcatcagtttgtatgctctnaaaatgattttcgggccgtttgagtatatgtgaggtatgaacggtccaaaaaaatggctatctctttttt

SEQ ID NO: 40901 - DNA, 482 bp, Heterodera glycines
cttgtgcatgacatattttcattttccccgatttttttgtattttttgtgactctttctgcgagtttttatgacttttttaagcgacttcgtgaataagtttttattgactgatattcccagccctttcttgttcttttgtccatcactcattcattgtacacactaaagacagtccgttttcactgatggttttgtccccttccccttcttcgtctgactgcctacggtagtagacagtgagactacaattagaccccatcctactcacttactcctgatccattgcttctcctaattgctcaccctatgcgaacgaatccactaacaaaccgaaataacccttcgttgcagtcttcatcgttcttctgttgctgaaatggcacgggctccccacttcttttgcatcactgctttaaacaatcgacaaatccatattccgtacctttaaacaatgtcggaactttttcttgctttcaaatc

SEQ ID NO: 40902 - DNA, 786 bp, Heterodera glycines
caaacgaaaaccaaccaaagcgtagaacatacacaagattttgccgcccattgtcacccaacagctgtgcccgtatccgaaggtggtaattacggtggtggagaagtaaaatgcctttaatggcaatgtataagagccgcaaccaaaacaaaagaaagaaatttctaaaaatcttgaaaagggaatcagactttcataattgtctctctttctctctaacttccgctttgccctctctctctctcccctcctccccctcttctttgtctcctctctctctctctctctctaatcccctctccaattaccccactgaatttccactgatggcccgccttgtgggggatggcacggacgatgattgactcgagcagagcgtagtccgtctccgtgatgttgtacttggccactaatcggctcttcactgcctccacttgttgcctctgacaattccttccaataattactttttcccctccaaaatttccctctctttcgtccaatgctttcctttgtctgattacttttctctgtcacttcccccattaattattgctcacttgtcgaagttcggcctccgattcgagcgcatcgaaaacggcggagccgaccatcagataagtgagtgtgcagacaatcagcgaaagtgtccgcacattttggcgtttcatccgttaattttggcgaattcagttaaaattttggttcttccgagtgactactaatttggcgatggacagcgaaatgaatccgccaaagtccgccgcgggggggggggggggggtg

SEQ ID NO: 40903 - DNA, 1020 bp, Heterodera glycines
  unsure (1)..(1020): unsure at all n locations
ccccataattgtttcatttaaataatttttatccaaaaaatttttttttgcgttttcggggcagtccccctgaaccgatgcgcccagatttatggggagaccgaatccttcgggaatagcttccctatagcctgtactttaattctgcgttggatttttgctccccataattgtttgagtaccccaaacagacacttgaaaaaatcgatttttttgttttcggggcagtccccccgaaccgacgcgcccagatttatggggagaccgaatccttcgggagtagcttccctatagcctgtactttaattctgcgttggatttttgctccccataattgtttgagtaccccaaacggacacttgaaaaaatcgatttttttgttttcggggcagtccccccgaaccgatgcgcccagatttatggggagaccgaatccttccggaatagcttccctatagcctgtactttaattctgcgttggatttttgctccccataattgtttgagtaccccaaacggacacttgaaaaaatcgatttttttgttttcggggcagtccccccgaaccgatgcgcccagatttatggggagaccgaatccttcgggagtagcttccctatagcctgtactttaattctgcgttggatttttgctccccataattgtttgagtaccccaaacgaacacttgaaaaaatcgattttttttgttttcggggcagtccccccgaaccgatgcgcccagatttatggggagaccgaatccttcgggagtagctttcctatagcctgtactttaattctgcgttggatttttgctccccataattgtttgagtaccccaaacggacacttgaaaaaatcgattttttttgtnttcggggcagtccccccgaaccgatgcgcccagatttatggggagaccgaatccttcgggaatagcttccctatangctgtacttntatttctgcgtnggatttttgctccccataattgtttgagtaccccaacggacacttg

SEQ ID NO: 40904 - DNA, 1006 bp, Heterodera glycines
gagtaaacagcactccccccgatccgggtacagaccccgaaaggctgccctcaagaccgagctcacgcaagctactccgagcatctcagcgccactccgcctgcaaatgccccattcgccactgaacagaaggacagcaaacccccagtctggaggctagcaggccaacgtacagcaacaaacgggtgaatgcagaccagatacgccagctctgtccgtttccacctcatcggtttcacgtcctctttaactctctcttcaaagtgctttgcaactttccctcacggtacttgttcgctatcggactcgtggccgtatttagtcttagatgaagtttaccacctgatttgggctgcgatcccaaacaacccgactccaagacacgtaaagatgggtaggcaccgccagttggacaggtcttgcaccttctctggagccccggtcaagggaaacttgaacaagcgggccaacccaagctcacggtctatacgctacacctcgcaaccccagaggagctgcgattcagcgctggactcttcccagttcactcgccgttactacgggaatcctcgttagtttcttttcctccgcttactgatatgcttaagttcagcgggtgttcacgtctgagttcaggtcgaaaaatcaaagcaggaatgccagtaatccaggcactccgccacagcatgcaaagcattggtgcgcttgagttacggtccgtaaaacgcgaattagaaccacaagttcgcgccagcacaccaaaaccccacagccgagctgagcaagtaacgtaagaacacgtacaagtacatgatcccacgaagcaacgcacaagcagtgcattttatggtaacgaccctgaaccaggcgtgccaatggatgtaactccaatggcgcaatgtgcattcgaatgttttgtgttcaaggtttctgcagttcgcactaattatcgcagttggctgcgttcttcatcgatccacgagccgagtgatccaccgataagact

SEQ ID NO: 40905 - DNA, 731 bp, Heterodera glycines
  unsure (1)..(731): unsure at all n locations
tatgaaaatgttactcaatttatatggattttggggtctttttaacagttgaaattgcccagattttcaaaaaaaaaaccaagttctttcttggaaatttttaattaaacacatttggccaaaaataatttttaaattttcaggtttggggtagtttcactggtgaaatttaagcccgttttagcccggtcaaattgacttgcccgtgatggaaatccatttttttcctgaactgtggtggtcctgaaatacacgaaagacatgttttagcttggttgaagattctaggatggatttcttctatatccatatttttccatatttcgcgatttatgtccatatttccatatttgtccatattttggcatttttccaaaaacctctattagaattgccccaacagataaattggcttttttgacccaaaaaaccgggaaattttccaaaaaaatcatttgtaacaaaattttctcgaggatattaaataaatttaaattttcttaaaaattgataatttattcccgtgcgggattgcgggattttggaaatttagaaaaaaattaaatccggctcagtgtacatatttattatgttcatagttgtcaatatttcgcactttttacatattttcattttgttanaattgagatttttgagaactaattttaggacatttggtgcgtgtataaatatttattccnatattttattagatattttgtgacttttct

SEQ ID NO: 40906 - DNA, 750 bp, Heterodera glycines
ttctatgggaaaaaaacagagaggctcataagaactttagtacttcatcgctcacgaattgtcgcgcatgaaaatttgaaaatttaatcatcgcctcaggaatttgaacccgtatttaaaagataggaaaatgaggagaccaaccaactgagccattagaattaagaaaaacatcaggaaaaactcacgtccatctaacaaaggtttaatgttgacaaaggcaaaggaataggcactgcgcaaaaagcattggacgccataaatttggatgtgaccaaattggaaagtgtcagagtctgaaatggaaaggaatttgttgattggattgaattaaaatgaattcttcgataattaaaatggaatcggtaaaagaaattcattttgtagccaatgggctcttagtaaaaaagaccatccgaccattcccaagtcaccttttggctcatcccactcattaaagtgcagcgaatagaggtcggagcgccggtgagaaaaaacaggcatattcgtacgcacttcctccacataatccaagtccaactccgcgaaacaaaggtctgattttgaaggcattttaaagcagagtttcatgtattcatgaattattctgattgaaccgggtgaaattgagtttgggtaagcatcgagttttcacccagtcaatggcttctggacgttcgagattgaaacccaaatacttgaagccctgctaattgtaaatcccaaggaatcgtcttaaccccccccccc

SEQ ID NO: 40907 - DNA, 806 bp, Heterodera glycines
ttatcatggagtggtctgatcaaatggttttctagtatttccgttgatcactgatcaccggcatttttacttgaattacatttttggcggagaacggaaaaatttgctagtttttttcataattttttttttcaaaatggttcattcaggttgaggaggagcagcgtcggcgtgaggaacagcgagagaactttttgatgagtgaaaagtgagagaacaattaaaaatataattaatattttaatttataaattattcaacaaaaaaaaatcttccaaaatttaaattatttaataaaattaaaaatatttgtttcaggaaattgaacattgtgctgtccgaacgcgatgaacttgttgtgcgccgagagcaaatggaacgggataaacaacgggtggaagccgaagtgcaggaggaacgggcgcgcaagacggagctgcaaatggacaactcacagctgagcgccgcgcgacgccaagtggacaatgacctacaattgacgaaggcaaaaaatataaaaataaaatttgaataaaatatatttcaaaattgaaaaaatgacaattttaaaaggctataaaatgaaatgaataaattttttttattaattttaatttttagacgagattatgtttattaactttagcctgcaaacaaaaaaaaaagaaatttaattttaaataattatatttattaaaaaaggttttttttttattaattatattttttttttattaaattatgtttctttacaatagcctgcaattaaacaaaagaaatttaattttgaatttttgttaattaaa

SEQ ID NO: 40908 - DNA, 772 bp, Heterodera glycines
  unsure (1)..(772): unsure at all n locations
tagagtnncggaaccgggaccaaccngggaaattttaaaaattcaaatcatttttaaaaatttaaaaaaaaattcaaattttaatttatatctagtgaaaataatacaaaattatttggttttttatttaataaattaaattaatgaaaattttcaaacaaattttcttcaattatttcaaacaattaatcatttttggactaaatcatcgaatattaatagaaattcagatttgattttcacatcactttttttcggcgcgctttttcaaaaaacttttgggaaagaaggggtcctgcggtgccgataggcgccgccgggggaaattttaaaaatttgggtgcaatttgttaacagattttcaacaaaaaaaggttggtttttgcgattattaagctcaattggtaggattttcatttaaaaaatgataaaatatgtatcaatttaaaaaaaaaactatgagtaatcatattttctctataggaaacccacgagtatacaaaaaaaaaaatttgtgtccccaaatatttcttaaaccgatacttagggctgagggggctaaagccactcccactccccccccccccccccgaaacgaaatatgaaaaaattatttcaatgaaaataggaaaatttcttaaaaagtatagcattttcttaagaaaatgatcagaaatctcaaaatttccgccggcaccgccggacccaaagtttcttagattttcaaaatttgacataaaaaccgcatttttggaagttaaaaatcaacccc

SEQ ID NO: 40909 - DNA, 938 bp, Heterodera glycines
  unsure (1)..(938): unsure at all n locations
attttcaaaatcaaactcgcccagaaagaaattccggaccattagggttggcgctatcattccgtaaatggggttggaattgtctagagtgttgagcagaaaaagagataggcgtttttccaaaattttcacaatcaaactcgcccagaaagaaattccggaaaaattagggttggcgctatcattccgtaaatggggttggaattgtctagagtgttgagcagaaaaagagataggcgtttttccaaaattttcacaatcaaactcgcccagaaagaaattccggaaaaattagggttggcgctattattccgtaaatggggttggaattgtctagagtgttgagcagaaaaagagataggcgtttttccaaaattttcacaatcaaactcgcccagaaagaaattccggaaaaattagggttggcgctattattccgtaaatggggttggaattgtctagagtgttgagcagaaaaagagataggcgtttttccaaaattttcaaaatcaaactcgcccagaaagaaattccggaaaaattagggttggcgctatcattccgtaaatggggttggaattgtctagagtgttgagcagaaaaagagataggcgtttttccaaaattttcacaatcaaactcgcccagaaagaaattccggaaaaattagggttggcgctatcattccgtaaatggggttggaattgtctagagtgttgagcagaaaaagagataggcgtttttccaaaattttcacaatcaaactcgcccagaaagaaattccggaaaaattagggttggcgctattattccgntaatgnggttggaattgtctagagtgttgagcagaaaaagagataggcgtttttcccaaaattttcacaatcaactcgcccagaaagaaattccngaaaaattanggttggcgctattattcc

SEQ ID NO: 40910 - DNA, 1327 bp, Heterodera glycines
gatctccaacaggaaaaaattttgtttacttttctttattttaaaaaaaaacatgacaagccaaatacaatacaatgatttctaaaatataataattaaccagtttttaaaacataaataattttataagaaaatttatccatttttttcaaaaaatatttttctgttttttgttcctcaaaaatttcttctccaaatacatttcttaatcatggccaactccaattttcttcgaaatttcggcataattttggtgccattcttttcgtgttgcgcctgcaaaggtatcggacggggacccaaacaaatgacaggcatttggtgcttgaggaaatatttggaggaaaatgggaagaaaaaaggcaaataatttaaaaattctataaaataaaagagaaaataaagcaaaaaggaaggaaaacacacagcaaaagaatggaataaaattgaagaaaaaatagcaaaaaaattggggacaaatcggaattacattcaaaaatggattaaacaatttgatctacaaaaattcaaattaaaattggagtaagccatggaacaattaaaaaatggaagaaacaatttggcattcgatatatgagaataacggagaaagaaaaaatgaaaaaatgaaaatttattggcaaataaaaagagaaaatccgaaaatgagtgacaaagaaattgcaaaaattatgaaaattgatcaatcgagcgttttaaaatggagacgaaataaaaatgaaaatagttgtaaaatttaaaaattatggccttttgttgtctaccttattttatttttattttgaccacatcaatttttgtattcaccgtattcttttcattctcataatttttgtattccattcaaataaaggagtaaaaaaggttagccgacatttgcggaccgactttaccaaagcatggaagtgaaacacgtaaaaattttccttggtataaaatcctgaactgacttttatgtgtattaaaatagcgaattttttcgctaatttcactacgtgtagagaagcaagaaaaaaatttccacttgttttgggacttctaagataaaataaaattctccaattgaaacagatcgccttgcatcagcttaccttcactaatttcaattttgggagtatttaatttattgaaaatttaaaaaaaattttttttctttattttgacagttcaatcgggaaatactggtccgcaaatgtcgcactacggtaaaaaatgcttgtaaaatgatcatgtaattgctttattgctattatggccataaaacacggaaatcacgatttttaaatttaatgattataacaacttg

SEQ ID NO: 40911 - DNA, 1018 bp, Heterodera glycines
  unsure (1)..(1018): unsure at all n locations
ctagcaaaaaatggttaagtaaaatcgtaatacgctcaaaaagctttcnaaacaatttangcgctccnaattccttctacaatcgcctttatacatcccattgtgagcgctaaaattatcagagtgccgaaaatcgcatgtgatctaagcctagaaaaaaatggtgtaagtaaaatcgtaattacgctcaaaaagcttttcaaacaattttagcgcttccaattccttctacaatcgcctttatacatcccattatgagcgctaaaattatgagagtgccgaaaatcgcatgtgatctaagcctagaaaaaaatggtgtaagtaaaatcgtaattacgctcaaaaagcttttcaaacaattttagcgcttccaattccttctacaatcgcctttatacatcccattatgagcgctaaaattatcagagtgccgaaaatcgcatgtcatctaagcctagcaaaaaatggtgtaagtaaaaatcgtaattacgctcaaaaagctcctcaaacaattttagcgcttccaattccttctacaatcgcctttatacatcccattatgagcgctaaaattatcagagtgccgaaaatcgcatgtgatctaagcctagcaaaaaatggtgtaagtaaaatcgtaattacgctcaaaaagctcctcaaacaattttagcgcttccaattccttctacaatcgcctttatacatcccattatgagcgctaaaattatcagagtgccgaaaacgcatgtcatctaagcctagcaaaaaatggtgtaagtaaaaatcgtaattacgctcaaaaagcttttcaaacaattttagcgcttccaattccttctacaatcgcctttatacatcccattatgagcgctaaaattatcagagtgccgaaaacgcatgtcatctaagcctagcaaaaaatggtgtaagtaaaaatcgtaattacgctcaaaaagatcctcaaacaattttagcgcatccaattccttctacaatcgcctttatacatcccattatg

SEQ ID NO: 40912 - DNA, 902 bp, Heterodera glycines
  unsure (1)..(902): unsure at all n locations
cacaaatcatctttgcacttaagtacgaaaaatttcctacacaggacgctgggcacacgacgatttgatgtagaaaccttaagggattttttttaaattataactaattttactattcacccagtttttttggtaacaagttagaagcaattcattgaacatatttatcataatatttaaaattgataaaatattaactttcgttttatcatcttacttttgttttcctctctcatcagcaatctgttgaattagcaatgcaaatttttcaaattcggcctcagaaatgtcatcgttccggtctgtttccaacgccaactttgtgtgggataagatcacgtctggccaagccgaatccttaataattatcacatattaagaaaaacaaaatttttttaaaatattaattaaaaggagaaaattataatttttaattttggtgacggatttaactgacaacaaggcatgaacataccaaatcagcctcaacccaggctgacattgcaagcgccgtatttttagtcagtcgatcatactcccttatctgaagacgatgaaatttgtaatcatcctgctctgtcgacacgattccttcacacatcacaccaagtatttgctaaaaatagtgaatgagtatagttagttcaagtaatttatattatttttgttgttaattacaaattttttggtgtttaatcttacataccactctcaccgcatcattaattataatgttaacgtgatcaagaagcggggctctgcgtttctcatatttggttgacacaatgtttaaaaaacacatgaaataaaaaacattatttatcacaaaaactgaaatcgccgtgatataaaccaccngcaaaatttcaaaaacgaaagtttgaagcttggtttttagtcta

SEQ ID NO: 40913 - DNA, 1496 bp, Heterodera glycines
atgaaatgtcaaaaactcaatcaaacaatggctaaatcacaaaaattttatgattttttaaatttacgcaagtaaagtttttggatcttcgaatttttaatttaaattatctgataaatgaaaaaatattgaaaaaattttgccaaattttccaagaaaattaaaaaattttctagttttttgggaatacctttgcaaatttctaaaaagtcgaccattagaggtgtttttcgatgttattgtattttcttatcaaatttaatcaaaatattttcaaaaaaataaaaatggcaaaatataaattttattctcgaaaatcccaaaatgtgtttttatatgcactaaaaagcttcatcaaataaaaaaatttaaacgcagaaatgttgtttttgagcccctttcttcatagcataagcgcaaaatatgttcaacgtataagcctaactcataccgtaccgatccgattctgttcaaaattgaggttggcgttatgaaaatgcccgacccgacgacacttccaatgaaatacgaagtggcaccccaacgaccaagtttattcttttcagaagatggcatttgaaaagaactcaaaaagaaacataaaataaataaaagagaattaaatttaatttattgccaaaaaaaatcaatcggtccaaaatttgctaatcaaagcgaaaagtgttgggaggaaacgaatgtattggacggacggaggacggaatgtgtgctgtctgtgttatcaccgttttttcagccactttttcaatttgcatttgttacgattaattgttggccttttcctgtattaattacggaacaatcaaaaaagcatttgtttgcattgtccaatcaaaaagtgatgagccgattatcgcaagacgtcgcccaatttacaccgtttcactttgttttaaattgacaaagtgtcaacttcgagaaagtctcgaattatttttagtccacttacaaattgaattcacttatatttcgaccaataattacagaaaattatttaaaaaatgatcaacaaatttgaagaaaaaataaaaatattttaaattaaaaattaaaatcaaatgaattgctcatctgttaacagagttcttttcttctttttctttctcaattaaaaccaaatgagatgggttttgagtttacattgcttttctccgatttgtttctaatttttgtgccgggcaaaaagcggaaaaattccattttgccattgatcactttctcacacaatttgggcatcgtctcatgtcatttttggcagtgccgcatcctttgagcaacaaaaagctgctttcaccgaatcaaaaaataggtcattaaattatttaaaatgggtgcttttttacgcttttgtgggcttttcggcaaacattttgcgctcaaacaccaaacactgtgcgcggaacatcgcaagcgttttggggccaattgaaaagtgaaagagaattattttttcattttggatggatgacctccga

SEQ ID NO: 40914 - DNA, 934 bp, Heterodera glycines
cgtggcgcagttgctccgcttttgccgactcgaagttcagtatcggcggcgtctcctgcgacacgtcgtttggcacgtagaagtgcctgtgtgccgttccaccgcctatcagcaacagtgcggcgatgccggtgctggcggcggcaacaactgagttccgctgtagttcttggttgcgtacccactgtgcgttggcgtttccatccaaggagggcttgcctgcgatgcaccacttgatcagcgtgttgtaaaagtacgtcttgcctaaataattgtttttttatttgataaggctaaataagtcattattaccgcatccacccgcgccttcgaggaagaacagcttctggtcgcacccgccaagaattgatgctgagatctcatcaaaggcggtccgttggtctgggttgaggcgtccaatctgctcaccggcaacttgctgcggcggcttgcggggttcccctgcatcctccccataaaagctggcccagataaaaaattcctccaggatctgcgcctgatgtcatatatggtagcccgctgtcagtccttgcagcccaacatctttaaaacataacgattatatggacaatattatgccagctttacacaattggtgttcgtccccatgcagttaatgtaatactcaaggttgagcatcacctcagccgctcggactacagctgacttcggcacagctactgggtggttggcggcaaccggcgggttcatctcgttgagcaactcgtcgaacagcgcctgagggttggacgtatgggggagcgcaagcagcatggcgaattagtactgcaggcgcttgaggttgggcatttcggcgcaggcttctttcaaaaggcggcgaaagtcttcgtcgctctcttgaaggccccttaaatgggcacgtacctacgcaatgtgtcgaaatgcaatgcca

SEQ ID NO: 40915 - DNA, 953 bp, Heterodera glycines
cgctaaaattatcagagtgccgaaaatcgcatgtgatctttacctagaaaaaatggtctaagtaaaaatcgtaattacgctcaaaaagcttctcaaacaattttagcgcttccaattccttctacaatcgcctttatacatcccattatgagcgctaaaattatcagagtgccgaaaatcgcatgtgatctaagcctagaaaaaatggtctaagtaaaaatcgtaattacgctcaaaaagcttctcaaacaattttagcgcatccaattccttctacaatcgccgttatacatcccattatgaacgctaaaattatcagagtgccgaaaatcgcatgtgatctaagcctagcaaaaaatggtgtaagtaaaaatcgtaattacgctcaaaaagcttctcaaacaattttaacgcttccaattccttctacaatcgcctttatacatcccattatgagcgctaaaattatcagagtgccgaaaatcgcatgtgatctaagcctagcaaaaaatggtgtaagtaaaaatcgtaattacgctcaaaaagctcctcaaacaattttagcgcttccaattccttctacaatcgcctttatacatcccattatgaacgctaaaattatcagagtgccgaaaatcgcgtgtgatctacgcctagaaaaaaatggtgtaagtaaaaatcgtaattacgctcaaaaagcttctcaaacaattttagcgcatccaattccttctacaatcgcctttatacatcccattatgagcgctaaaattatcagagtgccgaaaatcgcatgtgatctaagcctagcaaaaaatggtgtaagtaaaaatcgtaattacgctcaaaaagcttctcaaacaattttaacgcttccaattctttctacatcgcctttatacatcccattatgagcgctaaaattatcagagtgccgaaaatcgcatgtgatc

SEQ ID NO: 40916 - DNA, 515 bp, Heterodera glycines
ggattcaaagttcaatttttttaagctctgatagccttaacagcattaaaattaaaaaatcacaatcttccagttttttaggaatattaattttgttgtttgaaatttttattatttttcaaatattcattgacgatcaaatgatcggatacaatcactttcaatcgcttatttaaggctgtttagggggtcagggattgaaaaaacttaattttaaacccgatcttggacaaagccgcaaatgtcgtgacacggtactccacacctctctcgtcaatttgctatggaaattacatttttgagatttttttctttgaaaaattatgagctttttgaaatttaaatttcttagattttcgggttgagggacggacgatttgcaccgtaaaatatgctaattcaatttaaaattagttgaaaaatgtaaacaaacaagatgactaattgggctaaccttgctcgcaaattgagagattaaagttcacgatggactgaagtccgacggagcgcaaaag

SEQ ID NO: 40917 - DNA, 1229 bp, Heterodera glycines
  unsure (1)..(1229): unsure at all n locations
ttatatatatatagaataaagtgggttttcgtagaaaaaattataaagtgcccgtggtttgcccggagggggctgaaagtgcggcattgcttaagcanctttttgaggcgcatctggaaaaaataaggatttttcggtccggcggccagttgagcgccagcggcgctgaaacggcccgaaaaatttttttgtccgtctttggtggcctgtaactttgcgggaagaagagggagcgaaaaatgcttggtgggaggattttaagttggaatgtttgggaaaacttggcgcttatttggcggggctatctacaaaagcctggcctgcagaaattggcgactttttaaatccatttttggcatttttcgaatttcgcgaataactcgctgggggttaagcggagcggattggcgccgcttgagcatttgtgtagtttttaaagctgcatccgatggcgttttcagattttgaaaattttcaaaatttttcgagctaggccccctcgaaaatttttcgtttttgaattttattattttttgccgatttttcccaggaaaacggagaccactttcaagcaaccgtttttcgagctctatcgattggtggcatttttgaaaaaatttcaaaattttccggaaatagaaaaattttccggaattgagctccccatttccgtttgaggcttataactcgtcaggcgttgatcttagcgaaaatttgtcttagagcatttttgtagagaattttaagctctatctaatgtgctttatctcatgtttttaccatgagtttaaaaaaagttataaaattaattgtgattttgaaactcaaaaccataggggggacccaatggttttgcatttcatgaaaaatttttttgctcctaaattagccaaaatgcatttttatggcataatttgaggtgctgaatacgtatatacgctttattttgtgtttcagactttttggaaagtggttaaaattttttgaaaaatcgtcaaaatttgagccctggaaaatcctgtgaaatttcgaaaattcataaatctcttcgtttttggtcaaatttagtggaataaagctttaaaaatagagaaaaattgggagaattttatgagatttatttggaatttctatcttccaaaataaaaaagttattccagaatttctggaaaaattcgatttttcaaaaagaaaatcagaactcccttctgaaaaagtattttataaaa

SEQ ID NO: 40918 - DNA, 804 bp, Heterodera glycines
ggcttagatcacaggcgattttcggcactttgataattttagcgctcataatgggatgtataaaggcgatggtagaaggaattggaacccttaaaattgttggagaagctttttgagcgtaattccgatttttcctccccccatttttttctaggcgtagatcccatgcgattttcgcccttttgataattttagcgttcataatgggatgtataaaggcgattgtagaaggaattggaagcgctaaaattgtttgagaagctttttgagcgtaattacgatttttacttacaccattttttgctaggcttagatcccatgcgattttcggcactctgataattttagcgctcataatgggatgtataaaggcgattgtagaaggaattggaagcgttaaaattgtttgagaagctttttgagcgtaattacgatttttacttacaccattttttgctaggcttagatcacatgcgattttcggcactctgataattttagcgttcataatgggatgtataaaggcgattgtagaaggaattggaagcgctaaaattgtttgagaagctttttgagcgtaattacgatttttacttagaccattttttctaggcttagatcacatgcgattttcggcactctgataattttagcgctcataatgggatgtataaaggcgattgtagaaggaattggaagcgctaaaattgtttgagaagctttaagagcgtaattacgatttttacttagaccatcttttccacagtagagatcgacatgcgattttcggcactctgataattt

SEQ ID NO: 40919 - DNA, 778 bp, Heterodera glycines
  unsure (1)..(778): unsure at all n locations
gtgtcaaagggtgcgcatataagcgactcgctgtgcgtgtccactgcaaatgtaataggtggtaatttatttctgcgccctataacacagaaaatctctatatctctttttttggaatattttacgtgtctcagggtgtgcacataagcgtctctctgtgcttgcccactgcacatcaaataggcggtaatttttatttctccgccctaatccagaaaaaatcactatctctttttttggaatattttacgtgtcaaagggtgtgcatttaagcgcctctctgtgcttgcccactgcatttcaaatatctggtaatttttatttctccggcctaatccagaaaaaatcactatctctttttttggaatattttacgtgtcaaagggtgtgcatttaagcgactcgctgtgcttgcccactgcatttcaaatagctggtaatttttatttctccggcctaatccagaaaaaatcactatctctttttttggaatattttacgtgtcaaagggtgtgcatttaagcgactcgctgtgcttgcccactgcatttcaaatagctggtaatttttatttgtccggcctaatccagaaaaaatcactatctctttttttggaatattttacgtgtcaaagggtgtgcatttaagcgactcgctgtgcttgcccactgcatttcaaatagctggtaatttttatttgtccggcctaatccagaaaaaatcactatctcttaaatggaatattttacgtgtcaaangggtgtgcatttaagcgact

SEQ ID NO: 40920 - DNA, 905 bp, Heterodera glycines
gtctatcgaccaagcacatgaaccaaatgtctgaaccctctcttcctctcgtactaagcaggattactatcatagcaacaggtctttagtagggtaaaactaacctgtctcacgacggtctaaacccagctcacgttccctattggtgggtgaacaatccaacgcttggcgaattctgcttcgcaatgataggaagagccgacatcgaaggatcaaaaagcgacgtcgctatggacgcttggccgccacaagccagttatccctgtggtaacttttctgacacctcttgctggaaactttacacattcaaaaggatcgataagccacgctttcgcggtccgtattcgtactgaaaatcaggatcaagtaagcatttgcctttttgctctacgagaggtttccgtcctctctgagctcgccttaggacacctgcgttacgctttgacagatgtaccgccccagtcaaactccccgcctgacactgtcatcggcgcgggtcgccgggccaccgggtggcccgacttaacaccaaaatggacaccctttcgggcgcactcccgttttaccgattaagtaaggaatcgatgaaagtagtggtatttcactggcgccttgcggctcccacttatgctacacctctcatgattcttcacaaagtcagactagagtcaagctcaacagggtcttctttccccgctaaatttgccaagcccgttcccttggctgtggtttcgctagatagtagatagggacagtgggaatctcgttgatccattcgtgcgcgtcggtagttagccgacgaggcatttggctaccttaagagagtcatagttactcccgccgtttacccgcgcttaatcaaagtttcctttggcttaacattcagagcactggggcagaaatca

SEQ ID NO: 40921 - DNA, 963 bp, Heterodera glycines
cccatttttggttatggatttgatttaatacacattaataaatgataaaattacacggggcaagcagacgcagctgctgcatgtttgccactctcccgtagcgttcaaccatacggatgcacgtattaaggatcaagttttcctgttaaagcaaaaaaagaacattttaaaaacattttaagtttgtgattttaattataattagcttttgagtggtgtggagggaagggggaaatgggatagattaagatcaactaagatcccaaaaaaaagcaatacttttcaaggcaaaaaaatgaaaaacttttgttaaaaggatatatgcctgccacctaaaggtccaaaaaattgcgaaaaatcgacttatagtgggaggaggaggtggtggcaccctcagctgaccaaattttgactttgacacgacccggagtggtgtagttaacctcatcccaaaattaatgcacaaaaattttgaaatgagtaaattctaaacatacgtatgccggatcgtcctcattggatcacgcacgttttttgcagcaccactgatcacccacgttttgtccggcaccactgaccagtcgcacgttttttcaggcaccactgatcaggcacgttttgtccggcacggttcactcgcacgtttttccggcacaactgatcacgcacgtttcaaatcaaaaggcaatctaaaagggtttaaaaatattaaattcaaaaaacaataaatgtttagcattataaaaagctgcttggccggaggaggagggggggggggcagtaacaggagttgaagaataatgaacacaacgattgtccaagttgcttaaatggggctgggcctgtgattagcattaacggtacctcccccaccttcccccccccccccatagaacattgaattcaactggatatgaaatgataatttggtcaaaagattataaataaataagatatttaaat

SEQ ID NO: 40922 - DNA, 952 bp, Heterodera glycines
taatcctgtattttattggtcccataaaaaaaagattaaaaagttgtttttatgcatttcgtagtactcgagggttttcgggggcgctgatcacgaatatgacgtcagttttgacctatttcgaatcccgaacccgaattctaacacaaattaatttttcaccaaaattcatatgtattgtccaaaatcgattcaaattcactaaatggccttgaatctacaagaaaaaatattatttacaaacaaaagtcatttttttgatactttactgatttataagtaacgcaaaaagatttctctcagccaattttgtgtttttttaaggaatttttccttaatatgtacccccgtgtacccaccccctcaatcactccttcctccccattggctaccgaatccacaggaggagtcctatttcacaaatccgctcataaattttgtatttgattttccacctcactgcccccgtcctccgagtcttggtcttggtcaaagtcttccccctgctgttgtccacggaaattcacgcgtcgttgcaaaattgaacggcccacatgcttaattttaaaaatataaaaatgcagatggatttcaaagctacacatatatatatttgattttttaatgttcgtattttaagtgtaagaaatttgttgtcccttttctcaccgttcttcgctggccaccgccaaagtgcgaagagtgagtgttcgccaataaaaaggggtcctcattttctttctcacggcgtttggtgggcggtttgaacaaattctttagatttttgatcatttttttagtgttaattcgagtaaaagacttaaaaaacatgcaaattaatcttttttgcaatactataattagaacttttgaaatgaatttgttaattggtgcttcgaaccaaaaaaatgacagtggggccaacctatttgattaagttttgaaataattt

SEQ ID NO: 40923 - DNA, 1134 bp, Heterodera glycines
ctgtttgatcatttcctaaatcaaagacaggataagccaattagtcccccgtaaaacttcgccctcccctaattgccaatttcctttcgcccgtacatttcgctgttcgtccggtgccttcgcaatttgctgaattcgaaattggacttgtgcaaagtgagtgctcagttgcttaattgaggggccattcattctttgccgttctttgcctttgccctcctcccaaaatgactgaccatcaccgattcgctcagtctctgctgttgctgctccaactctttgattctgccggtcgattcgctgctaatttcaaattggaactactaaaaaagatgccattgaacgaaaaacctttgccgaaatgcgccattggcacagttttcctcctcctcaagcgaagagcacgcccatcggtcgatgtcagcacagaccgagtcatcatcagcttaacaaacaattgggggaaagtgattctaatcactaaccatcagaggaatgggcaaacagaggaaaggcgggacaattatcattagcagcaggggactgaattatcgtaatgggcggcgaatggagcaaaagggagggcgaatcagcgcgagaaacaccgccaattgggcgggggaggggcgtcgggtcggaggcaattagcgaagaaatgggcgggacaaaacccccaaagggatcactcttttcttcatccattccaaagcagaacagaagcaacgatcggcggatgaatatgatcaaaaagggaagaaaaaagagggaaaatgtttaaaaatggagagaaatgaaaagggagaaaagtcattcggagaaggaaagagaaagagagagagaaagagaagggatatagaggggagcgagagatgagagaaatgccggcggggatgaattgagagtgcgtgccgttgtatgttcttatccgtttggatgccgtcctcattctttctatgctttctcggtttctctttctcacttctccttccatcaatatttaatggacatcacctcagggcacagaaaaggggagagtgccaatgccaacaaatgtagtaaagagaaaagaatgacgaggacggaatagagaaggaaacagaaagtgaatggaaaggaaaagccgagagagaaaag

SEQ ID NO: 40924 - DNA, 1123 bp, Heterodera glycines
  unsure (1)..(1123): unsure at all n locations
tttttggtagcttaaattttttttatatcatttttgcgatattgtagtattgtaaaatgtaaaaattatttatccagaatgtatgtggaattttttaatcctaaaagttcaaaacaaaaaaaatgcgcctattttttaagtttcttcaattactgtatttttaatgtaatttttttttctaaggattaacctgtagtttttattgtaacttttcaagggttttaaagtttatttcggtaagcacaaaacattaaaaaaaatcgccgggaaaatttcagaaaacccctctttttttagtatagatttttggcactatattttccggcaaatgttttaccctgctcggttttcttttcaaaaaatcaaaattagatttaatttaattgcacttgcccggatgtcaaaaagtcgccacgtttgtccaaaatcaggaacatgtccttcttggtcttcccgtcctgtcccgtgtacaaataactgttacaaaattaaaacaataaaatttaaaatataattccaattttactgttcgaggggcacgggccgcttcagcgtttggatgacaaaaatttttcgattttttatgcgcctaaacttttttttggctttttaaaattcagtttttgccaattttgctcacccaacccaatccgcaaattccatacagttgggcaccgtggcggacaacatcacaattttgacatgggccggcaacatgatcagcacctcctcccagacatggcctcgctggaaattgtttttcaaattttaatgaatttttctcgtaaaaaaagcgatttttttaataaaaaaaaaagcacaccaacctcggcatcgttgatgtagtggacctgaaaacagaaacaataaaatggaaattaaagcatccaaaatttttaaatccgaaaaatttcggctaatttataaaatttattatcccaaaagttgcaacaaaaaaaaacaaccaaaaattgtgtttgtgccattacctcgtcaaaaatgcaccactccaannttccgatgacttccgacccgttgtaaagcattgagcgcaaaaatttcgtggtcatcaccaaacagaaggcgtccgagtgcaattggatgtctaatgaggggggggggg

SEQ ID NO: 40925 - DNA, 267 bp, Heterodera glycines
cctcccatttccccccctcccctctttccctcccatttctctccctctttccctcccatttctctccctctttccctcccatttcttcccatttctctccctctttccctcccatttccccccccccctcccctctttcactcccatttctctccctcttcctcccatttctccccctcccctctttccctcccatttctctccctctttccctcccatttcttcccatttcgctccctctttccctcccatttcccaccccctccg

SEQ ID NO: 40926 - DNA, 969 bp, Heterodera glycines
  unsure (1)..(969): unsure at all n locations
ttgacgtcaatgattattgatttaaagctacaatgaaaaaataaagcaatgatgcattttatataataaattaataaaaaaaaatattttcaaaaaattatttaaaaaaatntaaagcattataattaggaatgatatttttaggtttattttttcctgaattccctatggcctgaagtacacggaaaaaatttttttcttttcgagttattaagcctattttcttgattttatttttagagcctaaaagtctaaaaaaaattggaaaacttattttcaattattttggcgttttgcccaaaatatattaacaaaaatacaaaaaaaaaaaaaatacacccctaagaatcgaccctaaaattttcaaaatatagccctatgaactgaaaaaattttcgcaaaaattatgttcaaaatttatttcttgacaagaatttttgattttaaaaattatttatttcattactgattttgctaaattttattatttttttgaataaattttgtcattatacaccccccccccctaaattttagactttttagtgccaattttgaggggtttttagaagcgaaagcctacctattttggcagttttattcatttaataatgaatagtaataatttttaattttcattatctgtttttatacagaaattttcacacgagaacaatggaaatagcgtttatataaatgagagcgaaaaagaaaaaaagacaacataaaatagacagttggccaaatgaagagcatgacagagaattagaagaaataccacctgtggcataggtcatacaattgttggcatatgcagtatgaagtttatagaaaagagagtggaaaagaaataaagacaatataaaatagacagttggccaaatgaagagtatgacagagaaaatgggcgaaatacgacgtatggcataggtcatacaattgttggcatatacagcatgaaagaagata

SEQ ID NO: 40927 - DNA, 1314 bp, Heterodera glycines
tccctcgttaccggcgtgttcgtagtggccaaacggcacatcgcatgttcggcgtgcacgcccgtcttctcgcattgttcgcacaggtcaaagtccggacagaccatgcatttgtaacgaatgccgaccacacccccgtcgcaaagatcgcacataatgtgcggatgcaacgacttgtccccattgccattagtgacgtcacgcattttgccgattttgttgatgtaagggcaacccgttttgacaactccggtcttaacagttccttcgcctcctgtaatcgtataaatagaaacaaattgtataaatttctaatatttttgcgacttttaaagaccaatttgtaatatgaaataacaaaaaaaaagaaacaaacccatcgtttcgagtgtcactgtgtctttgttcattttcttctgaaagtggtcgagcatcacacgcatttcggcatccgttgtgaaaacaattgcatctccatcggcgtcttgaaaatgaaaaagcattagcaagaggagagattctgtgggattcactaaaagtgggccaaactcttgaatttcaaaaaaacttttagttctcttttgaaacttcaaatgtacaattaaacatttggtgatttactaaacagaaacactgccaaatgtcttaataacgtgattatgactattacccagttttgcaaaatgaaaaaacctcgataaaaaagttggccactgaagttgggctcaatggtgcgaatttcagcctgaagtgcgctgtaagtccactcggagcattgaaaacgtcgccagtttccgtggaagaaccatttgaccgcaaccgacacgttctgtttggtgccgtgttcagtggcggaggcgtcctccgccagttcgatgtcattgtgctggtggtcagccatcagcagggaaaagttggtgtttggtttggaatttattttgtattgaataactgaaacaagaaaattgtacaacaatttgaccaagagaacaaagaaatattatacgggtgactaatttgagaaagaagcgatatttaggcaaagaaagggaatgggcaatgaaatgggcgaaatgaacgagcgtttgtggactttggtcagcgaatgagcggcggagcaaagcaagaaagagacgaccaaccacacccatcgattatctcccgagaccaaaggtcggcaaacaattcgctatcaattaggcataacaaataacacatgcacacttatcgggacaagcctttcattttaacagtttaattaactgttgcgtccgttcaacagtcaaggaataaatattgatttattcacacaaa

SEQ ID NO: 40928 - DNA, 1007 bp, Heterodera glycines
  unsure (1)..(1007): unsure at all n locations
cgaaaaataatacttgctggtgtggtaagtgtgaagaactgtgtacctccaggcaaaaaattctatgaaaatttatatgcatttgtagtgttctcagcagtttccctgcaaaatttggtgagctttcgatcagtctagaacgttgggtgataaaatgaaaaaaataattttcaaaaaataatacttgtgtggtaagtgtgaagaactgtgtacctccaggcaaaaaatttatgaaaatttatatgcatttgtagggttttcagcagttcgcctgcaaaatttggttagcttccgatcagtctagaatgttgggtgataaaatgaaaaaaataatttaaaaaaaataatgctggactggtaagtgtgaagaactgtgttcatccaggcaaaaaattctaataaatttataagcatttatagggttttcagcagttcccctgcaaaattgggttagctttcgatcagtctagaacgttgggtgatcaaatgaaaaaaataatttaaaaaaaataatacttgtgtggtaagtgtgaagaactgtgtacctccaggcaaaaaattctatgaaaatttatatgcatttgtagtgttctcagcagtttccctgcaaaatttggtgagctttcgatcagtctagaacgttgggtgataaaatgaaaaaaataatttaaaaaaaataatacttgtgtggtaagtgtgaagaactgtgttcctccaggcaaaaaatttatgaaaatttatatgcatttgtagtgttctcagcagtttccctgcaaaattgggtgagctttcgatcagtctagaacgttgggtgataaaatgaaaaaaataatttaaaaaaaataatgctggtgtggtaagtgtgaagaactgtgttcctccaggcaaaaaattctgagaaaatttataaagcattgtagggttctcagcagttcccctgcaaaattngnngtagctttcgatcagtctagaaatgtgngtgataaaatgaaaaaataatttaaaaa

SEQ ID NO: 40929 - DNA, 1635 bp, Heterodera glycines
  unsure (1)..(1635): unsure at all n locations
gagactggggagtgaaaaagccgccggaatttttcaggagtcgagaactaaccgagaatcactaatttgcacacgacgccgatacaaattcagctgtaaaaattcgtgtctggtcaatttgtcaccccctttttctagcaaaatatagcggatccaggagattatgtcaatgggatttaaaaattataataaacaaatgaatgtaaaaatttattaaaaatggaaaaaaatgtttaaaataaatttattggtttacaaaatattattatgtgctcacggaagggtccactaattttttaattttatgctaatgctacaaacgcacaaaattatgatgctattgcaagattattatatatatttaaaattatattaaatcaaatacatatataaatttttttgataatttcaattgcgaaagggattattatatataattaattgaaaattctttaaatgggcgatcgaaaaattccggtagacattccgtacattaaggcaccgtaaccaatgagctgctgtttgctgcatgtggtctaagaacctgcaaaaaaataataaattcataacattactccatggctgggaccaaattcgagattctttaggtggtccgagacaaatgacactttattaatttttttataatctaagtgcttatgtttaaataaatttgttttttcaattgttctctctattgactcagcattcattaaaatgatttataattccaggaatctgaaacttttgacttataatatttgtttttttaattttaattcgaaattcattatatattcaatcagtattatacatgaaataccaaagaataaataaggtattttaaaaattgaaaatctaaaataatttgttaaagcttgggaattcggaaatttcatattcccgttcttccttctggaatagtcttttttcggcaataaaatcctatctttaatgcataaaattaacttctttaattgtttttttttgatatcgaatatagcactgagaaatttatgaaaatttttgttgaaaaatgtcaaaattgtatggattttcaataaatgtgccattgtcaattccgcaccgcttggacgttccagtggggttgggaaattttaaaaaaagtttaaaaaaatgttaaattttttttcttgtaaacttataaatttttctaatttttgcgaatatccacaaaattaccattttggtgaaaatctatcaaaaattaatcaataaaaaaaaatattcgcggcaaacgcttgcaaaaaaaggtagaacagtcacaattaagatttgcggttcaaaaatgatgcgaaacgcgctgctatacgcgtatacaaaaaacctcgcccgcgattggcggtttgctttgaagttagtcaaaaaccatcatttgactaacgtcccaacactttcgcttcacaacacttcgcccccgcccggcagcacatacgtaaagtgccgtttctttgatcactttgaaaggcaacagaacgtcctgttcgttggcgtcctctttgttcacacaanaacggatggtcgtacgattttccggtgcagcggcgatcacgtgaatgtgactactgagtctcaatctttcaacaagttttcngtcacctcttccgaaccatc

SEQ ID NO: 40930 - DNA, 1027 bp, Heterodera glycines
cgggagcccttttttagtttttaccgcattttttggaaaaatctcaaatttaaagaaaattaaatattgaaactttgaagtttttttaaaaatattatttcattagcaatcaaaaaagattttatttaaagtaacaattgaagaaaacaataaacaaaaatttgaattagaatcgccacaatctctcttctgtccttctccatctctaatttctctccacttttcctgtgctctctctctctcttcctctctctgtcattgctccatttcttccccatcattttcctctgtttgtctcttctgctgtccatctctgtgccaatctccgcctttcctgcgctctctcttcgcttctcgtctctgccgtctcttttccacccgtcctccgccggcaccgcctttccatgccgccgctttctttttgtttgcccctttccatggccgtgttcgtccaacattttcaatttgctgctgatttccaccatcatcatcaccatcttcacccatttgctttgtcgatgttctcaacagatgagcacttgggcttaaaaagaaattttttttttaaattttttaccatggcaaaatgcgtgccaaatttttttgcataggggagaatcaattagacaatttttcaaagtcggtcgttttccaatcactcgagaaaatttccatctaaacaagacaaactcgcaaactgtaaaccggaaactgtatttgcaatttaaaaattattttcagcgtttttcaaaattttaaagatactatatttttctggctaaaaaatttttattactagatttttttgaaaaattctattattaaattttaaaattttctcggaaggacgacagaagggggagggggggggggctgtggaaatgagatgcacccgcttttttggaagcaaaaatgcattatgttccataaattgacactcaattaaaagcattttcaactttggcgtcgaataacaaaaaaaaaaaaaattggacatcatttacaatacttcaaatgctacccaaat

SEQ ID NO: 40931 - DNA, 1521 bp, Heterodera glycines
cacgaggccgcgaagaggccgagtgagtaccttcggtgcaggaaaattattaaattttaaaaattttttaattgctttttaaatatgccaaaaaatgtaggcttaacttttttagtgaaaattcgatcactcatattttttgctaattgagcagaagcgtaccaaactttgcagggatactccccggtaaaggactaacttacactgaaatgagcgccgagctagctggctcaaaaaaattttcgaaaatctgagtctttcgtttttatttattttttgcaaaattaattcttaaatattttttcagaaagggttctgaaacgcaccaaattttatttacatgttagtttaggcactctgatgctttttctatcaaaaagggagatgaataaaatttttaaaaatttttaattcctttttaaacaggccaaaaagtttaggcttaactttttttttcagaaactgatcagaagcgcaccaaactttgcagggatactgaaaggaagagaaataacctattttaaatattatctagtcagttcatttaaataatttttatccaaaaaatttttttttgggttttcggggcagtccccctgaaccgatgcgcccagatttatggggagaccgaatccttcgggaatagcttccctatagcctgtactttaattctgcgttggatttttgctccccataattgtttgagtaccccaaacggacacttgaaaaaatcgatttatttttgttttcggggcagtccccccgaaccgatgcgcccagatttatggggagaccgaatccttcgggaatagcttccctatagcctgtactttaattctgcgttggatttttgctccccataattgtttgagtaccccaaacggacacttgaaaaaatcgatttttttgtttcataaatatttttttcagaaagtgctctaaagcgcaccaaattttatttacaacttaattttagcactctgatgctttttctatcaaaaagggagatgaataaatttaaaaaaatttttaattcctttttaaacaggccaaaaattttaagcttgtgtggtaagtgtgaagaactgtgttcctccaggcaaaaaattctaagaaaatttataagcatttgaagggttctcagcagtttccctgcaaaatttggtgagcttctgatcagtgtagaacgttgggtgatcaaatgcaaaaaataatttaaaaaaaataatgctggtgtggtaagtgtgaagaactgtgttcctccaggcaaaaaattctaagaaaatttataagcatttgtagggttctcagcagtttccttgccaccgccgataggcgccgccggaaaaattctaaaattttgagtgtaatatattaacagaacttgtcaaaaaatgatcaaagttttggttaaatttgcggttttaggctgtttaaaaaaagagaaaaataataatttttaaattgaaatattttttattaattaaaatttcaattgaaaaataatttaaagaaattatt

SEQ ID NO: 40932 - DNA, 1447 bp, Heterodera glycines
ttttaatctgctttcttttttcgaatttttcgagaattctttcgcatcacgaataattaaaaaaacgccaatttttaaattttacctaaatttttgcacacccacagatcagtttgaacgagagcggtgttggcggtgatgacagcgttaccaagccgtactccatctgttccagcgcgtccaccacgtcggacgaagaggggacagcgaccaaatcatcggcgacgacaggcggtggtaaatcaaccgaaacggatgacccgttgacggagatcgaacttcgcgatgtgtgccgggacggcacggccaaggcacgtacggaattggcgcaaaaatttccggtctttttttcgcagtggtggacggaattgttatgtctagaaatttttaaatgcttttggggcggaggggatagtaggtaggctggtcggactgcttgtgttttttgcattttatagaaaaatacatttgtaatttcgttatcggaaaatgcctttcacaattgtaatttagttactggaaaataagttaggtattaacggaaatgcgccttttcatttgatattttacaattgtatttagttagggaaaatgcgcctttttatttgatattttacaattgtatttggttaccgaaaatgcgccttttcatttgacattttacaattgtatttagttaccgaaaatgcgcatttttaattgacttttacaattgtaatttgttatcgaaaaatgcgcctttttatttgatttttacaattgtatttagttaccgaaaatgcgcttttcatttgatattttacaattgtatttggttaccgaaaatgcgccttttcatttgacattttacaattgtatttagttaccgaaaatgcgccttttcatttgacattttacaattgtatttagtgacgtgaaaatgcgccttttcatttgacattttacaattgtatttagttaccgaaaatgcgcatttttaattgacttttacaattgtaatttgttatcgaaaaatacgcctttccatttgatattttacaattgtatttagtgacgtgaaaatgcgccttttcatttgacattttacaattgtatttagttaccgaaaatgtgcatttttaattgacttttacaattgtaatttgttatcgaaaaatacgcctttccatttgatattttacaattgtatttagtgacgtgaaaatgcgccttttcatttgacattttacaattgtatttagttaccgaaaatgcgccttttcatttgatattttacaattgtatttggttaccgaaaatgcgccttttcatttgacattttacaattgtatttagttaccgaaaatgcgccttttcatttgacattttacaattgtatttagttaccgaaaatgcgcatttttaattgacttttacaattgtatttagttaccgaaaatgcgcattt

SEQ ID NO: 40933 - DNA, 1015 bp, Heterodera glycines
  unsure (1)..(1015): unsure at all n locations
aaaatgggaagaaatttaggggggggataatggatggatcagtatgaaaaaaaaagcnaatcattaaatggataattgtgggggataatcactcactgatcaggggatgatattgaccagcggaagggctaaaatgatcaaaggcattggaaaagcaaccaaaaatgcgaaaacagtttattctgactatataaagcattcaacaacaacatatagaaatcttgaaagaatctagaactgatttgaaaaaaaatcacagtagtcattgggctacgataaaatattttaaaatattacggtagagctatgggaatggcatgaggcaatttttataaatgaaaattgactattcaaaacaacaacaacaacaacaaaaaaacgatcgaatcagcaagggcatatgtttctgatgagagggacaacttttgccaaatttttttaaaattttttaaaaggggattaaattccccggaaggcattggcattgagcaaaaagcgcatttcctgatcaatcttccgctgctggaggtggtggtggtggtggtggttgcagcaacagttgccgaaagcgcaactgcacgcccgtcatcatctccagcaacagccacaaccagccgaacagtccgccaaacttttggccgtcgccgtcgttctcccgtgccgtatgaccatcatccgcgacattagcattggtgccattcagctggtgccgataatatatgttttttttttatacaataggttggtgcggctagaaattgaaaattttgccagaaaaaagaaaaatcaaaccaaaatttcaaaattttcatttataaattttaaggtcagcagaacgatggaggttgtgtgtgtgtgtgtaaatttgtgaaaattcaatcaaaatttgtattacctatcatcatatgtagtatgtatgtatttgaaatataattatattgaaaaattatgcgcaattaaatttgcaaaaaaccagcagttaaaatgtgcaaaatatatgtagtgcaattattag

SEQ ID NO: 40934 - DNA, 749 bp, Heterodera glycines
ttgtgctaacggcaaactagtttggtgccgttagcaggtggaaccgatcaacaacacttcggtcgtcgaggaccaaccacacaatcaggtcgccgtaggaccaatacaacaaacgaattgtgctaacggcaaacaaagttggtgccgttagcagggggcacctcccactgcacatcggacgaaccaaagcgaaacgaaaatggatcgtaaccaacgaggacgaatttcagggggatttcccctccgaccggaagggcggggagcggacgaatgcggcgcagctggccaaaacaaagaaagtcgtggacgcgcaaggcatgggttcaagtcaaacaggtgttacacccgcggcatcaaagaatttgcgcagcggaacaattgcggtgaggtcggtacgagatcaaattgagagagtggcggacacactctcggcgcgaatcgcagaagcgcgggagctgatggactcggatttcacgaggggcgaagcgctcgagcacgccgcgcggctgatagcaatggagaggggactcggacaggtcacccggatttttgaagggcacttcgataagggaatagcagaagcgggtgcagcacccgaggagcggcaggatttcttgtacgattccgttgccgcccctttgccagctacgacgaagtatctgcgactgcgggagcatccaactcccgccgaactgctccaaattgcagcggagcatctcagtgatttgcaagctgatgaggcaaacatt

SEQ ID NO: 40935 - DNA, 884 bp, Heterodera glycines
tatggatttattttttaaagtgagtcaaacaccctattagtgctttgctgtgccgagaaccggcaggcaatggatggctttcaatctgcaagaaattagattggcaatatgtggttgtaaaaaacttttgggtatggaattattttttgaagtgagtcaaacaccctattagtgctttgctgtgccgagaaccggcaggcaatggatagctttaaatctgcaagaaattagattggcaataagtggttgtaaaaaacttttgggtaatgaattattttttgaagtgagtcaaacaccctattagtgctttgctgtgccgagaaccggcaggcaatggatggctttcaatctgcaagaaattagattggcaataagtggttgtaaaaaacttttgggtaatgaattattttttgaagtgagtcaaacaccgtattagtgctttgctgtgccgagaaccggcaggcaatggatggctttaaatctgcaagaaattaaattggcaataagtggttgtaaaaaacttgtgtaaggaattattttttgaagtgaatcaaacaccctattagtgctttgctgtgccgagaaccggcaggcaatggatggctttcaatctgcaagaattagattggcaatatgtggttgtaaaaaacttttgggtatggaattattttttgaagtgagtcaaacaccctattagtgctttgctgtgccgagaaccggcaggcaatggatagctttaaatctgcaagaaattagattggcaataagtggttgtaaaaaacttttgggtaatgaattattttttgaagtgagtcaaacaccctattagtgctttgctgtgccgagaacccggcaggcatggatggctttcaatctgcaagaaa

SEQ ID NO: 40936 - DNA, 1212 bp, Heterodera glycines
ccgatatttgaaatgctaacgaaaaaaattcttgcccaaaaaaatgcctatttcttttttctcttggggattggcccgcaaacttggtaccaacatttgccttctctagtctggctctaccaaacactcacacgatatttgaaatgctaacgaaaaaaattcttgccgaaaaaatggctgtctcttttttctcttggggatttgaccgcaaacttggtaccaacattttccttctctagtctggctctaccaaacactcacacgatatttgaaatgctaacgaaaaaaattcttgcccaaaaaatggctatctcttttttctcctggggatttgaccgcaaacttggtaccaacatttgccttctctagtctggctctaccaaacactcacacgatatttgaaatgctaacgaaaaaaattcttgcccaaaaaatggctatctcttttttctcctggggatttgaccgcaaacttggtaccaacatttgccttctctagtctggctctaccaaacactcacacgatatttgaaatgctaacgaaaaaaattcttgccgaaaaaatggctgtctcttttttctcttggggatttgaccgcaaacttggtaccaacatttgccttctctagtctggctctaccaaacactcacacgatatttgaaatgctaacgaaaaaaattcttgccgaaaaaatggctatctcttttttctcttggggatttgaccgcaaacttggtaccaacatttgccttctctagtctggctctaccaaacactcacacgatatttgaaatgctaacgaaaaaaattcttgcccaaaaaatggctatctcttttttctcctggggatttgaccgcaaacttggtaccaacatttgccttctctagtctggctctaccaaacactcacacgatatttgaaatgctaacgaaaaaaattcttgccgaaaaaatggctatctcttttttctcctggggatttgaccgcaaacttggtaccaacattttccttctctagtctggctctaccaacactcacacgatatttgaaatgctaacgaaaaaaattcttgcccaaaaaatggctatctctttttttctcctgggagattgaccgcaaacttgataccaacatttgccttctctagtctggctctacaaacactcacacgatatttgaaatgctaacgaaaaaaattcttgccgaaaaa

SEQ ID NO: 40937 - DNA, 745 bp, Heterodera glycines
  unsure (1)..(745): unsure at all n locations
ttaaaaataatattttgatataaatgtatctgtgccggttgttcgaagcggcatctcatttataaagctaattaatgagtttaatgcactctgactctctgtcattggaaaaaataattcatttaattatcatagttgtgttttatttttaattgattttttaaacacatatattgtttatttatttttaaaaattttatgaatttgattttaatttagaaacctaattaaaaatattataaatatttttttattatatatttgatttattttcaatgttaaccgcggctttctcatcgtcatcttgatcgtacaacagcttactgcaaaattcttcttcggccataaggcctccaattttaatttcaaattaaattattcttcaatttattatattttatttaaattatttttttatttaaaaaaaatataatgcttttaaaatcatatttttctctataccttttattaaattattttctatatcttggcaccttcaaatatcccccgattcttcataacgtccttatttttggtttaatttattttttaaaagtaattttattttatatctcaatatattatagaagcatttataatattgaaatttgaaaacatttattttcgctttttgatccaaattgttttctacaatgaatacttctaataatatgatatattcattaaatattttgttatcttattttaattgctaactaatttttagtcgattgcttcanattcc

SEQ ID NO: 40938 - DNA, 818 bp, Heterodera glycines
atcattattctcttatatatattaatttacattaattaaaaaactgctcatttataaatattttaaataaaggtcatttggttttcttattaactttaacataaaaatatttaggtattaatttttcaataaaaggaaaaatgaaggtattcactaggatcattaatttatttttcgaattaaagaatggttttgggtttggaaaccataagttatatagacagtgaaataaaaataccaataagtcatactgtattagtaaataaaagcaatcgctttaagaaacaaaaagtcctattatataataaataaattttttaaactatcttttaatgtcattatatatatgttatataggttttgagtttcgtttcaaaaactaattccggccggccgaaggccggccggggtctgaaagtggtggaagggtcttacaactttttgaggagaattcgggaaaactataggtttttttctccgagggacaactgagtcccagcggctcgaaaactgactttgccgccagtctcagtgttacgaaattttttgcttttgctttcagaacatagtggaccccaaaagcgaaatgccccaactatggcctacaactttgccagcaaaaaatttttgatcagatcaaaggcctgacctgtaggttaggcaacgtaagaatcactttttttggacacttcagtaccaggcgaatagctcgtaagggtttgctctcagcggggggtggccagcagactttttgtagaactcaatgagctcgatttttagtaattttaaaatttcgaaaattttgacaatttctcgag

SEQ ID NO: 40939 - DNA, 1564 bp, Heterodera glycines
aacagtgaaaagggtggacgattgcgcatcaaaaaacgagtgccgaacaccaccagcacataggcaatggacacctgtggcaaattttagagagtaaaatgattagtgtaatcagattttctgtctggcaaataagtgataaatttcaaatggatgaaaatacttttccggagcagcattttgaaactttaaaaatcaaattttcctgaatgtgaaccagatcaaaatctgatcaaggatgattcataaaagagccatgaaaatttggtctaattaattatttttaatttttgcttttggctgatttttgccactatttttaatttgctttaactgtttgacaattatttggacttcatttcattaactttccattaagagatttattgcccacaaaattatagccctattcattaatgttgctcgagaattttggtctcgagtctcggtctcgattttttcaattataaagagttgagagtgctttttggtaactttaaaataatatttgtaaaaatctgtcttattaaggctagaggcccaaggttggggaaaagggatttgccaaatcggagagggccgggaaaaagttcaaaatttaagcggccaaaaatattaattgtaaaattagtcaaatatttttaaattttatgctgataaagcgtaattaatttttcacctgaatggtcaatggaaaacgtccgtcaacccattgcttcgcttcggcctccggaaatttgtcggcagtcaaaatgtccaaaaatttttcgttttcaaatggcaccggtttggtgacattctgccaaaaagaaatgccgcttgaaattgacatttgaatctgcaaaaaaaaaaaaaataaaaataattttttctcgaaaaattgtgtagaaaatttttagggtggcaatagaacaaatagggatggatgagaagacccatcggcacccctaatttttaagggaaaatagtattttagctgaaaatttcgattttccttgttgatactatttctaggcctatctcatcatttatccgaaaattttgctaaatttatcaaaacttagcgattttttttgggtgataatctgttaaaaatggtaacaatttcaatttttttttcttgctggttgcgcctctcggcagcgccggaccctaaaaattcttctttttttatttgaaagaaattactaatgaaaaattaataataattattatatgcattttaaagaaattttaaatatttgttttaactgaaattttgcaacttttttatagaaaatttttaagattttttagtagcggggcaaagattattttcattttccgatcaaaatgaatgattaagttaaatgaatgtgaaatgttctgctgctgtccgtcatcatcacaccacatgaaatgcagcagcaaatgaatgaatggggggagggaaaatgaaaatgctcaatttgtacaaatcgaaaggaaaaaattcaagaaaaaatcattaactttaactgttagacaggagagaaaaaaaacgggggggtatataaattaataaaaaaataattataaataatat

SEQ ID NO: 40940 - DNA, 1318 bp, Heterodera glycines
tgtttttgcctctttcttttcctttttttcctcgttcctttcttaacttactttttcctctttctcttcctcctcctcctcttcttcatcctcttccgtttcctcatcctcttccccatcatcagtcccagttattccctccgctgattgaatattttttgctgcttctcctcctcctccatcattgtcttcttcatccccatctttttggtccgccagcggcgcttcgttggccaattctatttttttccaattaaatttaaatttaatttttctattttttccaattaaattttattttaaattgcatttttaaaatttaccgctttcattttcgtccgaaaaaatggtcaaaatggcggagcacaacaacacaaacacaatgagcacaatccacgtttttaagccacccttttgaaaaaaaattggaaatttaatttttgaattttgaattttccaccttatttacactgtaatccactcgtttgggggtcaccattagggccatgtgatggacatgcgaatggccatctgttaattgattaattttattatttttaacatatttttaaatagtttaaaatacttttttaggggttttttcaattccttacaatttgtaaatttgcaataataaattaaattttcggatttttgttcaaattgaacaataaattagggcaagataaacagaactgtaagtagctcatttaaaaacaattagttaattaattacagcttgatccctgtcgccgaaattgtgcgcggatgcccagcggcggtgacggcgacggaccgccgatgtgcgacccaacggcacttgctgaaggaggggccatccccgaaaataaggtgtcctaattaattaaactatattaaaagagggagaggggaatgggcgacaaattaaaagggacagaatgggaaattgttttcaattggattgttttttttggggtttgggggaggcgtaggcatgcgacagaaaaatgccgcgatagtgaaaaaattggcacgaattgcgcgcggtcacgtgaaaatagcgccccgaaaatcgcgattcattttccgtacatctgaatcggcgcttagtaagcgccgcttacgcccaacttaaaaaaacaaataatttgctcaattgagcaaaaagcgggggggggggggcgagagggagggataaagccaagcaataagcaggctactcaccaaacagcagcagatagcccaaaagtttaaatggctgaagagggtgggccagcggttagcccacggttggcccatggagtgaatgggccgggacgggcgggggggggggggg

SEQ ID NO: 40941 - DNA, 1146 bp, Heterodera glycines
  unsure (1)..(1146): unsure at all n locations
gagggggttaattgtaagctttaaccgttaaggcacttaatcttttaattttcccattaaaatnttaaaaaattaccatttataaatgcgttgttattgctctgagaaagactctgcccgacgtgttcagcgagttggcactccaatggtgaatcagtccgaaactggcagcggatgaaaacgcatctgacggaaaatggcaattttaatagaaaatataaaaaaagggggaatatcgggttcatataagtcatagggaataaggtggtaggtttccattttattagaataattacgaccccgccccctcctctcggacttcgttcatatgggggccgaaaaagggtggacggcgtattaattgggatgaaatgtgaagcgatgcggggaaagatcggaaattcgtaattttacgacattgaatttcgcaaatttcaaaattatttggcaaattttcggaaataagtcatgaagaatccaaaaatgaacttttacgtcgacgcatatcggcacagcgaagctaccccccccccccttgtccctcaagttttttaaaaacagagacgcaaaaaaggtgtttaaaaaaggtttcgttttgcatggactcgcaaaattaggaccgaccaactccaccaatgatttaagaatgacaaaaaaaatttcccactccattctttgtgctttgccagccaatcggtgatgcctttgtccaatttgagcagcgagtgccggttgtcaatgaacctgaaaaatccggcagttttattggcaaaatcatgtgtttattggccccaacaaagttttggtcatacaaaaagtcgaaaatttgaacttttcgaaaactaagatttattattagaagcaggttgttaccgattctttcgaaaaaaaatttaattttaaaaaatttatccaaagacaattcatcttttaaaagtttgaataaataaattaattaattgaacactgtaaaaacggcctaaataccccgcacaacctgaacgtcttgtacggcaacgaacagcaccatgtcgtcgtcgttcaaatgtcgcctaaatttgaccacccccatggaccttccccccccccttttctcacaatgtcctgagaattgtcgattgcatctcctcattggtcctcgtcatc

SEQ ID NO: 40942 - DNA, 1168 bp, Heterodera glycines
  unsure (1)..(1168): unsure at all n locations
agagatttgaatgacattgaaatgctggtgggttgagtcncagtgtctggaatgccggagatttgagtcccagagattgaaatgctggtgtgttgagtcccagagattggaaagcctaagaattgagtctcagagattgaaatgctggtgggttgagtcccagagattggaatgccattgaaagttggtgggttgagtcccagtgtctggaatgccggagatttgagtcccagagattgaaatgctggtgtgttgagtcccagagattgaaatgctggtgggttgagtcccagagattggaatgccattgaaagttggtgggttaagtcccagtgtttggaatgccagagatttgagtcccagagattgaaatgctggtgagttgagtcccagcgattggaaagcctgagaattgagtctcagagattgaaatgctggtggattgagtcccagagattggaatgtcattgaaagttggtgggttgagtcccattgtttggaatgccggagattttagtcccagagattggaatgccggagaattgagtcccagtattggaatgctggtggcctgattttcagtgattggaatgtcattgaaagttgttgggctgagtcccaatgtttagaatgccgcagatttgagtcccagtgtttggaatgccggagatttgagtcccagtgtttggaatgccagagatttgagttccagtgattggaaagcctgagaattgagtcccagagattgaaatgctggtgggttgagtcccagtgtctggaatgccggagatttgagtcaccgagattgaaatgctggtgggttgagtcccagagattgaaatgctggtgggttgagtcccagagattggaatgccaatgaaagttggtgggttgagtcccagtgtttggaatgccggagatttgagtcccagagattgaaatgttggtgggttgagtctcagagattgaaatgctgctggtgggttgagtcccagagattggaatgccattgaaagttggtgggttgagtcccagtgtctggaatgccggagatttgagtcccagacatttaaatgctggtgtgttgagtcccagagattgaaatgctggtggattgagtcccagagattgtaatgccattgaaagttgatgggttaagtcccattgt

SEQ ID NO: 40943 - DNA, 1416 bp, Heterodera glycines
  unsure (1)..(1416): unsure at all n locations
acttttgttttcnaattcgggttcgggattcggtttntaatataaatggatgtcagattcgtgatagccggtctctaaacctccagggganaagtgttctacacgacttttttttatttttatttttttcaaaaaatcaaaaaaattcctgtttttaaccctaatggaccctctccgattccggtacctgtcttttttgacccgggttctcagcccgctttcatttcatcgcccctcgtctcgcggatccgccctcctctgaggtcacaagaaaacatgacatttgggggcttcttgggggatggaccatcccacacaatgaaatttgcttcctctcgtttttctgtccgcctacgtcggaaagacggtggttgggagactgtggaattgaatgagagtcccaagataatcccatcagtcgagtttttgagggaaatccattggaacccttccgaaaacgtaaaaatgggagtgacagttgaggagccacaaattttgcttggaatcaaggaattttggaaattttttgtgggaagaacagaaatctccccaggcttttccgaatagacactgttttcggccctgtatttggcggaggaatggaccatttttgtccgcccgtggtttcgcattcgattccaatggcctgtggggcaattctgaggcaagaagaccctaaggaagtggtcaagcgcctatggaatttggaatcaattgggattagcgacccgttggatccggatgacgacgaattggctatctccctttttaaagattccgtcctgatttgaaggggaaagatacgaagttgggtggccatggcgtccagggggaagggaccgattgcccaacaatttttccctggcattttcccgcctagtggctttgtctcacaaattgcgggtcaattcagaattccgggaacgatatcaggctataatcacggagcatttgcaaaggggaataattgagccggcggctcgttccggtgcacaggaacattttattattcctttggctgagagacccctccaaaccactgaccccggacaatttaatcattttcacgggatgggatgccccgatcggggaaacgctcgaaagggcttgggcagcgatcgcggctgaatgggcttgcccacctctcgccatttcacgcccaaccccctgcggtagggccacactacaacttcatgtttttctgacgcgggccctaactgcttttccgccgctgcttacctgcgctcagagattaatggatgcgcggcggtcacacttgtttttgctaaatctcgcctgaggcctaagaaatttaaaaatgatggtttgacaataccccggctggaattattaggtcttttaactgcagttcgcgtaaaaaatttcgtgcatgcaaattttggtctgccttttgaa

SEQ ID NO: 40944 - DNA, 1275 bp, Heterodera glycines
ggtaagacttcaattcaaggggtaaagcaaaatcacgtttaagggttctaaaatggcgtataattaatagaaatcatcattttttggcgtaaaaccgacgatttcatggcgaaatgcaattttttttgtcgaaaaaaatggacaaaattgagcaattttagccttttaaaggggtcaaacccacacaaatttagtatcattcgaaagctcttgacgagttaagtcgaaagattaaagaaaaaagtggtaaaaatcaaaccgacgccatctaagcattgggacaactgagtctcagtgaaaatggacacttcagtaccaaaaaataaaaataaaatttcttcttatataatgcacgaaaagcgtttagccttgaatatcgagtattgcgctaaaaaaccgccgcaactcgactacggcggccagtaggtggggcgagactacgggctacggaagaagtccgcgcgtaatccgcaggcggttgactgattgtaaagggtcaggggccccctttttcactcaatttttcgagttttaaaccggttgaaaaaccggttttttggcatttccgcaactggagacctactttttcgtgcatagctcgtcaagacgaatcgattggtatatcatttgtgccattttttccggggggttgactatagtacacccaacttttgaaatggagtaggattaatttttgcttcatagccaaaaacacagttttacggacattcggaaaatgcataatgagaaaagctttaataaaaacttatgaatagggcttcgttttttaagaaaatgcctaaaatccaagacatacaaagtgaaattaataaaacggttagaaatttctatgattgataatttttttaggttcgcccacattgacacttatgaataaaattttgtcaaagtcaacatgaggtcaacatcacaaaatattaattaatttaatgattgttaaattaaatgcgaataaaaatgaaaacataataaacgtataattattaaagataaaagataatttaaataatttatttatttgattgctaaaaatacttatataaattaaaagttaaagttataaaaacttaatcaaaaatgaaaataaagtgaataattgagtataatcctcaaaaattgcattccaacattccattggtttcgccaaaagaatggcgccaaaattatgccgaaattggtgtaaaaattcgattatccctggaaaaattatgtaaaaagagaaactattggaagagcaaaagcataaataaggaa

SEQ ID NO: 40945 - DNA, 862 bp, Heterodera glycines
atacttttttcttcttctaaagttcaattccccaacccctgttttaattattttgtgtttttttcttatccagatcacttcttatgctttttactattagtaaatgggagcataaaatttttttatattttaaatcaatatgaaaaaaaacgtgtgtgacgatgtccccgcaaatcttatccatcgatgagagattgataaacatacaaagtgggactccatatgcaacttagagtgacaaattatccgccgttactcagttgttcaccggaccggaaaacccttatttttcccagatgcgcctcaaaaagttgtaagacccttccactactttcagggcgctcccggccttcggccgggagattttgttttttgaaacgaaatgcaacttttctctatggtaatataaactagcgtgtcgcggcgcagtaattgctcggtgtagacagtatgctttgcacagtgattgctcggtgtgtaggcagtatgctttttatatgtatggacgggcgctgacatgagcgcttcgcgcaaaggacttcgttgctagtgcatgcgcggttttgaaatgaatttatggatgtgataagggattttggtatataggtatcgcgaggacgcattcataattttgtggaggactttcggccgcttcgcggcctcaaagggcgctccgcaccctttttatatttaaggtttaattcggccgcttcgcggcctcatgacgggcgcttcgcgccattttcataattttatgtgatcattcggccgcttcgcggcctcaggacgagcggttcgcgcccatttcataattttatgggatcattcggccacttcgcggccggctgttaagcctcaggac

SEQ ID NO: 40946 - DNA, 985 bp, Heterodera glycines
  unsure (1)..(985): unsure at all n locations
ccccgaaggagagaatttaattaaatccattccttcgggggaccgtgccgggtgccgcggggtaagcagtgctggttcgtttcatcacggcaccgaaccttttggctagtcagcaatcgttgcttaacttgccagatcggacgggtgcgcatgattccactgttccaagcaccccaccaaaagcaaaacgatataaccaaaatataaggaaaaattttttaaaaaattttttctccatcttcctttttgatactaaagcatcagagtgctaaaattaagttgtaaataaaatttggtgcgctttagagcactttctgaaaaaaatatttatgaaacaaaaaaatcgattttttcaagtgtccgtttggggtactcaaacaattatggggagcaaaaatccaacgcagaattaaagtacaggctatagggaagctattcccgaaggattcggtctccccataaatctgggcgcatcggttcggggggactgccccgaaaacaaaaaaatcgattttttcaagtgtccgtttggggtactcaaacaattatggggagcaaaaatccaacgcagaattaaagtacaggctatagggaagctattccggaaggattcggtctccccataaatctgggcgcatcggctcggggggactgccccgaaaacaaaaaaatcgattttttcaagtgtccgtttggggtactcaaacaattatggggagcaaaaatccaacgcagaattaaagtacaggctatagggaagctattccggaaggattcggtctccccataaatctgggcgcatcggctcggggggactgccccgaaaacaaaaaaatcgattttttcaagtgtcccgtttggggtactcaaacaattatggggagcaaaaatccaacgcagaattanagtacaggctatagggaagctattnccgnaagcgatcggtctccccataaatctgngcgcatcgggttcgggggggact

SEQ ID NO: 40947 - DNA, 1111 bp, Heterodera glycines
gataatttagcgctcataatgggatgtataaaggcgatgtagaaaggaatggaagcgctaaaattgtttgagaagctttttgagcgtaattacgatttttacttacaccattttttgctaggcttagatcacatgcgattttcggcactctgataattttagcgctcataatgggatgtataaaggcgattgtagaaggaattggaagcgctaaaattgtttgagaagctttttgagcgtaattacgatttttacttagaccattttttctaggcttagatcacatgcgattttcggcactctgataattttagcgctcataatgggatgtataaaggcgattgtagaaggaattggaagcgctaaaattgtttgagaagctttttgagcgtaattacgatttttacttagaccatttttttctaggcttagatcacatgcgattttcggcactctgataattttagcgctcataatgggatgtataaaggcgattgtagaaggaattggaagcgctaaaattgtttgagaagctttttgagcgtaattacgatttttacttacaccattttttgctaggcttagatcacatgcgattttcggcactctgataattttagcgctcataatgggatgtataaaggcgattgtagaaggaattggaagcgctaaaattgtttgagaagctttttgagcgtaattacgatttttacttagaccatttttttctaggcttagatcacatgcgattttcggcactctgataattttagcgctcataatgggatgtataaaggcgattgtagaaggaattggaagcgctaaaattgtttgagaagctttttgagcgtaattacgatttttacttagacaattttttctaggcttagatcacatgcgattttcggcactctgataattttagcgctcataatgggatgtataaagaagctttttgagcgtaattacgatttttacttgaccatttttttctaggcttagatcacatgcgattttcggcactctgataattttagcgctcataatgggatgtataaaggcgattgtagaaggaattggaagcgctaaaattgttgagaagctttttgag

SEQ ID NO: 40948 - DNA, 986 bp, Heterodera glycines
cgtaattacgatttttacttagaccatttttttccctgcttagatcacatgcgattttcggcactctgataattttctcgctcataatgggatgtataaaggcgattgtagaaggaattggaagcgctaaaattgtttgagaagctttttgagcgtaattacgatttttacttagaccattttttctaggcttagatcacatgcgattttcggcactctgataattttagcgctcataatgggatgtataaaggcgattgtagaaggaattggaagcgctaaaattgtttgagaagctttttgagcgtaattacgatttttacttagaccattttttctaggcttagatcacatgcgattttcggcactctgataattttagcgctcataatgggatgtataaaggcgattgtagaaggaattggaagcgctaaaattgtttgagaagctttttgagcgtaattacgatttttacttagaccatttttttctaggcttaaatcacatgcgattttcggcactctgataattttagcgctcataatgggatgtataaaggcgattgtagaaggaattggaagcgctaaaattgtttgagaagctttttgagcgtaattacgatttttacttaaaccattttttctaggcttagatcacatgcgattttcggcactctgataattttagcgctcataatgggatgtataaaggcgattgtagaaggaattggaagcgctaaaattgtttgagaagctttttgagcgtaattacgatttttacttagaccattttttctaggcttagatcacatgcaattttcggcactctgataattttagcgctcataatgtgatgtataaaggcgattgtagaaggaattggaagcgctaaaattgtttgagaagctttttgagcgtaaagtagcgcggccgagcgcggtggacgatttttacttagaccattttttctaggcttagatcacatgc

SEQ ID NO: 40949 - DNA, 880 bp, Heterodera glycines
  unsure (1)..(880): unsure at all n locations
aaaagaggaatatgagaataatgttcggggtcacccgtataggggncctcctcatcaggngctnnagggcgctccctttgcagttgttcgtcatcattttcgggaagttcggcttggaattggaggcccacaccaatttgagacggacgagctgtgggcaacggcacaatgccaccgcctaagagcggaagagaaaacggttggacacatttaatagaaaatgcattttttaatataaaaataacaaatttatatttaatagggaataaaaattaaaaaaaagacaatgtaagccaaatgattggataaaagcccagaaaagtggctgttggtcgaaccactcgaattattttctttgcaccgaataaataggacagtttctcgaccgagtctcgatgagttgttgagaatagcaaaaaattattttacattttatgagttcactcaaaatttataatttcaatgcaataatattatgcgttttttagacgatacttttttcaggttcaaacacacacatatatttttcttagtgttttcgaatgatgccgaaaataatatcgaaaatataggatttcatagagtgtaatagaaccaaaaaaagaaaaaaaagctcgtcgccagaaaaatctgtaaaatggtcttcgtgtttcttccgggatcatcgatccacccatctggaccaaatcgaaaaaacccaatccgatccgaaaaatttaattgttgtacctttgttttcaccctctttgtccagtagtttttttaatacttttccagctttttcatttttcattattttttaaattaattttcttttttgtaacatcacctccttccgattcctcctccccctcctgcgtaattgagctgtttgttcaga

SEQ ID NO: 40950 - DNA, 1311 bp, Heterodera glycines
gcgccgctttgttaaaaaccaaaaatgagtcgttttgcacccgtaataaaggaaacccaagagttttaacaaagatccaacagtaaaatgtaattaaaattcgattttactaaagctgccttactctctctcctctgtctgtgaatacgcaaaaaaaaagaagaaaaatttgattgccgactattaaaatcccttgtccaatgcaatttccgtcgagccaataaaaaaaaaaacctaaacacagtcgcaattgttgctggtcgttcagtgggaaacggctgaactcattggcgcaggaattgaggctgatcccacgcggtggcaccgattggttgaggtagacaatttcgttggcaccaaacagacaaacaccgccaattggcacacaacgcgccaccgtcattggcagtccgtcaaagtgccacacaacggcatgcacacggtccttgatgttcatggacacggccaaaatggccacagtgtcgtagcgaacacaggcactaaaacagagtttagaattaagaatcgcgcgatgtttccatttttatttgaattatgtaagaaaaattcaaaaatttctgctttttgtctgaaatttctcgaccaattctctcaagttattagagcacacacattttaatcgcacaacagccaaactgcgcacaggtgccatcagagtgaaggaaagaaggcattccaaacggactgttggtggttgaccagcaaaccatccgttggcacaaaagatgggttcagtcggtagaatttgatgcattttgcacaaacagtgaccagctgcttgccaggacccggcaaaaaactaccccaggcactgaaattcactgatgtggcaccatcggtctcgtgcaaaagtgaatacattgttgattatggctggaaatttttcgggtgccattagtgagaattgatcaattaataaaatatttaagatttgaaacaaatgaatttttataagaaacagattaaggggaaaaaaatttacgcttttacgcaggtcaataaaaatatgcgaacaaattatatgcaagtcaataaaaatatgcgaacaaattagtcatcaataccaccggatccattttttgtcagaagccgattgatgccccgctccattcggtcaaaacgccggtccacggcgtcaaaacggcggtccacggagtcagtgagcttctcaaaacgggcgtcaacgtcaactttgagagcgttcaaattagcctcgacggaaccgactctgccgaacaacccccacaggagcgacaacagaacaccaaagagggtaagcgaaatgccaac

SEQ ID NO: 40951 - DNA, 1011 bp, Heterodera glycines
aaaatttttaattcctttttaaacaggccaaaaagttccttcttgacttttttttcagaaactgatcagaagcgcaccacactttgcagggatactgaaaggaagagaaataacctattttaaatattatctagtcagttcatttaaataatttttatccaaaaaattttttttgggttttcggggcagtccccctgaaccgatgcgcccagatttatggggagaccgaatccttccggaatagcttcactatagcctgtactttaattctgcgttggatttttgctccccataattgtttgagtaccccaaacggacacttgaaaaaatcgatttatttttgttttcggggcagtccccccgaaccgatgcgcccagatttatggggagaccgaatccttcgggagtagcttccctatagcctgtactttaattctgcgttggatttttgctccccataattgtttgagtaccccaaacggacacttgaaaaaatcgatttttttgttttcggggcagtccccccgaaccgatgcgcccagatttatggggagaccgaatccttcgggaatagcttccctatagcctgtactttaattctgcgttggatttttactccccataattgtttgagtaccccaaacggacacttgaaaaaatcgatttttttgttttcggggcagtccccccgagccgatgcgcccagatttatggggagaccgaatccttccggaatagcttccctatagcctgtactttaattctgcgttggatttttgctccccataattgtttgagtaccccaaacggacacttgaaaaaatcgatttttttgttttcggggcagtccccccgaaccgatgcgcccagatttatggggagaccgaatccttccggaatagcttccctatagcctgtactttaattatgcgttggatttttgctccccgataattgtttgagtaccccaaacggacacttgaaaaaatcgatttttttgttttcggggca

SEQ ID NO: 40952 - DNA, 1004 bp, Heterodera glycines
  unsure (1)..(1004): unsure at all n locations
ttccgtaccaattattatttttataatgggtttgttaaatgcaaaacaattcacaaaagttgttttaactccattcagagatgagatagaaaaaaaacaaaaataagtttgaagagcccttgaagagctgcaccggatgcgagtgccgccgttgctgtacgctcaacggttgctgtgcaaagacggaaaattgcttatcagaaaaaacgaaataaaatcaggaatactcacgcccgtagacaaaccgttggatatatgggaacaaacctatattggactaccatacccaattaattatttttgggatgcgaattgttttgtgcgaaactgttatgaaaaaagggtacgaaaaactgggaaaaccccactcagagactagctaacaaaatcagcataggcttggacttccgtaccaattattatttttataatgggtgtgttaaatgcaaaacaattcacaaaagttgttataactccattcagagatgaaatagaaaaaaaacaaaaataagtttgaagagcccttgaagagctgcaccggatgcgagtgccgccgttgctgtacgctcaacggttgctgtgcaaagacggaaaattgcttatcagaaaaaacgaaataaaatcaggaatactcacgcccgtagacaaaccgttggatatatgggaacaaacctatattggactaccatacccaattaattatttttgggatgcgaattgttttgtgcgaaactgttatgaaaaaagggtacgaaaaactgggaaaaccccactcagagactagctaacaaaatcagcataggcttggacttccgtaccaattattatttttataatgggtttgttaaatgcaaaacaattcacaacagttgttataactccattcagagatganatagaaaaaaaacaaaaataagtttgaagagccctttgagagctgcaccggatgcgagtggccgccgntgntgtacgctcaatcggtgctgtgcaaagacggaaaattg

SEQ ID NO: 40953 - DNA, 1046 bp, Heterodera glycines
aatagggatgggatttttagtgataaaaaatcccaaaataataactaaatagtgaccaaaaaatgccaaaatagtggcgaaaaagttccaaatttacgaatgtaattttttaaataactatttttaatttgaaaataacgctggggcccaaacgtgccggggcccaactgacgggttccgtcccaaaagcagttcggagaattaactaaaattttttcgcataatacacttccctaaatagcttcgaaagaaaaacatataaaaaaatagaaaaaataataatcgaattcaacgactatccctctgatttacaccccttaaatacttaacctttttagtgcgtatttttcggttttggggccggcctttttggcaatttttttgggcttaaacttctccaagtgcctaaaaatctgagcctcgaccttttttggcaattttttttgtgcttaaacctctcgcactttggcgtttttaagtgccaaaaaatctaggccctagaaatcattgtaataagaaaatgaaaaaaaaagatttttttaaagctgggaaaatgatcatatacctaaatgtacagagaaagaatatttgcgtagaataatatttattcaatattgattttaaaatgaaattaacattatttaatataaataaacaaatcgtaaaagatggaaaaaaattttttttcatttttagtggcattgagtgtgtgaatgagagctcagcggaagctttctacaggctgaacttccaaaaatatacaattacaaacgacaaattcggcatttgtcccgaattaattaccgttttctaatttataaaaatccagaattttgggactcagaaaatccaagattcccccccccccgaaatgaaaatttttaaaaattttcttcgaattcgtcccccaaaacgaaactacaatatttatgggaacatttttgaatattggcaattttcgtaacaaagtgcactcaaattttcaaaattttttcaaaaaaaattttctcttgaaaaaattcccggttggtcccggcttttctcgc

SEQ ID NO: 40954 - DNA, 977 bp, Heterodera glycines
  unsure (1)..(977): unsure at all n locations
tctcttttaggacaatttctatctcgtacccccgatgcttatcgttccggagagcctctcaaaaatttttccattaccntaagagctgcggaaattgtgaattaattctcagaaaaatgtctctctttttaggacaattttctatctcgtaaccccgatgataatccgttccggagagcctcttcaaaattttttccattaccataagagctgcggaaattgtgaattaattctcagaaaaatggctatctctttttaggacaattttctatctcgtaaccccgatgctaatccgttccggagagcctcttcaaaattttttccattaccctaagagctgcggaaattgtgaattaattctcagaaaaatggctatctctttttaggacaattttctatctcgtaaccccgatgctaatccgttccggagagcctcttcaaaattttttccattaccgtaagagctgcggaaattgtgaattaattctcagaaaaatggctctctttttaggacaattttctatctcgtaaccccgatgctaatccgttccggagagcctcttcaaaattttttccattaccctaagagctgcggaaattgtgaattaattctcagaaaaatggctatctctttttaggacaattttctatctcgtaaccccgatgctaatccgttccggagagcctcttcaaaattttttccattaccctaagagctgcggaaattgtgaattaattctcagaaaaatggctatctctttttaggacaattttctatctcgtaaccccgatgctaatccgttccggagagcctcttcaaaattttttccttaccctaagagctgcggaaattgtgaattaattctcagaaaaatggctatctctttttaggacaattttctatctcgtaaccccgatgctaatccgttccggaaagcctcttcaaaattttttcccattaccctaaganngctgcg

SEQ ID NO: 40955 - DNA, 1500 bp, Heterodera glycines
  unsure (1)..(1500): unsure at all n locations
attaaaatatttaaaaatntaatgaaaaaataaattcgaatatccacctgagacatgctttttcactgtttccgacaacggatcaaaactaaggcgtacagctggtttcacattaatgccaccaattgaacgtggcaccatcccggacaaattcacttttgaattatcaaatctttaaaaaccttttaaattttctaatattcttttatggcattttacatccaatccgctaaaacaattgggcattcctgcacatcgttgggaaaggcactgaagtcaaattggcacgtcacatggaaggtgaaagtgccagccgcgataactttgccatcatttgccacagtggcggaaaccttgtggtgaaaaaagtggaatattttatctatgtgtaaatcagattttcattttgctgacatttatcactttttgagtttggcactttttaagatggtatatcttttgcaaatttttaatttccaacttgcgatacaattttgaataactacaattttgcgctacttaataagtgaaaattgtacatggtgattttccgggttgctgctcacgaatctacatcaatttcatccaattcctaacctaaatttaaaaaaaaaaaccaaattcgaaaatcgtgtttcgattttttgttgagtttgggtcggaattggtcaaaattggtatcaattggttacttacaaacgacccctaacacccttaagttaactaatattacaacaaaataattttcaaatctaaaagatcccccccccctcctaatttgacggtgctaattgtttgataaatgaaaattttccagaaaatttttactaaaaataaaactgactccattcatgtagacgaaccaattagtggaacgtgccgaattatacagagcaaaagtgggctgccaaattttccatgtctccaacgaaaccacataggtgtagttgtgttcagatgggttccactgcagatattcatctgtccatgaagtccttaataaattttatttaatttatatttcaaaatatgaaatataattattttttaacattaaaaatgtatataaaaaattcatcttaccataaaacgccatgcagtagcattgttccctccgattggtcctattttaaaaattattttattaattttttaataacacgaataaaaaattgttaaaagtgccaaatttcgaaaattttacgaaaaacaatttaatataaaatgagaattatcataaaataattcagaaattaaacttccatttttcactcaccactttttcaatgtgatttattgtcagaaacaattggacttgagtgaccgttgactcccttttcactggcctaaatttttgagcctttttcaaaaacaaaaaacaaaaggtcaacctgtgccttcggtcataattacgcaaaatttcttcttctattctccgattttcatttatccagcacaatatatttggcaacaacagaagcaaaaataaaattttcggca

SEQ ID NO: 40956 - DNA, 723 bp, Heterodera glycines
tgctttaaggttttgtctttgactttgcttttttcttctttatttcaatcggctagtgctttaaggttttgtgttttgactttgcttttttttccatttatttcaatcggctagtgctttaaggttttgtctttgactttgcttcggctagtgctttaaggttttgtctttgactttgcttttttttccatttatttcaatcggctagtgctttaaggttttgtctttgactttgcttcggctagtgctttaaggttttgtctttgactttgctttttttccatttatttcaatcggctagtgctttaaggttttgtctttgactttgcttttttgtccatttatttcaatcggctagtgctttaaggttttgtctttgactttgcttttttttccatttatttcaatcggctagtgctttaaggttttgtgttttgactttgcttttttttccatttattccaatcgaccacgttaattcattctctatacatttagtgtcttatttcatgaaattatattaatttaattttaaataaagagggcaaatttttacagaaaataaatagacgctgactaattagctaacattttataaagaaagtagaaatttgattaaatgcatatacaatatacaaaaatattacttttttaaatttgtataaagttcctattttgtcttttgactttgctttttttttccattttatttcaatcgggtag

SEQ ID NO: 40957 - DNA, 802 bp, Heterodera glycines
gagagagagaaagagagagaggtaagagatgagagagagagcagagagggtgggagagagaaagatatcagaaagagaaaaagagagaaagagagagagaggagagaaaaaagtgagaaagaagaaagcagtgagagagaaagagcgaagagagagagaggtgaggaaattctttcaaaataatgatacattcatttttgtcagcaacatttattatcagtctctactaattattaaaattttactacaaaaattccatcttaatttgacaacgaattaaaaaatgtcagacaacgcaaatgaaacggaggaccaaatgagaaatgaaatgtaaataaataattaacaatcaattaatggggctcacctccttcggacctgagctagtaggcttattgaagaatgctgacaacctccgatatccattatagcttattcctaaaatagagcacccgtggctttattttcacccactctcaaaaggggggctttattttaggggggagggtttaatttagggagggagagctgtattgtaggaaattctgtaaaatcatatagcatcagatactttttgtttgtaccgaacgaatccgaaagaattttgcgaaaatccacctgctgattggcttataatttttttccactcagtttttatttgtccataaattctttcgcatttgaattatgaaaaatgccaatgccggacaaagcattgcccagcaaagtgatcggattcaaaagcattatgatcaggtaatgctggcgaaaatgcattcaaatggcacaggtttttattagc

SEQ ID NO: 40958 - DNA, 796 bp, Heterodera glycines
ttttaatttatcttatatccaagaaaaatgactattctcttataggtgagaaattttatacgttacaaaagcgctcgagcgtgagagggagggcggtgcgcaatcgccatttaatttctcagagaatttttaaatttatcttatatccaagaaaaatgactatctcttattttgagaaattttatacgttataaatgctctcgagcatgataggaagtgcggtgcgcaatcgccatttaatttcacagagaatttttaaatttatcttatatccaagaaaaatgactatctcttattttgagaaattttatacgttacaaaagcgctcgagcgtgagagggagggcggtgcgcaatcgccatttaatttctcagagaatttttaaatttatcttatatccaagaaaaatgactatctcttattttgagaaattttatacgttacaaatgctctcgagcatgataggaagtgcggtgcgcaatcgccatttaatttcacagagaatttttaaatttatcttatatccaagaaaaatgactatctcttattttgagaaattttatacgttacaaatgctctcgagcatgataggaagtgcggtgcgcaatcgccatttaatttcacagagaatttttaaatttatcttatatccaagaaaaatgactatctcttattttgagaaattttatacgttacaaaagcgctcgagcgtgagagggagggcggagcgcgatcgccatttaatttctcatagaattattatgtttatcttatatccaagaaatgtgactatctc

SEQ ID NO: 40959 - DNA, 1070 bp, Heterodera glycines
gtgttgcactttctgagaggaaaagagacactgctttggcagtaaaagaaaaaggaggacgtaagcaaatgtacagataaaggagatgacagaagcaccttcaatacatttactcaattttatttgcataacttctaaaaaagcaccaattttatgcatgtaataaagaacaaatatgccattcaaatgtcacgacataacaacacactattacacaccacaatttccttctttggtggtcattcaccgccattgccggttgcttcgttcccagccttaattataaaagttagaagattataaacttcatatgcgaccctatctaccacatgattggtctccccgacgttgacgttgctcgccggttcagtcttaaacgtctcgccgacgttgctcgccggttcagtctgaaacatctcaccgacgttgctcgccggttcagtctgaaacgtctcgccgacgttgctcacctgttcagtctgaaatgtgaaaagtttcaatgttatgacaatgtcgcttcctacatttccaactccgccaagttcgcgacgaatgaagtcgctcaatgcaacaacagtctccacttgctgctctatagtcggctgatgaactccttgtccacgaagagcctctcggacttcgttgaacacatcctcctgcgcttccccgcgtcctcgcgggtttaccggtgggtggttatgctctgcctggatcaccaaattgtcgttgcttgtttgactccctaactgtagaaaagattatcctattttattgcgtttttttctcacataataaccaatggcgctaccaagcgctgcacctgcaaccaacccggaattaaaagatggcattttgataaataggtttgctcctaaagtatatatgctatgaaaaattggcatagactaatattttgaaaaagattgaacgaatacaaatctaatgaaaataaagtgataaaagctcacaattgtcttatatatacttttataatgtccccacgtcataatgtcccccaagctaaaatcagtcaaaatgtccccaattaaaattagcaaaaaaaccgaaat

SEQ ID NO: 40960 - DNA, 844 bp, Heterodera glycines
cgcctgtgctactaattatttcatttttcctcacatgtttcactttctttctttttgccccattatttcccactaatgaactgttttcccttaatggaccactctcgctccctctcttaatggacctctctctctctctcactcactctctatctctctctctccatctctctctcctctctcactccgctatctctctctctccatctctctctcctctctcactccgctatctctctttctccctctctcacacacacactctctctctctcttaaaaacatatagacgtgccctgcggggcgatatgaacgaacattggggagccttgggggggatgggggagcaacgggataaagcctcaaaaagagcctttcccggctggcaggaaaaacgcgagactcccctcccacctcacccccgccctcccacgaaattcggtacagccggttggcacggaattccattcccttttttcaatgccgctctcactccatccatttcttcgggcattgacgacgacatagtgagtgggagaagagggggcgccaatgggaggagaagcatagtgccgtgccgtcgtccgtcgacctcgtcgtaggccaatggcaaatgaggaataatatgccggcatttttgcaatgccgccgcccccgtccattgcgcaccgaccatttttttattgcaaaatcaataattcgttttcaataggtattaaatgataatgaagtttaagccacaaatttgcatatttttgtgagttccccgatcagtgccgaataattaattacctttaacaaaatgacgaatacggcatctgatcaaaacccagctattcatgatc

SEQ ID NO: 40961 - DNA, 842 bp, Heterodera glycines
ttgtttacgtaaacttcgttttttccattttttattcctttataaatattttagttccatttaaattatcttttttggttttcttccccctcccctctcccacctcgtcccctgaatgcgtctgattgtttgtcggctcgtctcgaatttgcatccccccacattgaacaccacccgagacggtgccaccgctgaaactccgctacaatttgccattttccgtttcgtttggtcggttattcctttgtcattattattttgttgatcttttaattccgttttttttaatcagaaaacccaaagattacttttcttaatgtttttcaaacaaaaatattagcggattatgtacagaattttcttaaaatccatatccaaaatagatactgtatgtttaagaaaaaaaagcaattggacggcagaggaactctgttcaaaactaatcatatacatatgtagagcaaccaattacaaattgaactataaaaagttaaaaataaccattttcgatatcaaaaagcactcaaattgacaaaattaaatgaaaattgagttcgatcattaattaatgaaaaattgttttttaaattgccacccgaccacgccccattaagcaacacttagaaaagagaccgcaaattcccattgccctcgcctttggcgcatgttcccatagtgactgaataatgtgatgaaatttgagcattcctttaaattgtaactgccaattcgatatccacgcttttcgcactttttaaatttaagaaagtgaatgcctttggttcgtatggctttgataatcaccgaccaaaatttatcgcaattcaattacaatgaaaaaa

SEQ ID NO: 40962 - DNA, 861 bp, Heterodera glycines
ttttaattttttgggggcaatttgtcgcttcgcggcctcaggacgggcgcttcgcgcccgttttttacacccctcagaatctccaatcacacagtgattctgaggtcttaaccatgtctaaagtaaaatctgattacatattcgtgatcagcggcccaaataacccctaaagacatatttttggaggatttttggtgaaaaaaatttcccactcaaaaatcatggtcacacccatttggtcccgaaccccaaaatcacttttatttctataacttttttcaaaaaagtgataaaaagctaaaataaaatttataaaatagagcaaaaaattgcggattttttgagtatatcatttttataaaatactttttcagaaaggagttaggaatttttttctgaaaaatcgaaaatttccagattttctagaataatttttttaatttggaagatagaaattccaaataaatctcataaaattctcctaattttttgctatttttcaaactttattccactaaatttgaccaaaaacaaagagagttatgaattttcaaaatttcactggattttccggggctcaaattttgacgatttttcaaaaaattttaaacacttaccaaaaagtctgaaactaaaaataaagtatataatcaagttaagcaccttaaattaggccataaaaatgcattttggctaatttaggagcaaaaaaatttttcatgaaatgcaaaaccatggggtcccccctatggttttgagtttcaaaatcacaattaatatgataactttttttaaactcatggtaaaaacatgagattaaacgcattagattgggctttaaattctctacaaaaaagctct

SEQ ID NO: 40963 - DNA, 1016 bp, Heterodera glycines
aaagaattatttttattcaaaaatttttatttctttcctctcataaatatttttgaccaaagccccgcccccatttcactaataatgattctatctcgactaattattatttatttaatttgcattttaaaataaaaactttaaaaattaaaaaaaaattccacagaaaaatgaaatcattttccatcgtctgctttttactgataacaacattattatgtggtcaatttgctgcggctcacctcggcttttttgacgatttttttgattccgacgaaaattttgattttgacgaattattcaaaagcaaattgcattatgccattggccaacgggacaagaagcagcaacagaagaagccgcataaacatggcaatgttgatgtggagaacagaagcttggaccaattgtacgcggcggcgttggccgagggtggcaaattggtggtgtacgccggcggtgacgcaccacgccaacaagtgatccaatggcgagaacttttcccgagactcatgctgaaactgagtccgagattagtgacataattagggatgtcaattttatgtaaatacattttttttcctggcttctccatgttctaaattagggttgcgtccccgacgtcggggttggaaaattcggggttcggggttgtcggggttggaagcgtcggggtcggggttgccaaatcgttcggggttcggggtcggggttcggggtttttcaatttttatcttatgcctaatagtcaaaatttttttaatattttttcggaaataatatttattaatttccataataatatttgtattgtttttatattttttatttcttttttatcagaaattttgtatagaattaattttttttttcttgaaattttaaaattttttattacttttttgttttccaaaacatcttttttcacgtcgctcttttctaaagacttaaggagaagggggaaacgggcgtcccggcgggtgccataggcgccgccgggaaaattttgaaaattt

SEQ ID NO: 40964 - DNA, 1082 bp, Heterodera glycines
  unsure (1)..(1082): unsure at all n locations
catgatagggagggcggtgcgcaatagactttttatttttgagggaatttttaaatttatactctatcccagaaaaatggctatctctttttttgagaaattttatacctcacaaaagcgcttgcgtatgagacggagggctgtgcacaatcgccattttatttcacagaggatttttatatttagaggttatcccagaaaaatggctatctctttttttgataaattttatacacatacaaatgctctcgagcatgatagggagggcggtgcgcaatagaccttttatttttgagggaatttttaaatttatactctatcccagaaaaatggctatctctttttttgagaaattttatacctcacaaatgctctcgcgtatgagacggagggcggtgcacaatcgccattttatttcacagaggatttttatatttagaggttatcccagaaaaatggctatctctttttttgataaattttatacacatacaaatgctctcgagcatgatagggagggcggtgcgcaatagaccttttatttttgagggaatttttaaatttatactctatcccagaaaaatggctatctctttttttgagaaattttatacctcacaaaagcgcttgcgtatgagacggagggctgtgcacaatcgccattttatttcacagaggatttttatatttagaggttatcccagaaaaatggctatctctttttttgataaattttatacacatacaaatgctctcgagcatgatagggagggcggtgcgcaatagaccttttatttttgagggaatttttaaatttatactctatcccagaaaaatggctatctctttttttgagaaattttatacctcacaaaagcgcttgcgtatgagacggagggctgtgcacaatcgccattttatttcacagaggatttttatatttagaggttatcccagaaaaatggctatctctttttttgataaattttatacacatacaaatgctctcgagcatgataggggagggcggtgcgcaatagaccttttattnttgagggaatttttaaatttatactctatcc

SEQ ID NO: 40965 - DNA, 1028 bp, Heterodera glycines
atttgaagtatttactacttttagttggactaagtcgagagttataaaacactgtaaaaatgtcgactcgttaagtaaataaagagaatatttaacgcatttgaagcctccaattgctaaaagcattttcaatttgttggaaaaaattattcgtaattaaatccaataaatattcattaacgaaaaatcaaaaagcttaattttatttattttatttggatgtcggtcaaacccttccaaaagttccaaccgccaaaaattattgtatcggatgagcaaaatgaacgaattttaacaagcattgacagtgtaagcagcagacaaaataaaaaagcagaagcatgtccaacgacgaacagtgcagcaaaggaacaaagcaaaaggcaaaaaaataaaataaaaaaaatcgaaatttaattatactttttaaacatttacagacgcattcgcaaggacccgaatgacccgaccttgtcccaaaatctctttctagccgatggaatgccaatgttttgtattttcaattgttgccaaattggcccctctctttaggcactgcgataccaccaaaagcaaaatgatcaaaaatcgcgcctcggaactgtaaaacaaaacgaataaactttaatagccaagcaattaattaatcaatcagccaattaaattaaatatattacctaattgtctttactttttcagaataattcgcattccctcgcgccaattgaaacgaattgtgaaaacgcaagggattcgatcgcttcagagagaaacgcaacattttgttggtgggaatgcgttggttggctgctccgtttgactttgtccttctgttaggagtcacctcagtgaacggtttgctgagagtgtaccgtagccgaggcgttttccgtttgttttgggttacggtcactgcagtttcgcttctgcttttgttttggcaaatcaccaaattggtccaattgtatttttcgcggacgaccgcttcgcaggtgttttatgtccccatttttaaaaatgactctaga

SEQ ID NO: 40966 - DNA, 1028 bp, Heterodera glycines
  unsure (1)..(1028): unsure at all n locations
aaggaaaatctgtagcaaatttcatgctctttccaatgggactactaaaaattactaaaaaaaaatccccaacgcctaattcgttgcttttaaaatggaataaatcttaaaatattatttattatttttgtaaattttaatcagaaccattgcaaaatatgaacataatactggtcagaagcgttgaaaaatattaaaacaaattttattaggttataaaaaaaatcgtaactaaaaagatgacgaaaagtagacctaattttcaatcaatttgcacacaccaatgaaaatccgaaatttttcttttatttccaaaattattaatgtcaaaaatttaacaaatcattaaatttcctgatacttttcttcgtctgtcatcatttgttagtaatcaattatatcaataaaatattcgaattccttcatcaaatattacaaaaattattttgttttagcagttaatttttatacatttaatattcataatttttttcaaaataagcattgaattaataatatatgtataaagttttactcaaaaacgattttttataaaattttttttaatctttcgtgcctcaagatttctaaaaaaattatgtttgaaatttaacaaaaagcctttgggtataagttgaaaataaaaagaggctggaaacaagaactaattttcacattaatttgcgcaccaatacaaattctaaattgttttttttccaaaattatttattgcttaaaaaaatacgcagcgataaacaaaaaaataatatataaaaattaatcaaggaaatgaaattgtgtcgaatattcaatttaattgtatttttgatcatcttaattaatattaatcatgtcggagcagaaaagaaaaaattacagcaaaagtcatttgatgaaatatttggagaaaaatgggaagaaaaagaagaagaaaaacgaaatgagcacaaaaaaagagaaataattgcaaaattttataaaataaaagagaaaataaaggaaaaaggaatanaatattcaaaaaaaga

SEQ ID NO: 40967 - DNA, 956 bp, Heterodera glycines
tcacccaacgttctagactgatcagaagctcaccaaattttgcagggaaactgctgagaaccctacaaatgcttataaattttcttagaattttttgcctggaggaacacagttcttcacacttaccacaccagcattatttttttttaattatttttttcattttatcacccaacgttctagactgatcagaagctcaccaaattttgcagggaaactgctgagaacccttcaaatgcttataaattttcttagaattttttgcctggaggaacacagttcttcacacttaccacaccagcattattttttttaaattatttttttcattttatcacccaacgttctagactgatcagaagctcaccaaattttgcagggaaactgctgagaaccctacaaatgcttataaattttcttagaattttttgcctggaggaacacagttcttcacacttaccacaccagcattatttttttttaattatttttttcattttatcacccaacgttctagactgatcagaagctcaccaaattttgcagggaaactgctgagaacccttcaaatgcttataaattttcttagaattttttgcctggaggaacacagttcttcacacttaccacaccagcattatttttttttaattatttttttcattttatcacccaacgttctagactgatcagaagctcaccaaattttgcagggaaagtgctgagaacccttcaaatgcttataaattttcttagaattttttgcctggaggaacacagttcttcacacttaccacaccagcattatttttttttaattattttttgcatttgatcacccaacgttctagactgatcagaagctcaccaaattttgcagggaaactgctgagaacccttcaatgcttataattttcttagaattttttgcctggaggaacacagttcttcacact

SEQ ID NO: 40968 - DNA, 945 bp, Heterodera glycines
ttgctcatctggacctgaacccatgcttaaaaatttttctccggacttttttttgtccaggaaattcagacccaagtctttttttcaaaatgtgtcgaactctaattacataattataaatctacatatatgtatgtatgtatgacttgactctaaacatgtgccgacgttttgcgcccccgggcatttgctcctatgcccaactgtttgaaaatgtactgtatttagtttcaacaattctgtaaataacgcggcggcccttttgacagtcatcgccatttgaatggtggcggcggccgaattttgtcgagcaaattaccaaatctaaaaattccccgtttgtaatgggcggggggggggggcaatggcaatgctttgatgacattaccatctatcggtccctctctctttctgtgcccttctcccttcctttttctctgcccgagttctctctcttcccctctcccttctctctttctttctctcacctcgtccttttcctctctctctctgtgtctctctcgctcgctctgtatctcatttttcttttatccataaatcctctctatccctgagctctctctctcttcccctctcacctcctctctctctctctccctctgagtcatctcatctctgctcaatctctattgcattatctctgctctttgcacccccccgggcgatgacattcttatctcctccccctctgcccccgttttgttgcatttcttgacctttcttattcccaccgacacatttctttcgtcagtgtgtcatacagaacaaacatttttgttgacaaattaaatacatactgtttgggctatagcagaacagcaaagttgaataaaatgcaaaaatggagaacgagcagcagctcgcccccccccccccccccccagggactgtccgagggacgacactcaattcgtactaggccaa

SEQ ID NO: 40969 - DNA, 929 bp, Heterodera glycines
tggtgaacgggagaacgcgagtggcgacgactccgccgacgcggcgacggcgttcgtgtgcgtcgacgacgttcactgtctcgcggcttggaagtgccctttggaacattttcagccacattggtttgcccggcagtcgccgttgctgtcgcttcgacctctgttaatcgcgaatatgaaaattgaaaggcaataaatgattccacctgtacacctcaaaggtgtacttgcttctttcgtcttctccgtaggcgcctttgtttgcaccgtttgccgcttttccaccaccggggtaacagtcactgacggtgcattactgacggcggctgattgtgaggcgccgtcctccaattggaccatcccgtcaaaatgcaccgcatccaatagttgccttttcgcgtgttccaaagagcgcgcaattgtctctcttcgattatctttgttcttttccgtgtacatttcaattattgccgtcaaatatttgtccaatgcttctccattaggccatttcgggttgttatttcgtttgtaaataacgtttaaatcgtaaatttcgtaagccggagtttccttttttggccttttgtccctatttttttcggtctctctgtcctcctccaatgccctcttcacgtccaaatattcgcactccctctcctcaaagtcgtaaattggtattccgctttgattattctccgtttcacatcccttcaaggttctcgcaaataaacggcggatatttttgtgcttttcggccacttccaattcggcagtgatctgcgcttgcaattcgggaatgatcgccgggcgatgtttgtgctgaaccaacattaacaatagcagtttatcatctaaacaacacaaacatttaaaagccaaattaccatgaaataaaaaaggtgggagaatgatcggatgtgacactccaa

SEQ ID NO: 40970 - DNA, 1531 bp, Heterodera glycines
tacccatttcacttccgtttatttgttgctattactttttttttttttgttaattacataatcattaattaacaaaaatgaaagaaaacaatttttaattactaaattaattttttggattaaatgttttttcgactatttgtattaaatctgaatacgaacgatgaagttcaagagtcttggttttgtacaaaaatttttggccttgaccacgagggtgaagtttttcacaaaaaaatcatgcccaaactaattttttacttttaatttttattaaattggtctttgggaaggaattatatatttaaatttttatgagaatttaaatttgtccggaacccggcgggtttttgttaattaataaggttcttaagttttttcaaatttataaatttttcttcctacaattttattaattattttatcaccaaatgtaattcaaataatatttatttattttttccaatataaaagtaaataaaaaaaaccaaattaacaaatcaaaatgaatcatcaaaaacaaaacaaaaaatgcattttccgtcccattcattccgcggattgagcagcgaataattaattcattcctttcacaaccataaattatttttattataatgttaatcatttatttgtccacataactctcatcagaaaactgctgctttataaatatttaaaataaaaataattatttttgaatttaaaatgaaataaaaatttagccagaaatgagtgaaaaatcccatcatttgttgaactgcttcattggcctgctggcgatgatgcttttcatcagcggaggcaaagcacaagagcaaacaacaccgtaagaagacaaaatgccagataaataaaaatgcaaatatttggacaataattagtgtcctcaattaagccccttgggcacatttttaaatgtttttaaatagtggccctgaatcttgagacaaacatggggcaagggacaagggccagaatttttagaaaaattcaggaaaaccctttttgcttggaaaccctggcattttccgaaaaaccgtagcgttaaatgccaaaaaaatttcaaaattatataaatttccaaaaaaatagcattcgtctgactggtggtgacacctctatgttctccattccaattgccacggtggaccaatgcatgccgcatgaagaatggaatacttttggcatcgaatttcgcctgccaaaacagggaggacactgtgatgaagggtacggtagatcagtggtagaaaattttcaattaaatttcggaaattcacagtatgctcatctgttacccgagcacattggcctaccatgatgtgaacaccgtccacacggttgacgaatttgcagtgcgctctgagctgtacaacctccgcaacatggtcaacaaataggggaaattttagtgacaaaattaaaaaacaaatttgaatttttgaaattaactttttcggtttttgaatttacggtttaaacgtgttgattttcaaaaaaccaatgttttctgatgaaaaattataag

SEQ ID NO: 40971 - DNA, 1305 bp, Heterodera glycines
  unsure (1)..(1305): unsure at all n locations
gtcaaactggcacttgactcactgtacgagcctttgaaaactttttatgccactccggttgttgtgcaaaacaaagcaacggaagtgcaaattttggcgcaacttctcagtgactctccactttctcgatcggtgtgtgggcaaacaggggcacttgtactttaaaaacaatgataacatctcagattttgcaaataatcgttgaaggcgcagaccgactccgggagaatgcaccggtcaatccctcaagggatgatgcgactttttctgcaattcgcctcttttacatggcaatttctcatcggactgcaatggccgatgccattcgaatggccaattccgaccttatggttgtgtctgtggagtctcttctcttctccgtcattccccactcgcgccgttccaatatcagttacctttctctgctgttccattatcttagtgaagtaacggactgttcgccttttgtttatcttgttcatttttcagtttgaccatttgtctcgtcactctttctacgtttggctgattataaaagaagcggctgctcaaaggccttctgtgcagttgcgtattgtccaggctttgttgccacgacgtgctcagcttatcacttctgcggccaatctatccgccgtcttcgctcccgacgatatttctatttccatcgtcgatttgcttcctaaatccattgaacaaagctcttctgaccgattgcggggccaactttgtcgattgatgttcgaagtgttcaatgattccatggagtcggacccgaacacgccgaacatcgcttacgctctgatgaacttcgacctcagcaacattccatccactgttctcgacattccaagtctgttagttccattgaacattttccattattcgctagtttagaagagtcgagtgagggcctcactgtccttcacaatttgatattcatagccgagcaattcgcaatttccgatgatccttttgtccatcccttttcggggctgtacgactctgtacttcgtcttctggtcagttttgttccattcttttacactaatctccaacttaagtaccgtctttgctccattagggctgtttcttccgccattttgcttcgttttcttcgttctcagtacgatctcatttatcgtcttgcgaattcttctattttttgctcaattggtcttccaacttcggttaatccatctacaaatgatacattttcttcgtcattcttgcaaaactttgnggatgaaagcgtgctccttgaaagtgtccataaaacggaacaggttctgtccattttccttt

SEQ ID NO: 40972 - DNA, 1279 bp, Heterodera glycines
  unsure (1)..(1279): unsure at all n locations
aaaaatacttatgaattattttgcaaaaatannataagtaatgaaaaagtcagaattttgaanaatttaaaaacaacaagcgttggcatttttcaggttaagttagtcctttacaatggagaaggcctgcaaaatttggagagattatatcgattttagtgcgctaggttcgatgaaactttttaaaatataagcctaaactttttggcctgtttaaaaaggaattaaaaatttttaaaatatttattcatctcccttttgatagaaaaagcatcagagagccttatttaacttttaattaacatttggtgcgtttcagagcacgttctaaaaaatatttatgaattaattttgcaaaataataaataattaatgaaaaagtcagaatttcgaaaaattttaaaaacaacaagcgttggcattttttcaggttaagttagtcctttacaatggagaaggcctgcaaaatttggagagattatatcgattttagtgcgctaggttcgatgaaactttttaaaatataagcctaaactttttggcctgtttaaaaaggaattaaaaatttttaaaatatttattcatctcccttttgatagaaaaagcatcagagagccttatttaacttttaattaacatttggtgcgtttcagagcacgttctgaaaaaatatttatgaattaattttgcaaaataataaataagtaatgaaaaagtcagaattttgaaaaattttaaaaacaacaagcgttggcattttttcaggttaagttagtcctttacaatggagaaggcctgcaaaatttggagagattatatagattttagtgcgctaggttcgatgaaactttttaaaatataagcctaaactttttggcctgtttaaaaaggaattaaaaatttttaaaaaatttattcatctcccttttgatagaaaaagcatcagagagccttatttaacttttaattaacatttggtgcgtttcagagcactttctgaaaaaatacttatgaattaattttgcaaaaaataaataagtaatgaaaaagtcagaattttgaaaaattttaaaaacaacaagcgttggcattttttcaggttaagttagtcctttacaatggagaaggcctgcaaaatttggagagattatatcgattttagtgcgctaggttcgatgaaactttttaaatataagcctanactntttttggctgttaaaaaggaattaaaaatttttaaaaattttaattcatctccncctttgatagaaaaagcatc

SEQ ID NO: 40973 - DNA, 947 bp, Heterodera glycines
atcagcgatttgtactgaaacggcgccaatttgggggacggacaataggtactgaatcggctgacctttctgtgttcttccaacacgtccaattcactcggcttcaattcgtaaacgccaaacatcacattgtaattgattttgctgatgctcaccgttttgtctatttttaaaattaattttaattatttattttaataaaatcaattgctttttaaaagttcaaactgaaattttcaaaaaatgagaaatgttcaaaaagaatgattcgattgaaaacaataaatattgccatagactaaattttttacccaaataatcgacgagttcttcgtaaacggttctatccctgagggcgtatttgaaaatgaaaacggaggagaaaagaatggccatgctgacagcgatcacgaacagaataccaatggattcgcgtacatttcccatttgattcttttgctgtgtgaggaatgtgaaatcagtctcacaatcagtgatgagtgattcattcattaaggcaatttaatgggcaaacattttaaaaacgcatttccatgggactgggaaattaattaaatttatggggcattcaaaagttctgaggcatttttgaacttgtcacaactttttttttctttatggcatattcaattttaaattcaccatctttgatttattattgcgtgtatttgcctcttttttgggtccgccgtcgacatttgaggaagggacagttacgccccgcgggggaattggcggcgacggatcggcggatgggccaccgaacgcacttagcattaattaagagagaatgttcagtcttaaataaatacaaaagttagccgaaacaaaggcaccaattggaaagaaaatgccaaaaaagaggagattgaaaagccaaaattggatttgaggagaagaaaaagtgaccttaagcttaaaaaggg

SEQ ID NO: 40974 - DNA, 1187 bp, Heterodera glycines
  unsure (1)..(1187): unsure at all n locations
aaaataattcattacccaaaagtttttttacaccacttatnngccaatctaatttctgncagatgaaagnccatccattgcctgccggttctcggcacagcaaagcactaatagggtgtttgactcacttcaaaaaataattcattacccaaaagttttttacaaccacttattgccaatctaatttcttgcagatttaaagctatccattgcctgccggttctcggcacagcaaagcactaatagggtgtttgactcacttcaaaaaataattccttacacaagttttttacaaccacttattgccaatttaatttcttgcagatttaaagccattgcctgccggttctcggcacagcaaagcactaatagggtgtttgactcacttcaaaaaataattcattacacaaaagttttttacaaccacttattgccaatttaatttcttgcagattgaaagccatccattgcctgccggttctcggcacagcaaagcactaatagggtgtttgactaacttcaaaaaataattcattaccaaaagttttttacaaccacttattgccaatctaatttcttgcagatttaaagctatccattgcctgccggttctcggcacagcaaagcactaatagggtgtttgattcacttcaaaaaataattccttacacaaaagttttttacaaccacatattgccaatctaatttcttgcagattgaaagccatccattgcctgccggttctcggcacagcaaagcactaatagggtgtttgactcacttcaaaaaataattcattacccaaaagttttttacaaccacttattgccaatctaatttcttgcagatttaaagctatccattgcctgccggttctcggcacagcaaagcactaatagggtgtttgattcacttcaaaaaataattccttacacaaaagttttttacaaccacttattgccaatctaatttcttgcagatttaaagccatccattgcctgccggttctcggcacagcaaagcactaatacggtgtttgactcacttcaaaaaataattcattacacaaaagttttttacaaccacatattgcaaatctaattttcttgcagattgaaaagccatccattgcctgccgggtctcggcacagcaagcactaatagggggttttgactcacttcaaaaa

SEQ ID NO: 40975 - DNA, 992 bp, Heterodera glycines
accgatgcgcccagatttatgggggagaccgaatccttcttggaatagcttccctatagcctgtactttaattctgcgttggatttttgctccccataattgtttgagtaccccaaacggacacttgaaaaaatcgatttttttgttttcggggcagtccccccgagccgatgcgcccagatttatggggagaccgaatccttccggaatagcttccctatagcctgtactttaattctgcgttggatttttgctccccataattgtttgagtaccccaaacggacacttgaaaaaatcgatttttttgttttcggggcagtccccccgaaccgatgcgcccagatttatggggagaccgaatccttccggaatagcttccctatagcctgtactttaattctgcgttggatttttgctccccataattgtttgagtaccccaaacggacacttgaaaaaatcgatttatttttgttttcgggcagtccccctgaaccgatgcgcccagatttatggggagaccgaatccttcgggaatagcttccctatagcctgtactttaattctgcgttggatttttgctccccataattgtttgagtaccccaaacggacacttgaaaaaatcgatttttttgttttcagggcagtccccccgaaccgatgcgcccagatttatggggagaccgaatccttcgggagtagcttccctatagcctgtactttaattctgcgttggatttttgctccccataattgtttgagtaccccaaacggacacttgaaaaaatcgatttttttgttttcggggcagtccccccgaaccgatgcgcccagatttatggggagaccgaatccttcgggagtagcttccctatagcctgtactttaattctgcgttggatttttgctccccataattgtttgagtaccccaaacggacacttgaaaaatcgatttttttgttttcggggcagtccccccgaaacgat

SEQ ID NO: 40976 - DNA, 892 bp, Heterodera glycines
attaataattaaatgggcaatgtaaattttatgattattctctctgagataatcacaatcaattctaaataattaattaactttcgatcgaaaagactgtcctgtccacaactacacggaatgccactcttcaccgatttaaagggtataattgtatttatcacaatcacttctaaacaatctatccaaatgaaatatttaattaaaataaaaccaaaaaacaaattataaattttcacacaaaaattttcaaaaataaattaattaaaaacaaaattattctataatattcaaacatacgcggcgaaccaaaactttgctagaatctaaatatatattgcaataataaataatgcttaaaatttaataaaagctatatattataatacaaaaaggagatgttaataaatttaaaaaaagttttttcgtattggtattataaacaactaacttaaagagaaaaaaactattaaatttttctttaatcaccacttcagtaattactgagaggcatgataactagagatcggaccggtcggtttttttcgattttcggtttcggtttttaaccgaaaaaaaccgaccgagaaatttttgagtttttcggttttttcggtttcggttttttcggttttttaacagaaatcgttcgacccaaataattaaaaaccgaaacaatcgaccgacttttttgacaaatcagatgccattttttttaacaaaattcttaaaattttcctccggcggcgcctaacggcaccgccgaccccccaaaaagctatcttttcttaaaaaattagctcgaaatctcaaaatttggtatttttatacaaaatcttctaacaaatagcattaaaattacaaaaaaatttcccggcggcgcttatcagca

SEQ ID NO: 40977 - DNA, 1289 bp, Heterodera glycines
ttaattctgcgttggatttttgctccccataattgtcctactaccccaaacggacacttgaaaaaatcgatttatttttgttttcggggcagtccccccgaaccgatgcgcccagatttatggggagaccgaatccttcgggaatagcttccctatagcctgtactttaattctgcgttggatttttgctccccataaatgtttgagtaccccaaacggacacttgaaaaaatcgatttttttgtttcataaatatttttttcagaaagtgctctaaagcgcaccaaattttatttacaacttaattttagcactctgatgctttagtatcaaaaaggaagatggagaaaaaattttttaaaaaatttttccttatattttggttatatcgttttgcttttggtggggtgcttggaacagtggaatcatgcgcacccgtccgatctggcaagttaagcaacgattgctgactagccaaaagtttaggcactctgatgctttttctatcaaaaagggagatgaataaaatttttaaaaatttttaattcctttttaaacaggccaaaaagtttaggcttaacttttttttcagaaactgatcagaagcgcaccaaacattgcagggatactgaaaggaagagaaataacctgttttatcacattagcttgtcatcagtttttataaaaaattttcaaaattctgagtctcctattattttatttatttttcaaaattttgaagggcggggggggggggcgaaggcccaccacgaggccccgaagaggccgagtgagtaccttcggtgcaggaaaattattaaattttaaaaattttttaattcgctttttaaatatgccaaaaaatgtaggcttaacttttttagtgaaaattcgatcactcatattttttgctaattgagcagaagcgtaccaaactttgcagggatactccccggtaaaggactaacttacactgaaatgagcgccgagctagctggctcaaaaaaattttcgaaaatctgagtctttcgtttttatttattttttgcaaaattaattcttaaatattttttcagaaagggttctgaaacgcaccaaattttatttacatgttagtttaggcactctgatgctttttctatcaaaaagggagatgaataaaatttttaaaaatttttaattcctttttaaacaggccaaaaagtttaggcttaactttttcttcagaaactgatcagaagcgcaccaaactttgcagggatactgaaaggaagagaaataacctattt

SEQ ID NO: 40978 - DNA, 1285 bp, Heterodera glycines
gtcatgattcacgtgttaattcaaaatcatgatttccttcttaatttacggtcatgattcacgtgttaattcacggtcatgtacgtttaattttcagtcattattcacatgtcaatttacgggttaaatcacgtgtcaattcacggtcatgattcacgtgttaattcaaaatcatgatttacgtgttaatacacggtcatgagttacgtgttaattcacgatcatgatttacgtgttaatacatggtcatgattcacgtgttaattcaaaatcatgatttacgtgttaatttacggtcatgtaagtttaacttacagtcattattcacgtgtcaatttaggggttaattcacgtgacaattcacagtcatgatttacgtgttaatacacggtcatgattcacgtgttaattcacggtcatgtacgtttaattttcagtcattattcacgtgtcaatttacgggttaaatcacgtgtcaattcacgctcattattcacatgtcaatttacgggttaaatcacgtgtcaattcacggtcatgagttacgtgttaattcacgatcatgatttacgtgttaatacacggtcatgattcacgtgttaatacacggtcatgattcacgtgttaattcaaaatcatgatttacgtgttaatttacggtcatgattcacgtgttaattcacggtcatgtacgttaaatttacagtcattattcacgtgtctatttacgggttaaatcacgtgtttcactgtcatgattcacgtgctcaatcaggggcgaattaaaggtaacggtcataattcactatccataattaattagtccaaattaaagttgataaataattgaagactctaatacatcaaatttaaaagaattaaattaaaaggcatgaaatatatatatatatatatatataaattagtcataaattaatagtatgaataaataaatgaatgaagaacacccaaaattaacgcacatataattcaaaatattaaaaaaaattcaaaaatgtctttttaaaattatgatataaaaattaatctattcataaaatcaaccaaaaaaagtcatttttttaaattttgttttgtactaaaatgaatgaataaaatgctttttaaacttgagaatcgcataaagatgatggaatttattttttaaaggattaaaatatactaatgaatttaaatatattttttatttaaattttattcaaaaaaaattatcgtctaaaaaaatttaattaaaatctaatttaatatactttttaatttaaaa

SEQ ID NO: 40979 - DNA, 955 bp, Heterodera glycines
  unsure (1)..(955): unsure at all n locations
tttcggggcagtccccccgaaccgatgcgcccagatttatggggagaccgaatccttcgggnatcgcttccctntagcctgtnctttnnttctgcgttggntttttgctccccatanttgtttgngtncccccnncggncccttgnnnnnntcgntttttttgttttcggggcagtccccccgnnccgatgcgcccggntttntggggcgnccgnntccttcgggnnttgcttccctgttgcctgtgctttnnttctgcgttggntttttgctccccttggttgtttgngtncccccnncggncccttgnnnnnntcgntttttttgttttcggggccgtccccccgggccgntgcgccctgntttgtggggngnccggtcccttccggcgtggcttccctgtngcctgtnctttngttctgcgttggntttttgctccccgtgnttgtttgtgttcccctgccggncccttggnnnnttcgntttttttgttttcggggcagtccccccggtccggntgcgcccgggtttttgggggggcctgttccttccggcgttgcttccctctggcctgttctttctttctgcgttggttttttgctccccttgtttgtttgggtccccctctcggtcccttggcggtgtcggtttttttgttttcggggcggtccccccgccccgctgcgccctgttttttggggcgtccgtgtccttcgggtgttgcttccctgttgcctgtcctttgcttctgcgttggctttttgctccccctttgtgtttgtgtgccccggtcggccccttggggcgctcggtttttttgtttcgtctctgtttttttcggcgtgtgctctttggcgctcctgcttttctttaaaagttggttttcgcgctctgntgcttttgtntcgngcagtgagaaaaagaaaaaattttttaaacaaatttttcctttata

SEQ ID NO: 40980 - DNA, 1370 bp, Heterodera glycines
caaaagtaaaatcttgatcacgtattcgtgatcagcgccctttaagacccctaaagaatatttttggaagatttttgtgccaaaaatttttccactcaaaaaccatgtgcttccccctttggtcccgaatcccaaaatcacttttatttttgtatctttttttaaaaatgtgataaaaatgtaaaataaaatttatattatagagaaaaaaattgcggttttttgtagtttattacttttacagaatgacttttcagaagcgagttctgaatttttttctgaaaaatctaaaattttcagaatttctggaataacttctttcatattgattttagaaaacccaaataaattccataaaattctcctgatttttctctatttttaaagctttatttactcaaaattggtcaacccttaggctagatatgaatttttcaatattcgcccaaaatcccgtgggccaaaaaattggaaaatatttttgaatttttaaaaaattccaaaaattttgaaacgaaaaataaacatcatattcgtgctcagcacatcaaaataccccagaaaaatatttttgacccccattttcaacccaaaaaaaattttcgaaaatttctagggggcctagctcgaaaatttttgaaaatttccgaacatttagtacaccattcgatagaactttaaaagctctacaattttgcccttgggcaatttttggctataaccaacccccgacgagttatgggcccgggactcaaatgtcccgctgaggccaaaatttttttctatttccgtgaaaaaatcgaaatttttctaaaaataccaccaatcgatagagctcgaaaaacggttgcttgaaagtggtctccgttttcccgggaaaaatcgttaaaaaatcttaaaattcaaaaaccaaaaaatcgttttttaggcctagctcgaaaatttttgaaaattttcgaaattttaaaatttgcaaaaatcgagctcattgagctctacaataagtctgctggcgccccctggcttagatcaaacccgggcgtgctattcgcctggtactgaagtgtccaaaaaaagtgattcttacgttgcctaacctacaggtcaggcctttgatctgatcgaaaaatttttgctggcaaagttgtaggccatagttggggcatttcgcttttggggtccgctaagctctgaaagcaaaagcaaaaaatttcgtaacactgagactggcggcaaagtcagttttcgagccgctgggactcagttggcgaccggaccggaaaatccgtatttttcccagatgcgccgtctcgagctacccccctgtgcaaaatttcagccccctagctattcccgttcccgagattttg

SEQ ID NO: 40981 - DNA, 347 bp, Heterodera glycines
tttttgcataattaattcataaatattttccaacccagggctctgaaacgcaccaaattttatttacatgctcttttaggcactctgatgctttttctatcaaaaagggagatgaataaatttttaaaaatttttaattcctttttaaacaggccaaaaagtttaggcttaacttttttttcagaaacttatcagaagcgccccaaactttgcagggatactgaaaggaaaagaattaacctgttttatcacattagcttgtcatcagtttttataaaaaattttcaaaattctgagtctcctattattttatttttttttcaaaattttgaaggggcggggggggg

SEQ ID NO: 40982 - DNA, 1282 bp, Heterodera glycines
acaacattttggcgcagtcagcgaagctaattaaatttctgctcttaattttcccagtcttaggccattttttctttcatttccatccatttttggcacaactcaaggcccccttcccgtaacactctgtgcggaattccatctcactgcgagctctgtgaacacccgcacagtttaaagtggtttggaacgcgttgaggtggaccgagaagccaaaatacgtgcagccactccactgcgcattcctcaaaattcgccgagggttgaaagccatatcattcgctccattcattcatcaccattgacctcggactgtgcaatcaataaataaacataaaaaaaaggcccaccgctgacttgcacacattcattcaattcacacaaagttctatctttttttttttttctttgaaatctctgtcaattcacatcatcaccatggcaagtcaagcggaaatggcaaatttatttcggcaattaacggatgccctccaaaacattgcaacccaaacaaacccaaacccgaataaacaaaattccgacctattcactacaattaattcacaattgtctgagtttgtgtataatccggaaacggattctacatttgacatttggcatgatcggtttggcgctttcatcgagaaggacggacagcaaatgccagacgacatgaaaacgcggttacttttgggtaaaatgagttcacaggattacgcgaggtattctgagagtattttgccacaaaaaccaacaagtcggacaaagaacgtggcgatcaaattcgaagcaattgtcgaggagtgccgcaccattttgtcacttcgtagtgcagcggcagctctggaacaacccggccaaagtttcaatgccaatgcaattgctttaaaaccccaacaggcaaaagagcgacatagtcggcatcaaaagttcagtccttcatcacgccgtgaaaacagcggaaatcagtcccgctctccatcattgaacattcgccgatcatcaaattcgcgtccaccgttcccctgcaagtggtgcggcgcaaaccattggaacagcgagtgtgataaacggcgaccaaagtgtttcaagtgcaaccgaatcggtcatgtgaagcgcgattgccgagtgaaacagaggtcaaacagcaacaacgactcaatgtcggtgatgagtgtcggagacagcctcgacggctggatttcggtcaaatgcagcataaacggcagacctgtcgaactttgtgcagactccgccgcacgcaaaacatcattcaggagtc

SEQ ID NO: 40983 - DNA, 908 bp, Heterodera glycines
acagaggcgtcaattgtcatcgaatagtcctttccataaggaagtactgcttggagtcgtcgctgtccggtgttgtcaccgtcgccattcgccggtaatttgggccggtgacgcggggacagaaatttggcaaatttcaacaaacgacaaaatgtcgatgtgcttttgctccattctgttcgacgaatacatccatttagtaaaatttcacttagattgcgtgacggtgtgctaatgatgccaatttccgccaatgtggccaccataatgaacgaatatttggccaaaaaggacccccggctgaaaggcgtcgtttctctgaatgggcccaatgttttgctgaagagcaaaggcatttgccactttcaggtcacactccctccctcccatctgtcaaattcgtccaattgacctctgtttctgctggttaagttcgccgtcaaacagtacgtcgagctgaacgaagcgaatcagaaccaaaggaaggattacagcggagagatggcacggctgaacatgagcacgacgaacacggcacaacaccacaacacgacggtggggcagtatcagtacaggaagtagcgaatggcacgacggaatgccgaaaaggccaaagaaatgggagaacgaacggacggaaggcaaccaaaacgccgatggtctcacccgaaattgcgataataaacttaattaattattgatcgagtcgattgactctttgtcgagcgtttgtccctccggcgatcattcgcgaatcggtgactttatcttttggtttattatcgatcgaatcgattcgtttgggaatgattggccttctccactgattagaccggaccgtcttttagaatttgttttcggatgcgtcctcttaaatttaatttatttccttccatttttttgttgtt

SEQ ID NO: 40984 - DNA, 1013 bp, Heterodera glycines
ttccagtggggtaccttaacattcatttgtttctgtacaagtgtttccctgccggcagattgagcgaaaatcgttggcttaatcccaaacgactagtgccaaccagggatggcacggaatttcgatttccgacctttttgtggcctcggaatgccatccctagtgccaaccgtacacgacgtacttgtccacgcattgttcatggcctttgatgctcaagtatttgggcggcaacgccgacactctcttggtgattccggtgaaggtcggcacatcgccgaaggcgaacgacgcctccttcagcacctcaggatccgtggtcatcttcaggctgttgcgcagctcatccgacatttccgcttgcagctgcttcactttgtccagcttctgcttcggcgtcttgtaggtgttctcgtaggcgtcgaacactttcttcatggccttcctcccctccaaatttgcatgagagtacgtgacaaagtcgtccgtcactttccgcagctgtaccactgaatcgtcgatagattctctaacgaggtcctaaacaatagaaatcggctcgtccacccaacaattggttttaccttcataaactgatcgtctgcgctgattgcatccaaaagtgtgtcttcctggtccaccgggctcagatccttgaagccaggcttctccgccacttctctcagctgtttcttcaccttttccacaagctcgtcaataggggtgctctgcaggactttgaactcgttcaccgctgccgggtttggtgccggctcgtctttgccataggcggcctcacgcttccgttttttgcccaagtcgcagatcacggtgtggaacaatttgcagccagtatcaaaagcaaatttgccaatgtcgatcagatcaccgatgaagcgacgtttgcgaagggcaacacgatcggaccgagctgttctcaaactgaaattcaaaaacgaattcgcacaggcacggcactgagttgatgcgtaccctgtttcagcatcggcatt

SEQ ID NO: 40985 - DNA, 1060 bp, Heterodera glycines
aattatataaaatatgtaaattaaaagggtttaaaacacgttaataaattttttgaacagcgggtcaacttttttgaaaaaatttgtccaaagcccacgcctacaaatgactatttcactgggccgggttgtcgcgcactttaaaacagctctacagggtccggctctgctcgagctgcttgactctactaattaataaaaaagaatgtttctttgatcaaataaacttttgactattcccaaatcgatttccgatccccgacacgataatttctaaaggtagcaactctaatcttatatcaaaaacattttaaaaagataaaagttgtgttttcaaagtttaattataaaaattatattgcttttttgattttgcttataaattatatttttggtttatccgtaaatcatttcttttttattgtaaggagaaattatttcaatatttttttgatattagattaatccatttcagaatttatttgcagagagtgatctgtaacctttcattttaaaaatcacttttaatgacgcaagaaagggtaaccaaaattggaattggtttgtgtaaaaggggcatcagttggtcattaattagtcacaaaccaaagtgagggtggaatagtcacccaaagtgagggtggaactggagtgttaataattaattagatgcgcccaattggatgaacataattttatgcaaaaagaaaattttaaaattcacaaaaaagcaacaaaaggcacgcaaaggcagcgcgccgaaattatgaaggaccaaaatattagcattgacaaatgaataaattatctgtttgccaatggtttcccttttgctcctctctcaagggtaaaatgtcgccttatatggccagtctctgtgcgagtttctttggcgcgaggctgttaaaaaccgtgaagttgatccatttgaaaacattttggagcaaattgtggcttttatgcctctttcataatttcggcgcgctgcctttgcaatttgcgtgccctttgttgctttttaaaaaaaatttattttgcggacacataacaggaaagtacc

SEQ ID NO: 40986 - DNA, 1209 bp, Heterodera glycines
ttcagtgttcctctttcggacgagggcatggcttacgacacttatcgcgcgagcagtcttccaacccgaaattgcagtactcaggacattccacattgcccgcccgatcctccggtttgcacgtgctttggcattccaaaaactctttgccgcactggtggcagcaaacggagctaaaaaataaaaataaatttttaaaattaaaaattccaaaaatttatcgaacaaagaaagacttgaaatttaaattcacttggcctccgatttaattagggccaattaaattacacataatccaaattttttcaatcatctcatcttttccgaaaagataattaaactgaatcaatccaaatgaatgctgaaaccccaaaaaaatattaaacattgtagataatgttgtttttttatatgttaaattattttttacaaatttctattttaaattatttttaaaatttatatcgaattttatttttcaaaattttacggttcctccaaactgcacacaatgccaaacatgctcagaaaggccaacgccaacaaaattaattttgccataatgaatacgattgttggttgttttaactgtaaaacaaataaaattaattttatttttattttgtttattatattattttattttataaaaagaattccaatgaattgacattactgaaaacagaatatttatttggttagcacagatagtttctcgcttgtcgtgtgatatgtggaaaactatgtgaaatgtgaagagcaatcattgcataatggaatttatgttaatttattttttcctcaaaataatataaatagtttaatttaattctatgcattctttttttattgtaacaaaagaagtcaatttgaagatatcaaattaattgttaaataattaacacctaattgacatttttaattgaagaaatttaaaataataaccagacctaccaatacaattgacaaaatctaaccgtaaatttttcgtttgtagtcaattttttaagaattaatcaaaaatttatgataatgcaaaaaattgaaacaaatggtaaaagagtctttctatgggttttcggatttattttactcaaattctaacattaaacttagattcgaaaacccccaaataatgcttttccttttaataaatcttttcctcaaaaaattgtaattttaaaggctaaaaccacaaatcgggggaca

SEQ ID NO: 40987 - DNA, 1419 bp, Heterodera glycines
  unsure (1)..(1419): unsure at all n locations
atgtgcgtttttcttattttttcaggatcaatgcccactgtgttgatctatccgattgatgcgcacnaaaaattggatgaacaggtgaaatgtttgctcaaacgtgcctctggcgacgtgtcgtccacgacaaagaaattgaaggcgcaggtgagcgggcaaatacttttaaccaaaattaatcacttgtataacttttcatgtttttctatatttttgctaattaacctccctccccccttctctaaaaggatgccattctcgaagcattggagaccatcgaaggcacttccttccaatacatgaagcgcgaccaaattgcacgtctgatgaccaacaaaggcattttattggctcggatggaaaagtagaaaagataaaattaaaaacaaaatttaagatttttgcccgtttcagacgcgacgaggcgggccgtgccttctctgcagctgcacaactcgagctgagcgacacggccatgccatcgtcattcgcttccgtgtggaagcattgggccaattttctgggcaatctttacctggctaaccagtgagtttacttcacttttttcaatgagttttgattaattttaagacgttgctatttgaatttaaatttaaaaataaaataaatttttgaaaaattttcatagcagattttaaaatttatgataaattattaacaatgcaattaaaaaatttcaaaattcaccactttagctctgagagttcagcactgagcaccggtgtgcaggccatggcgtccactttggagcacatttcgatggtcggtgcgcaaaagtcgcgcacttctgtggccaaattgttgtggctgctcaaaattgcctccgcatgcccttccgaaaagctgatgaatgccgtggatgagctgctgttccgctacgtggacaccattcagccggcgaattggcttttttggtgggaatggcacattttaaaatgggcactgttttctcttaatttgcactaaatccaggttgaacgaactgatcactgatgttcaacagcggaggggtaacgcgatggccgagattctaaagcgagtcggtctcctgcagccgcaagaagtgttctgcgcattgcgcgtcgaacttgggccaagccatgttggccgttacatccaacaatgttcgtaagacattcctcggagtgttttttccattcaattttctatgaatctttggaagtgtcctaaaatttgagaaactctgtcgatacgagaacgaaaaaaaagcggaatttctttttctccctatttttttttgcgatattttttatttgaaaaattttaaaaacgtaattttgataatgaagcccggtcccgctcttctcttaaaaactgaacttttaaattggagaaaattcttttattttattttttaatcattttttgttttaa

SEQ ID NO: 40988 - DNA, 727 bp, Heterodera glycines
  unsure (1)..(727): unsure at all n locations
cttattatactctaggtgctaggctttttcgtaaaaatccccgttaatatttggcataaaccatggcacaaaaccaaccaaatcaaatgttaccaaaaattcaatttaatttggttttgagcattgatttgtttcttaattttaaaggatttggcacagcccatcaaactgttgaaaaatacttaaaattatggatgttttaattttcaaaaattgtaaaagttttcttagaaataagaagagggtacggcgtgagggatgtgcgtgagtctcgcggttcctgtgaattaatactaatgactcatgtaatttctcgggtatttgggctctcgagaatctctggccaattgttcggtgctgattctgggtaaaacaatttttgtccagtccaaagtggcagcaggtgatcgatcctctgatttgacaaatgaaaatgtgtgcgcaaatggaggtcttctcgttgcgcttcaccgacactcactcccgtccattccttctcctcaaatatttgtttgtcgagagtttgtttgtttttcctgcccccctccccccccagtttctcccggtgattaattattgttgggctgacctttgctcattgccgtttcgaccgcctattcgggaacgttcatttctcgagaataaaggccaaccaaccagagcgagtggggggggggggggggtggaatgaataattttagaaaattcattttccaantgtatcatt

SEQ ID NO: 40989 - DNA, 887 bp, Heterodera glycines
attgtaaaggactaacttaacctgaaaaaatgccaacgcttgttgtttttaaaatttttcgaaattctgactttttcattaattatttattattttgcaaaattaattcataaatattttttagaacgtgctctgaaacgcaccaaatgttaattaaaagttaaataaggctctctgatgcttttttatcaaaagggagatgaataaaatttttaaaaatttttaattcctttttaaacaggccaaaaagtttaggcttatattttaaaaagtttcatcgaacttagcgcactaaaatcaatataatctctccaaattttgcaggccttctccattgtaaaggactaacttaacctgaaaaaatgccaacgcttgttgtttttaaaatttttcgaaattctgactttttcattaattatttattattttgcaaaattaattcataaatattttttagaacgtgttctgaaacgcaccaaatgttaattaaaagttaaataaggctctctgatgctttttctatcaaagggagatgaataaaatttttaaaaatttttaattcctttttaaacaggccaaaaagtaaaaagtttcatcgaacctagcgcactaaaatcgatataatctctccaaattttgcaggccttctccattgtaaaggactaacttaacctgaaaaaatgccaacgcttgttgtttttaaaatttttcgaaattctgactttttcattaattatttattttttgcaaaattaattcataagtattttttagaacgtgctctgaaacgcaccaaatgttaattaaaagttaaataaggctctctgatgctttttctatcaaagggagatgaataaaatttttaaaaatttttaattcctttttaa

SEQ ID NO: 40990 - DNA, 1762 bp, Heterodera glycines
  unsure (1)..(1762): unsure at all n locations
atgctatacaaattttaaaaacatttcctaatattcttctctccctgggcatcatttaatcttttcaatattgtcacacttctttgtgatacatgccgacccgatattttgcccgtcttccgcctgttgttctgatgtgccaaccatgtctaataaggtatggtagcaattattttgatgacaaatttgtcatggaatgaattcatcatcattttgtttttcaagtcgtctcccgtgcattgaggacgttgaagccgcttgtcaaaacagtgaattgccccaaaattgtcttgaacgggtgaattttttttatgacaaattaattaattatttacctagcacttttcactaaaacagatgcagttctttctagtagaacaatgggtactatctgggttgtgccagcctgcatgctgcttatgcggcgatggaattctccgttgagaattactgccatcggtccgccagcagggcatggcttattgccagccgaaacactcgcaaattggagcaaattattgtaccgcgacatattccgaacaaactccttcccttcgcggggttgtttgtcgcacacgatgagctcttcaagctcttttgggtgcgggttaagctttggcaaaacaactcttccttgacgacagcaaactctgctgtcctcatgcgggaagagtagtgctccacaatgagagcacttcttgtcaccaagcttaccagaatttgaatatcctggataatgctttgctgctgcggcagcacagcaccaacccttgtgggcaaggtagcaacgctgcgtaaatgcagtgactttctcaacagcctttgctaataagctgcgtctcggtgcgggtgaaggcgaacggctaatcgaagctgattgccgtctgcctatccgcgatgatcgcctcggtggcgtcttcggtctgacaaatattgcatcgtctgcctgcgcaattggctcttgcggtgcgcaagactccgacaccaaaccaagcgtgtcagcttggttttcacctgccacttgggcttgggtgagaatagcattaactgcctgtccactcatctgtggcccgatgatcattatgtcatcttcttcatcaatttccattggctcagcggccttggatgtagactgcgcttcatccgcatgtctgtagacaattgggtaaggagttggcaccccttcccttggatgatatggcacattatcagagccatacagctcattgatgtgccacaaaatgcgctttttttcataattgatggataaatctggtagaacaaatgtgcggttgttcataagccatgattcagcatacaggcacacaaagtacccgcagctatttccatcgtgttgggccgtaagattttggacatcaacaatcccggtcaacaatgtggacggcaaaatgtcagaaattatctttctaattttgtccgtcagttgcacatccaatctgccatattgggtaggcaaagagtcggcaaaatgagtaccacattgaacatcatggacaatgagagtccaatgtccagggaaatgtactggcaaaagtataacttctgccggaacattagggtcgtacccaaatgtcatatttttgtaaggcatgactctgtccaggccattgctccataccattgggtcaacaacgaccacttttcgttgtgatatggttgccaagtatgccaagtatgtggcagcnaagccgtcattgagaaactgggtcatatcattccnacaggtctcaatgtatcttgg

SEQ ID NO: 40991 - DNA, 1543 bp, Heterodera glycines
  unsure (1)..(1543): unsure at all n locations
cggtaccggtaccggtactggccggtaatcanccgttttctttggtacgcggtaccggtaccggggttttttcaaaaatgaaattaccgttaccggtttgtctagtaccggtaccgccggtaaaaatttgcactggtaagaatgggggtctggtcgagaaaagagtaggaaattggtgaagaaggagaaatttttgagaaaaaattaaattttatttcatttagtcatgggagtacacacatgcacatgtggtgtagtggttaaactttctatctttcataatttttcgcctgggttcaattccccacttggatagaatattcctcacattttctttaccattattttaattaaaattttaattttaaaaaatattccaacttttttctttcatgttaagcatcctaaaaacccaaaacttaatcaattggtcattttttttacaaattctgttaacaaatcgcattaaaaattacaaattttttcccggcggcgcctatcggcaccgccggccctccttgtcccccaaaagtcttggaaaaaacgtgccgcgtaaaaagcggtgttgaaagcaaaaaaaaggtcattgatttacattaatttacatggccggagaccccttcacaaaattggaaaattggctgctgaccccttgttttgcaataatctgaattttgaggtctacatctgaattttagtgttctatgtcctgaatttgaaaaaaaaacttggtcaacctgaatatacatatacttctgaacaattctaatgctaaaaaacaggtactcgcgcgaaaactgaataaaaattttgtatttggaaaattttgtccaaaaatttttatgttctaaaattaccggtttttaccggtaccggtacaggttgaaaaagttggtaccggtaccggtaccggcttttttgcaattaccgattaccgctcaactctaattattttcgacagattttattttgtgtaaaatttttgaaatttttgaacatgtcgccaaaaaatgtcatcgcgtcaaaaaaataattttttattgcattttttaaaagaatttgggaattttacatgaaaaattcgaaaaatgctaaaatatttttaaaaaatattgaaaatccaaacccaaacatatttttccgatattttttggaaaatttctcaacaaaaattcaagaaaatcaaaaaatacacccctaagaatcgacttaaaaattttcaaaaaatacactcctaagattgacctaaaatttaaaaaaacttaaaaattggggcaatggtaagtacagttttgtggtttcttcgaaaaattatttaaaaatttaagaaaaacattttctaggctggaaaaatgtgctgatcacgaatctgagctcggattttgcaaaataattgattttatctatgatttttatcaagtactagattttttccaaaattttaagaaattagtcgggcgtaaaaaaacacacaggatgttgtagagctcaaaaaaagctttcgaatgagctattgaatgtatggagaagtcatgtttttagt

SEQ ID NO: 40992 - DNA, 587 bp, Heterodera glycines
ctcattctcatcttacctcttttacccacctctctctccttctttgtctatcctcctactatctctctctctcactcattcttttctttcccctttcttcttctctactttgtattctttctcatcttctttttcttcttcttttttccctcctccaatcttatctcttttccatcctctttctctctctcctccaaacttccctcagtattctcatcatctctctttcttcctgtatttacaattattattctcttctatgtttttctctctctctcactcatcaccctccggaacgggccaactccgtctgagccaactttgagtcaatataactcttgaagttattgaccgaatccaacaatcttgatatcattcgaaagctcttcacaggctctattagcttactaaaaattatagaaaatttcataaaaaaagatagaaataaatttttgcggttttcaagtgacaacttttttgtgaggtgcttaatcacttcggactagcttagaaatatcttttaaacatttaaagctttcgaatgataccatgtttgataaatttggtcaacaaagaaaaaagttata

SEQ ID NO: 40993 - DNA, 905 bp, Heterodera glycines
ccatttgttccttgacaatcccgatcactcacccttttaattcatttgacctatgacatttgtcccttgccaacccctttcattcactgtctttgtccattagtcccttgacaatcccactcactcactgactttgaccatttgtcctatgccatttgtcccttgccaatcacactcactcactgactttgtccatttgtcccttgccaatcccactcactcactgtctttgtccatttgttctatgccatttgtcccttgccaatcccacccactcactgtctttgtccatttgtcctatgccatttgtcccttgccaatcccactcactcactgtctttgtccatttgtcccttgccaatcccacttactcactgtctttgtcaatttgtcccttgccaatcccacttactcactttcattgtccatttgtcctatgccaatcccactcactcactgtctttgtccatttgtcccttgccaatcccacttactcactttcattgtccatttgtcctatgccaatcccactcactcactgtctttgtccatttgtcccttgccaatcccacttactcactgtctttgtccatttgtcccttgccaatcccactcactcactgtctttgtccatttgtccctttccaatcccactcactcactgtctttgtccatttgtcccttgccaatcccactcactcactgtctttgtccatttgtcctatgccatttgtcccttgccaatcccactcactcactgtctttgtccatttgccccttgccaatccccacttactcactgtctttttccatttgtcccttgccaatcccactcactcactgtctttgtccatttgccccctgccaatcccacttactcaatgtcctttgtccaattgtccctt

SEQ ID NO: 40994 - DNA, 930 bp, Heterodera glycines
tgattgtccgctgcaagtggtacagtttgaccgtgactttgcgtgcctccacgtctcggctgtgcctgctcagcaactgctcacggctcagctgcgcccgttggggcagtggagagcccatcgggggcggttgagagagaacaaccgaaggaggtgcgggacaaacaaagggggaagcgggcggaacactgcgaaagaatgacgggactttggaagagatgacgacaccagcggacggataagccgaaggtggtggggtcggcgaaagaacagctccaaaacgttggtgtgctgacggttggacatggtgaccggataatggttgggatggcggaagattgtgctgttgttgttgaaccttagcacagggaaagatgtttatgtcttaagttaaacgataaggcttatttaaaaataaagtcatttttggtgtattacaataatttgttgtggagcgaaatttgtggccgctggtggcccccctccgcccattgggtgctgttgaagttggtaccgttgcatttgctgttgatgatggtaggactgggattgctgcagttgttgttgtgccgttggtggagtgggtaccgtaaattgatgctgcgggtacatcccgccggaatttgggggagtacactgcagcgtaacaatcgaaggagaagtgacctcgccttcttggcgttggagcagtacggggtgatgaagttgactttggcccggtaatgacgccgtggctggtgatgacgaagtcgatggatgtgctgccggtgattgcgccggaaaataatcaccaccagacacggacggcgacgaatggggtggagggatcggcgagcttccatccatggccatgtgttgctgttgacgagcatattgttgtgggaaattgcgaaagggacgtccattattgtgtccaacgataaagttcca

SEQ ID NO: 40995 - DNA, 1232 bp, Heterodera glycines
aaaaaaataagtgatagtgacacataatttcatcaaaataacaaaaataacgcaaattataaataagtaatgagctaatgattatcaaaaataacaacagtaataaccaaaacaataataatcattcgagctttttcggagaatttgcatcacttcaactgaacttggccaatgaagttttcgacaaactttaaatttacataacattttattccactccccaatcttttttttttgcagaaaggggttagcctgtcattattttttactaaataagaatgttttttgtacgaaacgcaaaattgaaacgttgtacgaaccggcttttgtacgaaactccattgtacgaactgctattgacccggtaaaaatattacaaacatttcatattaacgtcgaaaaaccgacaattataaacattcacacatcattttatcgtaaggaaaaaaccggcaatggcacattacatctgtgttgagcacaagtgcagttagatacattgtgcaccactttgaaatgggctaaatgaaaaacaaaatgaaaacaaaatatgagtgtatataagacgaccccttgagtgtttgaaaatatcgctcagatgacgaaggcgacgaatggccgatgaagggacatttgttgggccagaaaaacggggccgacgatgctgctccgagaagcagtccaacacaaaagcggcactaaacagttgaacagtgataaattttcaaaatatcggcgaagctataagtcctttttaaatgaaatttgataaggagggagatacccccaggaaatttacatttcctttcccatttgcctagggttgtacacatcggagaagggctttgcgccccccccctcccgcaaactttttcgcggtcgaccattttttaaaaattgcttttcaaaccaacttttttacggcgcgcgctttttccaaaaacttttagggattggaaggaggagaggggagatccgttcggtttttcttcaacccttttttctcgaccgccccccccccgcctcgtgcgactgacgctgctgccaggggcgtatctagaaacatttttcgggggggggggggacccaacctgaagaccttttttttttgctatttaaccaataactttttttccactgctgggtaacaactgcactttttcattaaaaatgaccaaattttggccgttttaaggcaaaaaacttgtaaaaatagtggaaaaggtaggtcc

SEQ ID NO: 40996 - DNA, 1072 bp, Heterodera glycines
ttggttttttgaacatttgcatatttataaaaaaataacccccataaattaaaagaaatgaaatgttttaaatctaaacatctaaattattttgtttaatttattaagcaattaatctaaaaatcaaaaatgtcttgaattttgcataaagtgtcctggttttgaaataatgaataaacaggcgaaaattttctaattaacgtcatcaaatttatagattaatattatttcaataatatatattcgatattaaacaaattctgccaaactgagtaatttttttttgataaaattattataattcaaaaagaattcatttaattgtataaattttgaaaatattttaaaaccatttagactgtcattgcataaaaatgaaagtatgcttattaatttcttcatttgcatttttgattaccatcttaattagtaataattatgttggatcagaaaagaaaaaaatggaacaaaaaacatttgacgaaatatttggagaaaaatgggaagaaaaaagaaacgaagaacagaaaaaaagagaaataattggaaaatttaataaaataaaagagaaaattaagcaaaaaggaagaaaatacgcaagaaaagaatggagtaaaattgaaggaaaaatagcaaaaaaattgggcacaaatcgccaatatatttatgaatggatcaaagaattgggattaaatcaaaagaattgctacaaatcaaaaactgaagaagaaaagattgaaattatcaataaattcattgaaatgcaaaatgaatttaagcaaaaaagaaaatattcaagaaaagaatggaacaaaaattatgaagaaatttgtaagaaaatcggagttagccttttcataattaaaaaatggatgaaacaatttggaattagccgaaaaataacggagaaagaaaaaatggagaaaatgaaaatttattggcacataaaaaaagaaaagccgaaaatgagtgacaaagaaattggaaaaatgttgaaaattcatcaaaataccattggcaattggaagaaacaatttgtacacggactaatggaagattgaaaacggatgaa

SEQ ID NO: 40997 - DNA, 959 bp, Heterodera glycines
tgaattaatttattattcttcatttttcccaatgtttacctccgcattcaatgaaaatggttgttctggcggtgccaccgattctctccaacctttccaaaatgggcaaaattcgctgctcgcaaatttcttcaaatcatcattcaccccaatgccattgcaacaattgacagcagccgaaaacggcaccaaacatttggcaaatgatggcgcgacggaaagcgtaagggaacaaccgcggaagagggccaatgcttcttcatcttcgtcggcaggtcggaagggtttattaactgtccaacaaatgttagcgtgcttttcagtctcccacccgaaacaaacggtgccctgccgtccctcgccgtcgtccaatggaccaaaaatgaccagcgcaggtaaagcgcggagggggggggggggaagataaagctatccatccaatgatggaattctatttgtccagctcgaaagcgccaaattaatcacgaaaaagcagccgcaaatggcactggaaaagggcaaacggagggtgggccagcgaattcgtccgtgggtagcaaaacccatcgaaaaagcaacacaaatggaggggaccggcaacaaaatggtggagcaattggtggtggtggtggtgaggcggggaagggcagcttcgacgtcggcatccccaacggcctcggcaatgccaaccctttccgaactgccctatcccatgtgcccatattgctgcctgacatttgccgagacgagcgcatttcgcacgcatttgactgttcacgaggtgctcactttcgtcgattcattgctttttacttaaattagtcggattccttttcagagtgaagtcaccgcttccgcttcttcgccctccgccggtgcaccttttttcggcacaaactctgctgttggcgccgaccgacgccgacacagcgaacggaggcgcggaaacggcaacatcg

SEQ ID NO: 40998 - DNA, 447 bp, Heterodera glycines
aaaaaagctaagaataattaaatgatgttgattattttcgccgtatctttctttagctgttcgaattctcttgttttctcgtattattaccttattcagtctttgtgctttcgaatgataccaaaaagataggagttgttcgaacatgaacaaagctattctaaaaaaccaggtattgttaattgatgcactcataaagtgcaatagaaccaaaaattttttaaaaggctgttacacacaaacataaacttccaaccatttcacagcatcaaactaatttgacagttattaaaaaaatttgaacagaagaaaatgtcaatttcagccgattcaacaaatagtggcgatttttcatctgatgattatggtaatgagaaaaggggaaacggtagaatttaaaatttaaaaggagatattaaattaaatgtgatttaaaattaaaattta

SEQ ID NO: 40999 - DNA, 1327 bp, Heterodera glycines
attttatcaattctactaaataatacagaaaatatgaactataaaattttaataaaagattcaaatctgtaaaaaaggaaaatagtttatctaactattttaaataatatttcactttcttaagcaaaacgagagaatattactaacaaataagcgtataaaatttcctttcacaataatctttttaaattcaaccaaaaaaatgcttctacataattccaaatttaatttttaatttgtaaatattgaaattaaatattgatttattgactcgactcgggaatcaagaacagagaatcttaatgaaattaatttaaatgtattttttgaaaatcaaaaacacataaaaaggataggtcaacctaaatttttgcgcaggagctcaacataaataataataaaaatttgtagttttttagtaaaattatgtttatggtatattcaatctttttgagttttttaaatttgtgctttattggtaaaatatattctaatttatttatggtaatgaaattataattaattttcaatttaaatttaataatcaccttttatttagttgaatggaactttttggggcatctttttgatttcgtttttttatttcttttctgagtaaaataaatattaaaatcattaaatgcttatttattacaatttatttcagttgcaagtttctgaatttaacctagtaaatttgtaagaaaaagcattttattccatcaaaaatattatttccttcataattttttaaaatattgtattttattttgttaatggaattgttcttaattgttttaattcttcataattttatacgatttgtattttttcaaatttaatttattcttattaaattaaattttattatggatataacaaatggcatatctatatgatttattttttatgataaaagacaaagaattaaaaattaaaattaatcaaagtgaattgaatgtacatggatggagtggaagatcaaaaagcacttcgactcatgtctaagaattagagttgagcggtaatcggtaattgcaaaaaaaccggtaccggtactgaccggtactgcaaaaaccggtaccggtaccggtaccaactttttcaaccggtaccggtaccggtaaaaaccggtaattttagaacataaaaatttttggacaaaattttccaaatacaaaatttttattcagttttcgcgcgagtacctgttttttagcattagaattgttcagaagtatatgtatattcaggttgaccaagttttttttttcaaattccggacatagaacactaaaattcagatatagacctcaaaattcagatt

SEQ ID NO: 41000 - DNA, 1410 bp, Heterodera glycines
  unsure (1)..(1410): unsure at all n locations
acgacgacgacgacgacgacgacgacgaagacgatcgaaaaacacngacgtaagtaaagtgatgattgtgtcaatacacatacacacacacacagacgagagagagaaagatctgctgctgatcgggctaagaagcattggcttgccttattattattatgtgctttatcccattttgcaaaaatgtgtaaaaaatatatattttttttttattaattattttaattatacaggtggataaattttttcaaaaacacactctttgataaccgataattttgaaaaaagccaaaaattctcaacaaaaaaactttatatcctaattttaaaagtaattttctttgcgcaatatttttttttaaattatcgattttattaaattaataattacggcttattgaattttatttttcataaattaagatgttttttttgcctttttgtcaaaaatttaattgcttctcattttgccaaattactgcccaatttgttaactcacaattttaactacattaattttttttttaaatttatttatttggttaaaccccgacttttaaaaaatgttgctaaaattctggctttcaaattttccaattactcctcactctgccaatttgctgcctaatttgttgactcacaattcaactccataattaatacatattcataatgattttctttatttaatgaattttttaattagttaatttaataaatcccgcctaggcctctattacttcaaaaaaatcctccaatttttcaaaaattcttgctcccaaattttccaattgctcgtcactcttttttgccaaattactgcccccaaactttttggccccattagttttctctcctctatgaaaattgtatagtagcaagaaagagtttttaaaccagtttttgttgtttatgtgtacaaatatttccgatttttgccatcggctttttttcgcacccaaccaaaaatttttggtttgggtttatttactgtatttgttaagatggccacaaaaatttgttggatactcattaattttacaacaatttttttcacaaattcattcgtcttgcagaaaaaagtttttcatgtaatttttgaaatgtgaaaattttcatttcagaaattttcctatgagaaaattaatattacattttcaaaaaaaaagaactaatgaatttaatttaattatttaagcaattatacttttattaaattcaacagaaaaaagcattttttttttataattaaattaagtttttctaaacaataacatatttaatttaatttaatttaatttttttttactaaattatatttttgcaaattaaacaaaataattttttgtcttataattaaattaagtttttgctagaaagtaattttttttattattattttctaaaaaa

SEQ ID NO: 41001 - DNA, 1065 bp, Heterodera glycines
gaatttcggcgccataatgcaccaagggacaccaaacgtgccaacagtgtcgaacaacggaacatcgtttggacgaatagcacctccgggaatttcggacggcacaatgcaccaaggcataccaaatgtgccaacagtgtcgaacaacggaacatcgtttgggcgagtggcacctccgggaatttcggacggcacaatgaaccaagggataccaaatgtgccaacagtgtcgaacaacggaacatcgtttggacgaataacgcctcagggaatttccgacggcataatgcaccaagggacaccaaacgtgccaacagtgtcgaacaacggaacatcgtttggacgaataacacctcagggaatttcggacggcataatgcaccaagggacaccaaacgtgccaacagtgtcgaacaacggaacatcgtttgggcgagtggcacctccgggaatttcggacggcacaatgaaccaagggataccaaatgtgccaacagtgtcgaacaacggaacatcgtttggacgaataacacctcagggaatttcggacggcataatgcaccaagggacaccaaacgtgccaacagtgtcgaacaacggaacatcgtttgggcgagtggcacctcagggaatttcggacggcacaatgcaccaagggacaccaaatgtgccaacactgtcgaacaacggaacatcgtttggacgaataacgcctcagggaatttcggacggcataatgcaccaaggcataccaaatgtgccaacactgtcgaacaacggaacatcgtttggacgaataacgcctcagggaatttcgcacggcataatgcaccaaggcataccaaatgtgccaacagtgtcgaacaacggaacatcgtttgggcgagtggcacctccggggatttcggacggcacaatgaaccaaggcataccaaatgtgccaacattgtcgaacaacggaacatcgtttgggcgagtggcacctccgggaatttcggacggcacaatgaaccaagggacaccaaatgtgccaacactgtcgaacaacggaacatcgtttggacg

SEQ ID NO: 41002 - DNA, 1015 bp, Heterodera glycines
  unsure (1)..(1015): unsure at all n locations
tttatttttntgaaaattaattcataaatattttttcccccctagctctgaaacgcaccaaattttatgtacaagttaacttaggctctctgatgcttttactatcaaaaagggagatgaataaaatttttaatttgctttttaaacatgccaaaaagtttaggcttaaattaaaaaaattttcttcggctctagctctttcaataagcaataaaatcgtaccaaattttataggcatactccccggtataggactaacttaacctgaaaaaatgacaattgtaattgattttaaatttttttagaaattctgagtttttcactgtttattattttttgcaaaattaattcataaatattttttcagaaagtgctcttaaacgcaaccaagttatttacaagttaaataaggctctctgatgcttttactatcaaaaagggagatgaataaaatttttaatttgctttttaaacatgccaaaaagtttaggcttaaattaaaaaattttcttcggctctagctctttcaataagcaataaaatcgtaccaaattttataggcatactccccggtacaggactaacttgacctgaaaaaatgacaattgtaattgattttaaatttttttagaaattctgagtttttaactgtttatttattttttgaaaaattaattcataaatattttttcagaaagtgctctgaaacgcaccaaattttatgtacaagttaaataaggctctctgatgcttttactatcaaaaagggagatgaataaaatttttaattgctttttaaacatgccaaaaagtttaggcttaaattaaaaaaattttcttcggctctagctctttcaataagctataaaatcgtaccaaattttataggcatactccccggtacaggactaacttancctgaaaaaatgacaattgtaattggttttaaatatttttagaaattctgagtttttactgtttatttattttttgaaaaattattcataaatatttt

SEQ ID NO: 41003 - DNA, 1001 bp, Heterodera glycines
  unsure (1)..(1001): unsure at all n locations
ctgaagctgatcttcacaagaatgtttgaccctaatccattacaatgggagncaaaaagattggccaccatttgaaacgtgtctttttatttggaaaaatcttcgcctatttttggtaatttaatttatttattaaaataaaagaattattaagtgagtggagcaaaggagaaaaatatgaagaaagtcacgaaaaattgtggaaaatatttgtaaataatttgtcggatttgaacaaaaattcaaacgaaaaacaattaaattttattaaaatgatggaaaatcttttgaattatttgcgaaatcaatcgccccaaatcagtgccgacgcccaaaggaactcaaaagaattgttggccaattgtgtcaatcagtttttacttctttgcgaaagcaatgccgagttttttgaaaattttcgggaattgtccaaaagtcgcgcagttttcaaagaaattctcgattttgcttccaaaggaatggaagaaatgcttcccaaccgattaatgaattggtttaatggtgggaaaaaataaaaaattaattaggaaaattaactaatttttaaataaaaatctagatcataacaaaaaccaaaaggaccttgaaaatttcggtgttggacgatcttttgctgatcgcatctttgagaagagtaatatcaaaaagtcatacgacgaatgcccaaaggaaaatatgacgaacaaagaactgatcagggctgatcagaaagcacaaagcaatggtgaaaaaatctttttcattaaattttaaatcctctaaatttttttaattaatcaaaattattatttattaaatgattttttgtttgtcagatcctgaggcttattacttgatgacttcttacattgacttcttgcaaacatcagcagatgatcggtaaattgaattttacgaattgccaaaaatctttaaataaataatttcaaaataaaattgtcaaaagcaattctcattcagataataataatcctttttac

SEQ ID NO: 41004 - DNA, 963 bp, Heterodera glycines
  unsure (1)..(963): unsure at all n locations
tggcggttgttctaagcgagacaatggaatggtaattcctcctggttttattaattgatattaaatggtgggattaccctttagtgatnantctattataggaggtaataggattaattaaattgatagaatgaatatgtgtgtgntgaattctaaagaaattttatagaagtagtatttaaattaattataatataaagtttttgtagaataataaatgataaaataatttttttatattttatttaaatttaaaagaaaattaaattttttgtttaaaagttagaagtaaaattattgaatntgttattggttgattttttttatttggttaagtttgaggtaatttgtaaattatgatttattattntgtaaaataaatcgaaaataataattaaatttaaaaattaatcattcataaattttttaggttcaagttattgaattgaaactattttcgagtcaccactctattatagcatctaatagtaattactgaattaactaattgatggaatacttgtttttcaattcatcactctatcagcactctatcagcactctattagttaggataattaattaattaattattattattttaatttttcgattggttggtcctatgggcgtgagatcatctgtgacggatatacaccccacgtgttggccattgtccttctgctaacaatcgcggccatcaaagcacccgccttttatgccatcggattgatttatcaggcaattttctgaaagtgtaccaaagattggaaaagaaaaaattcaaaaattaattacccctctggcaaaggcacgtagttcaattttttatgcccccgattttccgagactcagaaaaatcctcccctccctcccctccaccctcatgaccggttttggctttggatatggacaccataaatgaataaaccccaattttgcattcatttttcataacaatta

SEQ ID NO: 41005 - DNA, 981 bp, Heterodera glycines
  unsure (1)..(981): unsure at all n locations
aattttgaaaaattatgtaaaggttcaaaaaaaatatatctctagaacaactcaaaaaaccagattttccaacttttatgcccataaatttgttcaaaattgacggatttttttggaaatttgcaggctaatagagcatttgaagggctttcgaatgataacaaaaatgtttgatttggatgacaaagaaaaaagttatagtccaaaaacctgctggggcccaactgacgtagaccggtcccataccctaccaatggtaggacaccagaaatatttacatcagtgcctccgcgtgtttggggttgcgcgccagcgccttcaggtagaagccctctgcttgcaccacgtcactgcgtgccatctccacgtaaatgccgtactcggtcagaatgtccgggttgtagggcgccaacgagtaagcgtgctgaaaacgggggaggatgcagaatcatcctgacaaaattttaagtgatttttttaacaaaatgtatcaaaatttccaataatttcccggtgacacctaacggggcgcccggattaaaatttatcatagtttaataaaaaaaaaaaaattggtcccaaaatgccaaaaaattagtcatacacttttgatgaaaaacggatatgaattcacaaaaatttaaaatttaccccacttctccctcctccggagccatcagatttaatgaatcattcgagtcatcatttttttttgagacacagacaaattgtttggaattttgtaagttattggattggtagtgcctatcaaaaaatgccaaaattggttcgattttggacgccatggaaggaaaattgtacccaaaaaaaaactccctgttgtgccactttttgccccatcaaccctanaagcatgccnaatttgtccaccacattctccaactacctcaatgatgctgcgcgccttgcgcaaagtgccctcccagcgcgacccgtttggcgccgaaagtgcggcaaccg

SEQ ID NO: 41006 - DNA, 981 bp, Heterodera glycines
  unsure (1)..(981): unsure at all n locations
atacaatggttggtttatcattttaaattcatatggcccttcctatagaatttggcaaaattataatttntggctcaataattcgaccaaaaaatttgtcattaaattttgaatttgttgatatagattagggctattctcacaaatattttgaattccgctgtgatttgatcgattttctatgcttcggttcacttataaatttcgttttttatttttaaattttttcaattaattttcttatatctgactaatccttaaaaataaaataaagttttttttacagaacaatgatgttgagcggacatggaaaaattacaaggaggagcagctgaagaatggcttgctcgattggcaagactacaggtgaagaaaatctaacagagggcgagaagggtggaaaatttataaaattcttaaacttttcaggaatttgatttacggaaaaccacaggagggccaggagatttcaccggaatacgtcaaaatgattgagcgagacgaacgtcggtggaaggtcagaagcaggccaaaaagacctgctaatttatattaaatcgagaggctaacggccaaattttaatatttttaaatgctttccatacagtaaactcaaaaattgatttacaggtggctgactacaattcggacggtaaaatggaccgcacggaatacggctgtttcatgcacccggaggactgtgaccatatgagagacattgtggtgcaggtggattagcaaatttatttatttaaaaaaaattaaattagattattgcttattaaagtccctttttcaatgattttcattttatatatttttcacttgtcttaacttggaacgggaaaaattcacctcaccctaattctcatatttacccagtattgttgcctaattatttaaaatgatttattattaataaatctttattngctattgnagccattcattataatacttaaaatttctgtacaggaaacc

SEQ ID NO: 41007 - DNA, 1155 bp, Heterodera glycines
  unsure (1)..(1155): unsure at all n locations
atatcgaagctgtttctacgctattctaaaaacggttataccaaaccncagattttgaatccggttttcagaaanaatgccttgtggtgaaaacaatatttcacatttcactccataactttgtgagttcggcacggatcgagaccgggataagaccattggaaagagcagctcgagctctacaagaaggtatggaaagaaaaaatagttatttctgggactttttcagaaatcagaattaattctccaatgtggcccaaattttaggcccccagccacagccctttgcttctcccagttttaagtcttggatttgtcaaataaattcaagacttcaaattaataatcaaaaattctcttaaaatttttttgaacccaattcaaaaaaggaaaaaaatttgcagtcaaaaaattattcgaatttctccaattttgtttccataatttccgaaagttattcggtatcataatgccaaaacaaaacgaaatcgttttaaaatattcctttctggacttgacttggtttcttgatatcgaagctgttttctacgctatttctaaaacggttataccaaaccccagatttttgaatccggttttcagaaaaaatgccttgtggtgaaaacaatatttcacatttcactccataactttgtgagttcggcacggatcgagaccgggataagaccattgaaaagagcagctcgagctctacaagaaggtatggaaagaaaaaatagttatttctgggactttttcagaaatcagaattaattctccaatgtggcccaaattttagggccccagccacagccccttgcttctcccagttttaagtcttggatttgtcaaataaattcaagacttcaaaataataatcaaaaattctcttaaaatttttttgaacccaattcaaaaaaggaaaaaaatttgcagtcaaaaaattattcgaatttctccaattttgtttccataatttccgaaagttattcggtatcataatgccaaaacaaaacgaaatcgttttaaaatattcctttctggacttgacttggtttcttgatatcgaagctgttttctacgctatttctaaaacggttataccaaaccccagattgtgaatccggttttcagaaaaaatgccttgtggtgaaa

SEQ ID NO: 41008 - DNA, 1220 bp, Heterodera glycines
ggtcattttttgtctcgattctcggtaaaaagtattttcatcacagccaaagtgattaacgacaatgataaagctgaaggaagcactgggccttctgcggctaatcatcagcagaatgtcagtgaacaatacctcacaaaattggagcttgaaaaggtgagttaatttttttaaaaaaagttttgccaatttctttttttccgatggtttttcatctaaattccggttttcgacagattttatggtaccaaatttccagttgctaaatgaatttttccaacgaaattcggatttccggtttttaattccaaatcgacaaccatggggcttattgcgagaaaaaaaaaattgacatttaagcgaatttgttggcatattttggctctcccaagacaaaatttcaagaaaatttacctgtttttctgggaatttccctgtttggttattggctgctaaagaaacaatggcatttggtgaaaaaaaaaacatttttgtatttcagaggctgctcaaagccgaattgaagcaaagagaaatgatggaagagcttaaagagttgaaagatgccaacattgaacagcagaaaaaggagaatggtaatggaaaattacgataggaaattaaaaagtttaaaaattaataaattacaaattaaagaattaggtatttgtttttcaaaaagttcgctaattaaacaaaaatatttaagcgttcattggacaaatccaagagttgaaggatgaacagcagaagtgcttggacaaatatgaagcattggaaaaagaattggccagaaaatacagcaagcttttttaaaattaattgcttgcaaattttctttgaaaatatacgaagttatggttcctagggttttaacatatattttttgtgctggttttcttcactaaaaatacacgaaaaatccatttttttcatggtttcaatttcgcctatatttttgccgttttcgccccgatttcgacacttatttttggtgtttgttaaacaaatcttaattatttcccaatcaaattccgatccaaattcgaaaatcaatttttaattcttcaatttcattcgaaaattaattaaagctgagaaaaattattcaaaaaacaaaattgtaagaataattaataccatgttttttgaaaatatcatagtaccaagtcagaaaaattttgtttaaaaatttaaatattggaataattttcaaattg

SEQ ID NO: 41009 - DNA, 1074 bp, Heterodera glycines
  unsure (1)..(1074): unsure at all n locations
ttgcatggcccgggcaggtcttgggtcgggaaagttgaataaattntcagttgcaatatggcctccccggcacaatacataaatgtagagcaggctcaaaatagaggaaataccaaagattaaaaaattcgtgtttatggcccactctgctttggctggacataactcgccagagagtggagatagacccttaaaatcgtctagaataattatctcaacaatttgtcgggaaagttgaataaatttcagttgcaataggcatattggcacaatacataaatgtagagcaggctcaaaatagaggaaataccaaagattaaaaaattcgtgtttatggcccactctgctttggctggacataactcgccagagagtggagatagaccctttgttgatacatttgaaaatgtagagctcggctagcgcattcgaataacacaaaatttgttttcatttgcccccaaacaatccgcttatgacgggccgaaagaaaattcacaaaaatttggcaccggaaaaactccattttttatgggccagcataataaagtaaacccaaaatgtaagggaatttaaattggtcatgtgagatgtttagttttttatttgacccatccgttttctgggaaaaaacttttcgagaaaagctgaaaaattttccaattgcatcagaagcagactcaaattcttcaacaacataatgtaaaaaatattacgcaagaaattatttttacatcctttttagaaatgctgcataaatttttattgtaaatagtcacaaacaaactttttttcactcccaatatctaccagttatcatacaaaaaggcaatagttaagcactgagatataaaaaaatcgtctagaataattatctaaacaatttgtcgggaaagctgtataaattctgggaaaaaacttttcaagaaaagctgaaaaattttcaatcgcatcagaagcagccctcaattctttcacacataatgtaaaaaatattacgcagaaattatttttagatcctttttagaaatgctgcataaatttttattgtaatagtcacaaaaaacttttttt

SEQ ID NO: 41010 - DNA, 725 bp, Heterodera glycines
tactgtatttaatagctttaatgaataaactttggatcttctaggaaattcaaggacgacttgatggagcatttaaatgctaaattcttcatgaaaaaatttagggcaaataggcaaaaatgtttatgttattacaaacgctgccattaaaaattgcggcggagcgctatcagttattgctgacctggctgattatacaaatacgacttggatatcacaaataagctccagtgatgtaacgccttctgctgaaaagaattaaactactgtatttaatagctttaatgaataaaatttggaattattcggaaattcaaggacgacttgatggagcatttaaatgctaaattcttcatggaaaaatttagggcaaataggcaataaatgtttatgttattacaaacgctgccattaaaaattgcggcggagcgctatcagttattgctgacctggctgattatacaaatacgacttggatatcacaaataagctccagtgatgtaacgccttctgctgaaaagaattgaactactgtatttaatagctttaatgaataaactttggaattattcggaaattcaaggacgacttgatggagcatttaaatgctaaattcttcatggaaaaattttgggcaaataggcaataaatgtttatgttattacaaacgctgtcattaaaaattgcggcggagcgctatcagttattgcggacctggctgatta

SEQ ID NO: 41011 - DNA, 1068 bp, Heterodera glycines
ataaataaattaatatattttaatcattaaaaatattttagttatataaatgataagtcgaaatttattaatgctcatataaaaaaatcatttgataatgattcaacagaaacggaaaaattagcactttgtggaaaatattttacttacagatttgaaggtttcagacgcggtgtagaatcttaaaaaattaatattatttaaatcttttataaggtttacgcgatacaaattaaggaaatagtaaagttatgtgatcttgatagaaaatggataaagaaaaggtggtttattgaaaaaaatggtgttaattcgagtgcaggatctataaataaattaatattattttaatcattaaaaatattttatttatataaatgataaatcgaaatgtattaatgctctgataaaaaaatcatttgataatggattcaacagaaacggaaaaattagccctttgtggaaaatattttacttacagatttgaaggtttcagacgcggtgtagaatcttaaaaaattaatattatttaaatcttttataagatttacgcgatacaaattaaggaaatagtaaagttcatgtgatcttgatagaaaatggataaagaaaatgtggtttattgaaaaaaatggtgttaattcgcgtgcagaatctataaataaattaatattattttaatcatttaaaatattttagttatataaatgataaatcgaaatgtattaatgctcagataaaaaaatcatttggtaatggattcaacagaaacggaaaaattagcactttgtggaaaatattttacttacagatttgaaggtttcagacgcggtgtagaatcttaaaaaattaatattatttaaatcttttataagatttacgcgatacaaattaaggaaatagtaaagttcatgtgatcttgatagaaaatggataaagaaaatgtggttttattgaaaaaaaatcggtgttaattcgcgttcagaatctataaataaaattaataatatttttattcattttaaaataattttagtttatattaattgataaatcgaaattgattaa

SEQ ID NO: 41012 - DNA, 757 bp, Heterodera glycines
ttttttgggagaaatttttttccatacaaatgttcccagcatgggcagaggggcgcggagagcaagggccccttggttctacagggaatttttaaatttattctctatgccagaaaaatgcctatgtcttttttgcgagaaattttgtaacatacaaatgttcccagcatgggcagaggggcgcggagagcaatggccattctattctacagggaatttttaaatttattctctatgccagaaaaatggctatctcttttttacgagaaattttgtaccatacaaatgttcccagcatgggcagaggggcgcggagagcaatggccattctattctacagggaatttttaaatttattctctatgccagaaaaatggctatctcttttttacgagaaattttgtaccatacaaatgttcccagcatgggcagaggggcgcggagagcaatggccattctattctacagggaatttttaaatttattctctatgccagaaaaatggctatctcttttttgcgagaaatttttccccgcatgggtagacgcgcgcggagagcaatggccattctattctacagggaatttttctacttattctctatgccagaaaactggctatctcatttatgcgagaaactttgtaccatacaaatgtttcccgcatgagcagacgggcgcggagagcagtggccattctattctacagggaattttttaaattattctctatgccaaaaaatggctatcccttttt

SEQ ID NO: 41013 - DNA, 376 bp, Heterodera glycines
ttatttattttttatttaccaaaaataagacgagataaaatatatcatataaaaaatacaaaaaagataatcaattcaaaaattatggcaagcgttaaattattttaacagaatttatttttattattaacaataaagaaaaaatataatcattaaagatatttaataaatattttagaaattataaataaaaccagattaactaccaatataaagtcaaataatataagaaaacaaaatttttttttgtattaattcatattatatgtaatgtactgaatacatttttgttatgttttttagatgaatttttggattttgtggctttttacccccaaattcctcaaaattgttcttttttaaatattttctgact

SEQ ID NO: 41014 - DNA, 895 bp, Heterodera glycines
cacaatttttgccaattccgaatttccgcttttaattccacccggatttgttcatttccgttccgttttccgcaggttgtgcccttttgagggttctcttcacaatcgttcggccgaactttcgtcccacgggcgattcatcgccgtccctcccacagaaaatgccccgcgggaagaacaaaaagagacacagaaaaggcgaaattcgtcggacaaaagcgaaggaggcgagggaattgtggtggtcattcagcagaaagtgttcgaaaattaccatttggtcgcctattcgctggtcattgtgacggttagagacagagtgggagagaaagagagagggagagagaaagagggaatgggagagagttggagggggagagagagagggagggggagagggacacagagaaaagaagaaaaagacaagacgggttgggtgggacaaacccaaccaataccgtacacggaggacggagcagggaaaagaaaattatccatattttcaaatatttccacggctgctcccactaatttcgttcaaaacttttcatagatttgtattttacagaaaattttttggagctgaaaaagcaaaaaatgttcaccgatcaactggggttttctcaactgatcaccttttcggctccttcttctccatccccttaatttgcttgccttttctgatcaatcttctcacccttttattctaatcggttagagttctctctctctctctcctctctctctctctctctttcgatcactcttttaaatgcgtccttcgactttgggggggggggggggggggtaatttgccattttccttttgtccgatcactgattgatcagtcagtcccttcctcttcagtatttgttggctttctgcgagtatctg

SEQ ID NO: 41015 - DNA, 590 bp, Heterodera glycines
cattcggccgcttcgcggcctcaggacgggcgctcccacccctcagaatccccaatcacacaggaattctgaggtcttatccatgtctaaagtaaaatctgattacatattcgtgatcagcgtcataaaatagccctaatgacatgttgttggaagatttttgtgaaacaaattttccactcaaaaatcctggtcaccccccccccttcggtcccgaattgcaaaatcacttttatttctataacttttttcaaaatattccactaaatttgatcaaaaactaagagagttatgaattttcgaaatttcactggattttcctgggcccaaattttgacaatttttcaaaatttttaacaaccacccaaaacgtctgaaacaaaaaataaagtatatattcatgttcagcaccttaaattagcccataaaatgcatttttgctaatttcggagcaaaaaaatttttcatgaaatgcaaaaccatggggtcccccctatgatttagaatttcaagatcacaattaattttataactttttttaaaatcctgagaagaacatgagataaagcacattagataaagcttaaaat

SEQ ID NO: 41016 - DNA, 1038 bp, Heterodera glycines
gggagcaaaaatccaccgcagaattaaagtacaggctataggaaagcttctcccgaaggattcggtctccccatatatctgggcgcatcggttcgaggggactgccccgaaaacaaaaaaatcgattttttcaagtgtccgtttggggtactcacacaattatggggagcaaaaatccaccgcagaattaaagtacaggcaatagggaagctactcccgaaggattcggtctccccataaatctgggcgcatcggttcggggggactgccccgaaaacaaaaaaatcgattttttcaagtgtccgtttggggtactcaaacaattatggggagcaaaaatccaacgcagaattaaagtacaggctatagggaagctactcccgaaggattcggtctccccataaatctgggcgcgtcggttcggggggactgccccgaaaacccaaaaaaaaattttttggataaaaattatttaaatgaactgactagataatatttaaaataggttatttctcttcctttcagtatccctgcaaagtttggtgcgcttctgatcagtttctgaaaaaaaagttaagcctaaactttttggcctgtttaaaaaggaattaaaaatttttaaaaattttattcatctccctttttgatagaaaaagcatcagagtgcctaaactaacatgtaaataaaatttggtgcgtttcagaaccctttctgaaaaaatatttaagaataaatatgcaaaaaataaataaaaacgaaagactcagattttcgaaaatttttttgagccagctagctcggcgctcatttcagtgtaagttagtcctttaccggggagtatccctgcaaagtttggtacgcttctgctcaattagcaaaaaatatgagtgatcgaattttcactaaaaaagttaagcctacattttttggcatatttaaaaagcaattaaaaaatttttaaaatttaataattttcctgcaccgaaggtactcactcggcctcttcgcggcctcgtggtgggccttcgccccccccc

SEQ ID NO: 41017 - DNA, 820 bp, Heterodera glycines
tctagagtcaaaaataaaaaaggtagtcgccaattagctcagaagcacaatatttgacatttttatagataaattccgttaacaagttgcacaaagcacgccgcaaaaagaagtggtttgaaaaggtagaaaataaaagaagtcgacaaattcgatgttgatatcatacatgcacaggggtgtctcgacaccccccccccccccccctcgttcgtcgtaaggggagcggctgtaaaaaaaggagggggtcgtaactaacgaagggggaaaatgttagatcttgcacaatttccttagcgagatcaatacaaaaaagttttcccggcggcgcctatcggcaccgcccgccacccccttgcccaagttttttggaaaaacgcaccgcaaaaaaaaagatcgccagaaatttttcgaaatttgtaggctaataaagaaattagagctatcaaaccaaatgggatagatttgtcacaactatgaaaggaatttatcccagaaattggactggcgcccagttgaacggcgacatgtcgagttgctccggaaacaaagttcacctcgtcccagtcgggcaacggaccccgcgcccgtcgttgtgcaacattcagtggcggcggtgcatttgggtggtgattccgctgccatcggtcatttctctgttggtaataactgccgcccggacgtcgttccctgtcgtcttcacttcctctccccgattgaccactgccgcctcctccgcctttcttgtgccaataatctgtgccgccgccggaccgtctcggtccgccaatgcctccgccgccgcccgaccgataaggca

SEQ ID NO: 41018 - DNA, 1214 bp, Heterodera glycines
tggttttttatgaaaggaagtttgaggaacaaaatgctcccacgcgctcgaaattgtttcagaaaaaactttgtatttactttcaaatgtaaaaacattggttaaatttgatgtaacattagaaagtaaatacgaatttaagattttaatattgttagggttaaagtttctaatagttattcttggtggaggagatttctgtaatgacaaattaatttgaaaaaataaggctgaatgatcagaaagtataaggctgtccttaatttcaacaaaatgaattaggttcgggtttgtacataagcagaggtctagaacagaatttcctcttgtcggacctacaatttttgtatttaaggaaaatttattgaaaaaatcaacaaaagttatgccaagacaggtatgaggtatgggacaattgttagaccaagttatgtctctgttgcctatgttaaggtctcctataattaaggtggaagctgtaataaatttttcaaggtagttaaaaagtgattttgttgctttaagtttggtattaggggggcgatataaagataaaatagataaatttttagcattttttaatttacaaaaacagatttcgcagccaaattttgtaaccgtgttactaaaataaggctgaatagttttatttataataagagaggttccgccccctttgccttttaatcttttcgcattaaaaacaatatatttgtcattgagtgattgtccaagaaaagttatttcatcagattcagaaagccaggtttccgtaatccccataatgtcaattttctccactgtcagtaatgcacttaattcatttagtttattttttatggaacgtgcattaactaaacaaccagagatggacaaattcttatttgtatttacattatcatgagaaaatttaagatgaggtttaggggattttctgttttgagaatatattttttggaaattttgtctacccccaaacctcagaacattgctgtcatgatttagtttttttgaaagcgtgtcagcagagagtcaatgtgaggaataggcccgctcaagttctctccgttcatcctccttcctttgaattcacttcggagcactagcatcccgttgtagatgatccagtcagcggatgttccttatcgcttttcggacactgcgctttgagttcacgtctcgctttcacttgttctgagtgagcgatccctgat

SEQ ID NO: 41019 - DNA, 1188 bp, Heterodera glycines
ctgcttggcctgtgcaaaaaaaagcacgattaaatgatctcccactagaaaagcatacgccatacagactttttttacttgctgtttttaattttccttaattttcaaatcgggatgattttgtactcttggttttccatttctctatttttgttttttccttggcattcgcttgccttttctttattatttgcatttttgtgtttttccttgaggtttatttaacttttcttaattattcttttctttgactttcacacacattttttcttttcattttatttttccattactgtttttcttttctttacttagctttaaatgattaaaaaaattttatgaatttacgtaaatttttctgtattttttccataattttgtgttttttcgttgacatttgcttggcttttctttttattgcatttttttgaggtttgtttgacttttcttaattcacttggcagatttttcttttctttgcttttctttaaatgaataaaaaatttttaaaaagaattgcgtaaatttttctgtatttttctagaagtttgttgattttgctttgcttttatttattgtttccattttttccttgaatttttcttttgaggtttgtttgacttttttaattcactttggcacatttttcttttctttgctttttttaaatgaataaatcctttaaatgaatttgcataaatttttctaggagtttgttttttttcgtttactttgcttggcgtttctctattatttacatttttccttgaatttttcttttgaggtttgtttgatttttcttaattcactttggcacattttttcttttctttttatttttctttttgtgtttttcttttctttgcttttctttaaatgaatatattttttaaatgaatttgcataatttttctatatttttctaggagtttgtgtttttcgttgactttgcttggcttttctttattatttacatttttccttgattttttcttttgaggttttttgacttttcttaattttctttcacttgccagatttttttcttttcacttcatattctcttccttttgtttttttgcttttcttttctttgctttaaatggataaaaaaatttctcacccgaaacagctgcgcagggcattgaaatagccgtagtgcgcgccctgctgcagcaacaggcagat

SEQ ID NO: 41020 - DNA, 823 bp, Heterodera glycines
tttaggatttttaacgattttcccagagaacggagaccactccaaaacatagttttcgagctctatcgactggtattttttcggaaaatttcgatttttcccggaaatagaaaaaatttttggcatgagcgggacatttgagtcccgggtccataactcgttaggggttggttttatcgaaaaaactccttagggcaaaattgtagacttttttaagctctatcgaatggtgtgccatatggccggaaattttcaaaaattttcgagctaggccccctagaaattttcaaaaattttttttgggttgaaaaagagggtgaaaaatatttttctggggtaaattagggtcctgagcacaaatatgatgtttattttaagtttcagattttttggaattttttaaaaattcgaaaatatttttaatttttttggtccttggaaatttgggttaaaatttgaaaattcataactcaatgaaggactgctcaatttaagtgaattaaagctttaaaaatagcaaaaaatcgggagaattttatgaggtttatttggttttataatgttcaaaagaaaaaaagttattccagaatttctggaaattttcgatttttcagaaaaaaattcataactcggttctgaaaggtcatactgtaaaagtaaaatactacaaaaatccgcaattttttcctctataatataaattttattttacatttaaatcacatttttaaaaaaagatataaaaataaaagtgattttgggattcgggaccaaagggagaaagagactatgatttttgagttgagaaatttttcaccaaaaa

SEQ ID NO: 41021 - DNA, 755 bp, Heterodera glycines
  unsure (1)..(755): unsure at all n locations
aaaattcaaaaatttcgtgtagttctgcaaatgttatggcaaaaaatgttaatcaagttttgtgggttttggcaattacttttttcgcaaatttctttagaattttgaagattattagcgaatacaaaatgcatttaaaaatcagcgagtgccgatctctattgatgccgaaccccggctaatggatgttcttgggttctttaacaaagcgatgtgccatccaacagaactcttcccaactatgtcaatacagtttctggccattaccgctgtctgtcccacaaattcttgcatattgtttttaattaatttttttcattcatattgatttctttatagacattctcatttgcaatttgtctaattcattttatttttattttcttttagaaatattttattttttattttattatatcattcaaaaacacttattcatttcctcttgatctcgaatttaaaaaaaattgttttttttttgtaatccaaacttttttgaatccaatattaattttagaaaaataaatgcagctgcagaaataatttttgtaagagataaaggatttagaatgagataaaattaatagaaataattgtaggcgcttanagcggaaaaatttattattatgaattctanagatcaatataaatcaggaaattcaggncaagagcgattcttgttatgaaaaaattcatcataatagagcccggattttgcagcatttgctaataagcatnngaaaacgatttctaac

SEQ ID NO: 41022 - DNA, 1664 bp, Heterodera glycines
  unsure (1)..(1664): unsure at all n locations
tttttattaataatataaatttaaaanaataaatattcatattcactaagtttcaaacaaacactgcgttgaaaaaaacaagaatggaaaatanaattaaaaaatgaagtagctttttttaaaaatattaaaaaaatcaattatttccttcaatttttcccattttggttttttaaaaaatttgttttttttggctgaaagaaaattttattcgcctgctgaaaaaatggaatacgtgaaaagaattgaggagataaaaaataaataaacgcaatgatgagtaagccgaaaattgccgaaacatggacattccaattacaaatttaagccaatggacgaaggaattcagcaccaaagtgttctgttaggcttgaaaaatttcaaattctattgcaattttaagaaaaagcatcaattgggtcaatttcactatctgataataagctaaatcttttacttccctatttataaccattattcaattttttttttaaataaatgttttaacctattgagtttcgaggctttctgcttttcatttctcgcataaaagtcttttggccttttttcattttcattaattatttataattttttatgcatatctttataaattgtttattttgtattgaaatttaaagaaaacacggccgttttatttttaatttacaattaaagtggattttaattaattgttttttggtcaaatttaaagaaaataattaccacaatcacagaaagcggaatcaccatatattcagctacaattataatatcaaattatgtaatgagaaggaattgatgaattattatccatgagaaaaattcgaaaaatgaaagaacaaaagcaaaaaaaagttaacgaacccaagaaaattgcaaaacttagctaacatttatttttagtcactaaaagttgcactgaccctccataccaaacaaatttttttggatttaaattatatggaagagaagtcgcaaaataactacataaaaatgtacaaaaaattctggaatatgtataaaaaatgtaattaaaatttttaaatgcttttttgaataaaaattcttagaaaatacgtgaatagggcacaaaatgccacaaaagagcaaacacggtttggaaaattcatattgttttcttctcgatttttgacgattttgaggttattggctatttttatggcatgttttagcgcttttggtgactttttttctttttttatgacttttcatgagttattgaagatttttaagacttatttattaacttttgataatttttcgtaagttaaattcatagccctaacattaattctaactaaattttataaagaatagcctaaatgtatatcaaaatgaaaattgccaaaattgattgaaaattatcatataaattaaacataatccaatgaaggaaaaattgctaaagaaataaaatattcttaaaatcaatgcaataatcttttataaacatttatgaaaaagaaaattaattttcctagatatatattcgtattttaataaaataatatatatatatatatatatatattagttagtttttagtaaattaaaaaatttttaatttatttttttaaataaaacgaaaagacttttattgattttttaatttaattatttttaaattcacanaaatttag

SEQ ID NO: 41023 - DNA, 1009 bp, Heterodera glycines
tttttgctaaatatatttttaaaattaagaaaaatacgcaaattatggaatatgccgaaaaaggagatcccgaaatgcataaacagttgcaaaatttaattggtgcctttcatacactgagcggaatgaatcgttttcgaagtatattcgctcgcgtaaaatattaatttatttttataattttgccgtgctaggttaaattgaaatttaaaaaaaatatagcataggaaataaaattttcggactttttttctcacactttttaaaaaatcaaaagaatttttttttgaaattttgctgcctaacagagacaatctttaggattagcgaatgatactttatttcttgaaaaatattgtgacaatattgttcgtaaaaatgccaaaagagacgaaattaacaaaatatgctctctcaaatttgtttcgctaataaatttactaaaactgaaaaacaaaaataattaaaaatttaaatctaattagcagatttacaatatttaagagcccttttgggatgaacaacaatacaattccattcacaaattagtcatgggaagtgccaattattttcagcatcgttttggcattaatttggccgatttttcgcagaatccaacgcaatttggcgatatgaactcaaaaattgtgccattaattaatttggtgcgaaatcgtctgctgattgaagatgggccaaagcaacagaagaaggcgaaggatggagaaaaacaacagaaaaacaaaaaagatgggcaaaagcgaacgatgccaaaggagggggcaaacgatgccaaagatgatggagtcaatgggcattttaggaaattggccaaatggcggccgacggtaattgatatgcaaattgagtcccaaataaaaaaaactcaaaaaggagattttctgttatttttaactatcggcctcatttcaatcaacaatcccagaaattttatttttctaatgttttacttgattttttatgaaaataaaaaggtcccaatttttga

SEQ ID NO: 41024 - DNA, 1550 bp, Heterodera glycines
  unsure (1)..(1550): unsure at all n locations
gatagaaaagcatcagagagccttattatctttaaattaacatttggtgcgtttcagagcacgttctaaaaaatatttatgaattaattttgcaaaataataaataattaatgaaaangtcagaatttcgacaaattttaaaaacaacaagcgttggcattttttcaggttaagttagtcctttacaatggagaaggcctgcaaaatttggagagattatatcgattttagtgcgctaggttcgatgaaacttttaaaatatacgcctaaactttttggcctgtttaaaaaggaattaaaaatttttaaaaattttattcatctcccttttgatagaaaaagcatcagagagccttatttatcttttaattaacatttggtgcgtttcagagcacgttctaaaaaatatttatgaattaattttgcaaaataataaataattaatgaaaaagtcagaatttcgaaaaattttaaaaacaacaagcgttggcattttttcaggttaagttagtcctttacaatggagaaggcctgcaaaatttggagagattatatcgattttagtgcgctaggttcgatgaaactttttactttttggcctgtttaaaaaggaattaaaaatttttaaaaattttattcatctccctttgatagaaaaagcatcagagagccttatttaacttttaattaacatttggtgcgtttcagagcacgttctaaaaaatatttatgaattaattttgcaaaataataaataattaatgaaaaagtcagaatttcgaaaaattttaaaaacaacaagcgttggcattttttcaggttaagttagtcctttacaatggagaaggcctgcaaaattaggagagattatatcgattttagtgcgctaggttcgatgaaactttttaaaatataagcctaaatagggaagctattcccgaaggattcggtctccccataaatctgggcgcatcggttcggggggactgccccgaaaacaaaaaaatcgattttttcaagtgtccgtttggggtactcaaacaattatggggagcaaaaatccaacgcagaattaaagtattaaaaatttttagattttttattcatctccctttttgatagtgaaagcatctgagtgcctaaaataacttgtaaataaaatttggtgcgtttcagagcagtttgtgaaaaaatatttatgaattaattttgctaaaaaaataaaatagtgaagctttaaaaattaataaaaaattttaaattcagaattactggagttagcatcatagcagtgcttttccttgtctttttgatgccctcgcaaaatctggttcgcttctgatcagtttataaaaaaaaagttaagcctaaagtttttcgctcgtttaaaaagcaattaaaaatttttagatttttattcatctccctttttgatagtgaaagcatctgagtgcctaaactaacctgtaaataaagttttgtgtgtttcagagcacgttctaaaaaatatttatgaattaattttgcaaaaaacaaataaataatgaaaa

SEQ ID NO: 41025 - DNA, 613 bp, Heterodera glycines
ctgcgcctcgtccattgccattcatttcccccccccccccttcttaggtgccaatttttccattttcgccgtttgcctttccctgcactttttggctttgcccataatttggcaaaaaatttaggcaaatatttgaacggaaggagcgaagcccaaccaaatcagcctcccaaatgttttctttgcatttacaaattattccatgaataatttttgccttaaaagtttttttccatcatttttgcatcatttaccatttaataaacaattttatttctctttcgtttcgtaaataaataaaattaatttaaaaataaataaataattgtaattattaatcatttccattttcaatggctaacatttcaactcattaagcagtgaatgaatgaataaattccaattcgaatttcctcccccccccctccgattttcttttcccatttcattcttttgccaccgcagcagcacattttgcccatttcgttcgtttgctttttgccccccccccgccggcgtttcccgcttcactttttgccctcgggggatttttgagggaaaagacgacaaaactaagcgaaaaagaaattttcccataatctctccccccccc

SEQ ID NO: 41026 - DNA, 562 bp, Heterodera glycines
atttttgaagaaaagtcgggattttttggaatttttttgagttttttttcaaaaaattagcaatttttgtacaatttatgttaataaattgcatagaaattttcaattttttttccgacggcacctatcggcaccgccggactcaaaaaaaaacttaattttcttgaaaatttgctcaaaatcgctaaattttccattttttggacaaaatttgttaacaatttacattaaaaattacaaaatttttcccggcggcgcatatcggcaccgccggacccttccttctccacagtttctcaaattctctttggataaagcgcgccgcaaaaaaagggtgtaactttcccaaaaaaaaaatccaaaataatgtaaaattacttaaaatattttgatctttttaaaaaatatagaaataaactaaaaacagtttgaaattaccttttacatggttaaaaatttagcctattaaatattttttttaaatttattatatatttttttgaaaaattccgagttccgacatttttggggtcggaattccgacttccgaaaatttttagtg

SEQ ID NO: 41027 - DNA, 1113 bp, Heterodera glycines
atttctaattcatgaaccttttttggcattttttaatcttcctcgtcatataaaaaatttcgttacatttcgtttcatttctattttttaaattttttgttttactttcggttttcatattattttattaaattattagtcgtttctttttgtttttgaaaaagatttctttgatttggcaaacatgtagatttattaacaaaaaccgtcatccccacaaaaaaaatataaataagaataatttttaatattttatattataatctttagaattttttgcagcgggtattattgtaacttcaaggccaaatgaattcattttgttggtttttttggatatatttatacacataaatttggggtaattacaaagataggaatcagaatgttctgattttggtttaatcacaaagatagtaaccagaatatctgattttgacaacaatagaaaccagaattttatgagtttggtttaattacaaagatagaaaccagaatattcgaattttgacatcaacagaaatcagaatattctgtattggtttattacaaagataggaatcagaatgttctgattttggtttaatcacaaagatagaaaacagaattctgatttggacaaagatagatatcagactattctgattttcaaacgaatataaatcggaatgttttgattttcgtttaattacaaagatattaaccagaaatctaatttgaaaacaatagaaaccagaatgttatgtttttggtttaattgcaaagatagaaaccagaattctgatttggacaaagaatataaatcagatgttctgattttggtttaattacaaagatagaaaacagaattctgatttggacaaagaatataaatcagatgttctgattttggtttaattacaaagataggaatcagaatgttctgattttggtttaatcacaaagatagaaaacagaattctgatttggacaaagatagatatcagaacagtagtaacagctgcacgacacatctagtatacaatattccttggagcgatcttcgtgagtgagatcaaacgcgcagaccagacagttattgccgaaaatgttgcaccttgggtcaggcacaat

SEQ ID NO: 41028 - DNA, 935 bp, Heterodera glycines
cggcaagaatttttttcgttagcatttcaatatcgtgtgagtgtttggtagagccagactagagaaggaaaatgttggtaccaagtttgcggtcaaatccccaagagaaaaaagagatagccattttttcggcaagaatttttttcgttagcatttcaaatatcgtgtgagtgtttggtagagccagactagagaaggcaaatgttggtaccaagtttgcggtcaaatccccaggagaaaaaagagacagccattttttgggcaagaatttttttcgttagcatttcaaatatcgtgtgagtgtttggtagagccagactagagaaggcaaatgttggtaccaagtttgcggtcaaatccccaggagaaaaaagagatagccattttttgggcaagaatttttttcgttagcatttcaaatatcgtgtgagtgtttggtagagccagactagagaaggaaaatgttggtaccaagtttgcggtcaaatccccaagagaaaaaagagacagccattttttcggcaagaatttttttcgttagcatttcaaatatcgtgtgagtgtttggtagagccagactagagaaggcaaatgttggtaccaagtttgcggtcaaatccccaagagaaaaaagagatagccattttttgggcaagaatttttttcgttagcatttcaaatatcgtgtgagtgtttggtagagccagactagagaaggaaaatgttggtaccaagtttgcggtcaaatccccaagagaaaaaagagatagccattttttcgggcaagaatttttttcgttagcatttcaaatatcgtgtgagtgtttggtagagccagactagagaaggaaaatgttggtaccaagtttgcggtcaaatccccaggagaaaaagaagatagccatttttgcggcaagattttttttcgtagcatt

SEQ ID NO: 41029 - DNA, 1091 bp, Heterodera glycines
attgtcatagtagagtgaaaaaacggtcagaacaggtgcattttagtgatagaataaatagatgaaaatggtgtaaaatgcttcatgatgtaattgtatgtgagtgaagggtattgttgtttatgctatgattttattgagatttcaaaagtggagttttcacccgtgccagtcaaaaaatcgtgccagcctaaaaaaataggccgcagtgaaataatgctacggctttttttccatttcttcgctgtccaaattcaaatttgactctcgcgtaccgctttccctctcacctgtcaatcaaatttgcgtctttgaaattccttgcgcttccttttcctttatagtcggcaattgcatcaaaaactcaaaatacgtcccctctctgcgtgcctttccacactcagctgtcaatcaacttctcttcgcgaaccaaaattcaaattttggttctctcgcgtgccatccttctccgctgtcattaaaattggtttttttcgccggccttcctccatctccccgcgaaccttataatcgatccgccactcgtccgctaaattctccgccctttcgcgtttgtgctggaattggcgtcctttcattcactcttcttctctttctcaaaactcaaagcaacaaaacctactccttccgcttcaacttattcgtttttattgtcttcaattccataatttaaatcatccttttttcattttgtcttctctttacgttttatttttttttgttcgacttttcttctcaaaaaaatggctcacttatgctctttcgttgataacaaggaattgggacgcctcgcaactccgaaggggaaatttagtgcgttttaaaacattagaatttgtaaaaaaagagaagttagttttacatcaatttaaggccctttttacgctcttgaactcgctcgcaattatggattggttggaggggagataacggaagataaattccgttatcttattaaaaccgagcaaaaacaatgggaattggctttcgaattgatggaaagggcccgggataagtggagaaaaaaaacttttgggctgcaacacctttgagctcatccaaaaaatttt

SEQ ID NO: 41030 - DNA, 1310 bp, Heterodera glycines
tgaatggtcagttgaacgcgttggacccggacaatgcctcccggaatttggataagattaagatacacggactgatagcactgatcgggatctgatttcatcgggatcccctaattacaaaatcttcgggattgacctggtcgcttcggtcgcgatcccgactcgagatccctccgtccccatttgtctgatctctaatatgaacgagccttgctttatccaatggtaccaaatttatttcttctttgcgtcgaacctttgttttttatttgtgtttagaatttccagaaaatttttgcatatattacatattaaatattatggttttacatttccttgtgaaaaattgtacaattattgatcacccattttattggcactttcctgcgcacaaatttaatagcataaaatgttggcaaaatgcctacttatggccctttgctcataaaatgccaaatttggcgaaattacaaacagcagggtaatggaaaatgtcatgctgtcaaacacgcacgcatgtgccaccactttgttggccataaatagcagaaaaatcaatggtttttattcacttattattttttaaaatttttatttataataaattagataaatctctgtcgtatttgcttactatgcttcttaaatgaatggtttcaaattaaacgtaaattttgtacatatttttcgtttcaatgaatctcatccctataccgtatatgctctttttatcaccacatgggggatttttttcaacctcctcagaaaagggggataattatagactgggggataaatggagactgtgggattatttttcgactgacttatttagtgaaaaatttttgagtttttttgaacatgtcgccaaaaatgtcatctcgcaaaaaatcggaacgggccaactccgtctgagccaactttgagtcaatataactcttgaagttattgaccgaatcaaacaatcttgatatcattcgaaagctcttcacaggctctattagcctactaaaaattacaaaaatttcgaactataaaaaaagatagaaataaaaaactttgaaaattctgccttttttgcggttttaaactgacaacttttttgagagctgattaatcactgagaaatagcttataaatttcttctaaacatctagggctttcgaatgataccatgattcgaaatttttgctgtgttttcacataaaattggtgtctcaattcgttaaattcctaattttgggggtccggattgaaatccactgtaaaaataaataaatttaattaaatttttagcaaattaaaaattt

SEQ ID NO: 41031 - DNA, 941 bp, Heterodera glycines
tggcgaattctgcttcgcaatgataggaagagccgacctccaaggatcaaaaagcgacgtcgctatggacgcttggccgccacaagccagttatccctgtggtaacttttctgacacctcttgctggaaactttacacattcaaaaggatcgataagccacgctttcgcggtccgtattcgtactgaaaatcaggatcaagtaagcatttgcctttttgctctacgagaggtttccgtcctctctgagctcgccttaggacacctgcgttacgctttgacagatgtaccgccccagtcaaactccccgcctgacactgtcatcggcgcgggtcgccgggccaccgggtggcccgacttaacaccaaaatggacaccctttcgggcgcactcccgttttaccgattaagtaaggaatcgatgaaagtagtggtatttcactggcgccttgcggctcccacttatgctacacctctcatgattcttcacaaagtcagactagagtcaagctcaacagggtcttctttccccgctaaatttgccaagcccgttcccttggctgtggtttcgctagatagtagatagggacagtgggaatctcgttgatccattcgtgcgcgtcggtagttagccgacgaggcatttggctaccttaagagagtcatagttactcccgccgtttacccgcgcttaatcaagtttccttggcttaacattcagagcactgggcagaaatcagacacggtcaacgtccacaaggaccatccgtctcctctgttttaattagacagtcggattccccgagttcgtgccagttctaaactggtcgttcagcgccaaccgaagtgcataccctgacgagcatacacgcagctgaagcgctccacaagcagctctcaccactagtccacgcaccatccccgaaagaacagcacgcagccac

SEQ ID NO: 41032 - DNA, 1216 bp, Heterodera glycines
  unsure (1)..(1216): unsure at all n locations
attgtggaagagctacgactacaaagacatntcggctactttttccaacaaaaggtgcaataaaaattcaaaatctttttttttttattcttttaaggattttatttttaagatcgccaaaatgggtttgtgcttgaagtgggcgatcagaggagaagggtgattttttaaaagctccatatatattttgggtctttaagtttaattgtcatttttcttttttagcaccagttcttttgcgatcaaaccgacattctcttgcgggaaatgcgcgaaattgcgatagaatttgtggttgtggaccttcaattggccagggattctctcagtttggacgattttatgctgactcgtttgggtctttgcaggtttcaacagacaaacacattaattgctttattttcgatttaattcagcaaggatgagcaactcgcttcttacgtggaatttaatgtgcaaaaattcactgcaaaatgcgccagcggcgcgtcgtcggaggcccgacaaaatgcgttgtccacgcggcgattgttatgccttagcgagtcgtgcatcatagagagagacccgatcagttacgctgtcatttgtgccagatcacttcgaacggtgggataacaaaaataaagggaatttgtggcatcatttttcataagttgtcctgtaatgatgttcattaaattgttatatttaaatcttatgcaaatgatttcattagatagaaaaacttcttcccattccaataattgctaattagaactcaaataattccacaaaaccctcactaattgttcaacgacaataatattactcatggaaactgaccaaatcgaaattattaaatagacttgtagaaaaaaatcacactaaaatttttttgattaagttatataagttaattctatgttgttttccaaataacattcagtctcaagtgacttaataaatccatgttttaaatctatgaatctctaaagttttcgacttttttaatttttcagattgtttgccttgtccgtgatattaatgacccgcaaaaattcaccattgtctacgaatgtggcgttgagcggacattcagttccaatgaacggttttcccttttttatattcattttcctttttatttttcagggattctctgctggctgcccttttggatggaattcgtggttccggcaattaccaagtccatctcatctcaagccaaaggcat

SEQ ID NO: 41033 - DNA, 1216 bp, Heterodera glycines
tttcaaattgccataaagttcagggaaatttaggaagcgcatggccaaacattttcaaaatattcaaaaatatttctcttcctattactcaaaaagacaatgaaaaaatagtgtattttatgctcaatacatgacaaatttgatgaaatagtgccgacaatcagttttgactattgtttttttgacccaaaagctttttttacagtttctgtttctatttgaaaatgtcagattggagtcctcataaatttgaacctaagggtaattaaatatttttaagcgttcataagaatgatgaccatcgctaccgcgaggaccgtcgatcgaatcccaatgccgcgttttaattgatcgggaaatcaatggccaaatgcttttttgaaaattacaatttaaacgcataaaaacaaatattttcaaaaaatggtaatttaaaaaattaaaaaattcaatgaattaagcaccaaattttatttatcccttaacaaatatttgcgtattaattcgtatttcatatctattgataaaacgcaagcaaaattaaaaaataattgcattaaactaaaataatatcaccaattaaagaccatcacatttgtagtgcatcgctacattaaagtagccgcataatccggcgagattggcacgtagttgtgctcccaagctgcacttgtggatggcacttttgggtcaggatcaggcgaagaccaaacattttcttgtggtcccaagatcgctgaaaaataagtaattaaaatcaaaattaaaaaaaaaaaaaactaaatttaattgacctatagccgcggtgtattcctcaaccacttttgcccgctccgatctatactgcttccataatgctccaatctttagacgtaatgcttttttaaggaaagcactttgttttttgcgtttttgctcctattaattcaatgttaattatttatggaaaatggcaaaaaaaacctccaattttggcgcgaaaaaccctttttccattacggaagaattattttgtttggtaataaaatctgaaatactatttatttagaaggtttggaaatcgggaaggtaacctaaggggttaaagggtgcatcatcaaatatattaggatggggagttgaagcctttctacgattcccggcgtttccgttaagggcatcataaagccgactgtaaagccgtgccgtttttacaggcaatacagctccaatccgg

SEQ ID NO: 41034 - DNA, 1225 bp, Heterodera glycines
aatccgtaatttcggtggtcaaaaaactcgtagtttccgcaatccgtaataacgcccagccccctggatttgtgagagaacaaaaaatgcaaaatttcttttcatttttttgttcatttccaattctcttccttctcctcctcttcttctccttccttccgcttcttcttcttcttcctcctcctcctccgactgttggattctctcctcctttttcgtcccatttcttctcctttgttctgttggcacaaaaaaggcttttaaaaaatgtttataatttggatttacgcagcgacaaatcaatttaatttgtatcccaaatttttctctacggcgcttttcggcgcctaacccttttaataagcatgccaaagcaatccaaacacagctcgttcacacctaccggcccttactaccttttccagcgcttttgcggccattggcgccgtttcggcaccgtcgccacttttttccgcctcgccgctgcacacaaattccaccagtcgtggcatttgtttctgctcgtggtacttcttgatgtgctccaggcctgtgatgtgaatgagggatttttgatctcgacaattggttgtactgcttcgagagggccacaaaaagcccgtccaattaatttcataagggagcagcagcaacaggggttttcttgaaatcactgtccaaaaaattctaaattcaaaaccctgatcggtctcccgaccagggttttcaattatggaaagccgtaatacgtgattacgcgagtttttaaacctccgtaattacggaaacccgtaattgcatgcagccctgggtccgaccgatctaattcggctccttctgatcacaaaatccatttcgctcgggttccgatcaatcttgcctaggggacttaggcaccggacattttgctgacttatctctaaccatgactcagaaacacagcggccaaatcttttgttttggccacgtcattgacattaccgaagttaatattcggatggcgtaaaaaatcggacggcgtttgattttctttaaatatttcattttgattcaccgggagggaaattcactacctcgttgtcccatgttttgcccacaaaaagtactgcttgctgtctgtttcctgttactgacttccaatgaacgttccgcagatgaacaggaatggcatttcccgcatgggaaaagagtttggccaaatttgcctccaccgcggccaaccgac

SEQ ID NO: 41035 - DNA, 1223 bp, Heterodera glycines
  unsure (1)..(1223): unsure at all n locations
aactgatcggaagaaaaccctgacggaggaacaaattgacaagtaaaatactaaacaaataaaacaaatacaattttttctcagggtttgcgcggctaccgggtccgttgagacgacgcgcacgagggactaccgagaggttaaaactaaaactagtcgcatattactgcttttctgctctgaaaatcttttattcggttgtcaggaggcagaggatgggctgggtggacgtgttcaagaagcggcggcgccggaagacgcacaaattttcaaaaaattggagaaggaatggtggaggaagcggcaaataggatgatgaagcggcaaaaacagacgacacagacaacacccaccggcgccgctgccgcgtcgagaccaaccaaccaatttgcgtgccgtgtgttcatcatcataatcataatcaacatctcagagaccgtcctacccatcatttccccctccccccccccaaccaccgcgcactgttagaacaatgccggcggcatcagcacccgcaaaagcgccaccgccgccatcagtcgtccgtcccatcatcattaggcggattatgatggcccgccgctggcggtgtcaatgtccatcgacggctctgtgcttgtctctcaataataataattaattgttatagtctgtgttttttgcgagactcgagaattttgagaacacaaaacattgcggggcgaggggcggcgggagaatagggcattgtcgggtgacgatgatgacacactaatgatgatgatgatgattgacccacttccaataacatctcaaaaaatgtgacgacgacaacgaccttttatcgggtgcgggagagcacacgaacaacacagaagaagccagcaaaccgcgagagagaagacaaaaaaatcaatccgcaaccacttgttgaaatgaatgagtaagcgcggccgcgagggaagcggcgccacccaccgaaattcattaggcaatgctaatgactgcacttaaacaccaaccaccaaaattcattaggcaatgctaatgatgcatggcacttagacaatgtacctgctcgccctgtaaattaatctgctgcgccaagatgacaaacactataattggttgngtttaaagagcactctatcaatttgcgcattactaataggaaaatatttatttaacacagaccgtgacgaaatttttgagcaaagatttttgngacgggtttgtaaaagtgt

SEQ ID NO: 41036 - DNA, 755 bp, Heterodera glycines
tttccattttttctttctccgtcattctttcgcccattccaaattgtttcttccatttttcaattgttccatgacttactccaattttcttcacaatttctgcataattttggtgccattcttttgtcgaatattttcttcctttttgcttatattcatttttcattgccataaatttttgcacaatttcaattttttgttcatccgtttttgatttatatgattttatttcttgaagatttaattctttgatccatttataaattttggttcgatttgttcccaattttttcaaaattttatctttaattttattccattcttttgttgaatattttctctctttttgtttgattttttctttaattttgttgaatttttgaacaatttctctttttttctgttcattttctttttcttcccatttttccccaaatatttcttcaaatgttttttgttccaattttttcttttccgctccaatttcaatttgaataattaaaaataatacaattaaaaagaaaaataggaataatttcattgttgacaatttttctttttctttttcttaaaaattaaaatttataatttattcgatatgaaaaaaagaaataaataataataaaaatatttctcaaaaatgaatttttctcttccttataaatttacattaatggtaaaatattgacaggatcactatatccattaaattgtaaagtgaattttttctctctactgaatgatcgaaattaata

SEQ ID NO: 41037 - DNA, 903 bp, Heterodera glycines
acagactatagggaagctattcacgaaggatgcggtctgtccatacatctgggcgcatcggttcgggcggactgcctcgaaaacaaacaaatcgatctattcaagcgagtgtccgtttggggtactcaaacaattatggggagcaaaaatccaacgcagaattaaagtacaggctatagggaagctattccggaaggattcggtctccccataaatctgggcgcatcggttcggggagactgccccgaaaacaaaaaaatcgattttttcaagtgtccgtttggggtactcaaacaattatggggagcaaaaatccaacgcagaattaaagtacaggctatagggaagctattcccgaaggattcggtctccccataaatctgggcgcatcggttcggggggactgccccgaaaacaaaaaaatcgattttttcaagtgtccgtttggggtactcaaacatttatggggagcaaaaatccaacgcagaattaaagtacagactatagggaagctattcccgaaggattcggtctccccataaatctgggcgcatcggttcggggggactgccccgaaaacaaaaaaatcgattttttcaagtgtccgtttggggtactcaaacatttatggggagcaaaaatccaacgcagaattaaagtacagactatagggaagctattcccgaaggattcggtctccccataaatctgggcgcatcggttcagggggactgccccgaaaacccaaaaaaaaattttttggataaaaattatttaaatgaactgactagataatatttaaaataggttatttctcttccttacagtatccctgcaaagtttggtgcgcttctgatcacttaagagaaaaaagttaagcctaaactttttggcctgtttaaa

SEQ ID NO: 41038 - DNA, 952 bp, Heterodera glycines
ttgggcctagttaagctgtcaaaaaaatttggagcgattgaaagagaatagaaagagccaggttcgatgaagttttggtaagccaaaaaaaaatccaaaccatttaaaaatctataaaaaatttaaaaatgagaattcatgcgagattttctggaaataagcttaatagggcctagttaagctgtaaaaaaaatttggagcgatttgaaagagaatagaaagaaccaggttcgatgaagttttggtaagccaaaaaaaatccaaacatttaaaaatctataaaaaatttaaaaatgagaattcatgcgagattttctggaaataagcttaatagggcctagttaagctgtaaaaaaaatttggggcgatttgaaagagaatagaaagaaccaggttcgatgaagttttggtaagccaaaaaaaatccaaacatttaaaaatctataaaaaatttaaaaatgagaattcatgcgagattttctggaaataagcttaatagggcctagttaagctgtaaaaaaaatttggagcgatttgaaagagaatagaaagaaccaggttcgatgaagttttggtaagccaaaaaaaatccaaacatttaaaaatctataaaaaatttaaaaatgagaattcatgcgagattttctggaaataagcttaattgggcctagttaagctgtaaaaaaaatttggggcgatttgaaagagaatagaaagaaccaggttcgatgaagttttgttaagccaaaaaaaaatccaaacatttaaaaatctataaaaaatttaaaaatgagaattcatgcgagattttctggaaataagcttaatagggcctagttaagctgtaaaaaaaatttggggcgatttgaaagagaatagaaagaaccaggttcgatgaagttttggtaagccaaaaaaaaatccaaatatttaaaaatctataaaaaattta

SEQ ID NO: 41039 - DNA, 1423 bp, Heterodera glycines
tacaaatctgaccaatttcaaaatctgtcatgacagataaagaaacaatgccttccaaattttcatgcattacagtaaaagccctcctgtaggtctcttgttgtcggttttgcataagcacaaatgcacttgggacagaagattgatcaattaaaacattcaagctgtaaagctgaagcaaatttgttggaacaaccttaattattcaaaagttaggattttctttttttacatttcgtcccaaaaactagagatgaaccaataaatagaaaacccgtgaagctgagcttaacctccaccgtttatgtaatttaaaaaatgttccgttccttaaatgttccatctccgctccaatgcctgtgccttcttaatcgctgaagaccgtgatcagttgcaaatataaaaaacacaggaagatttggttcattctgtcttgaatcatggagaagaaaacgcaagccatttttgtcgacaataaattcgcccttaatacaacaatttgaaaagaagaccttagggaaatatacatccaaaataatttcattcagcgtttcccggtctacatttcttctgccaacaacttctctttgtctttcaattgcacgctgagaggtcgacgatgatggcatttgcattaatgcttcatcatcaagcccagcacgggattgtccaattaaatttcgtggtctttggtcgaagtttgcccttgcatgttgctttatgtcttcttttcttcctcgcacctttaagtctatcatttcaatatttctaataagctcacagtatgtttcgcagaatttgggagatgattatgctgtgtaatcactctcaattccactgagccaaccgctgagtgtgctcggcccatgcacgtttttagcgggcaaacccaaacttgggtttgctccactgctacacttgttgttttacttcactgaaaacattgcaggtatccgacaactctgctcttgcaacacttttggatgtgggcacaatccgaatcgaaggaacacaaaccgagacaatcaactgaagcaaattcggctttttacttctcaccttaccgttgtatttcttattgtgtaatttccgttaaaacctttggcactttcatccgttcctccgccgttcgcttctgccgggcacagtccctgcttttcctttggcttttccttctccctttgcttctccctctgctgcttcgcttcgccttcgaatttcgtttggtcattgaaaatttcgccttcggcgttcgtctactgttctttgaacaactgggcgaagggaaaggctgaaagggaagaaaaggaacaatcgcacaattggaagtgatcgaccaaccacagcaaattccaattcaatcgaagggaaaatgcgatgaaatgaatttgcagtccaacattcgatcgggaatttggctatt

SEQ ID NO: 41040 - DNA, 912 bp, Heterodera glycines
aggggaagatcaaagattaagatcgacccatgtgtgctctagaggcaattgcgttgtcgccgatttcctcacaaaggggccgtggtggcagaccatccaaaaaaataggcggtcatgatggctcaggcaggagcaaatataatgattccatgagggagagctagttaatggatcataggtgtgaatctatcacagatgtggttgtttttccatctgtcattgataaaataatcttcaccccagtgcaaatcaattttgcaatcacgtgaaattttacctgtagaattaggaagtgggcagcaaatggcctttgaagccgtgatggtgaaacagaactttccacaaggtaaggtccaagattcattgcaacgtggtggaatagtctgagccagcatttcagttgacgacgatgttaaatttaagatgaacaaccccgaaaacgccctagaaattttttaaatgatttaaaaaataattttattttttatggtctgtaaagtgcataagtaccttttttttagataagtattggtacataaatatttgattgtttttcaaacacacacatatatatgcttcacaggcttttgccttttttgtcgaactcacttgttcaaaggcaaatccgtttccgttatgcaattaaaaattatttttcagaaacattgtctcaaaatttgcaagaatggtatcgtcagccgaatcgacagttcaccagcaccagtctgaatccaataatgacgtgtcgacatttgacccaaaatcagtggaaatattgccgcactgctacccgcaagcgccaaggggggacgtcagagacaattaccacggcacaatggtttgctggtagctgagagattactcaaaacctattttgatttccttaggtttatgacgcgtacagagcgctgg

SEQ ID NO: 41041 - DNA, 1042 bp, Heterodera glycines
aaaaaatttgcagtcaaaaaattattcgaatttctccattttgtttccataatttccgaaagttattcggtatcataatgccaaaacaaaacgaaatcgttttaaaatattcctttctggacttgacttggtttcttgatatcgaagctgttttctacgctatttctaaaacggttataccaaaccccagatttttgaatccggttttcagaaaaaatgccttgtggtgaaaacaatatttcacatttcactccataactttgtgagttcggcacggatcgagaccgggataagaccattggaaagagcagctcgagctctacaagaaggtatggaaagaaaaaatagttatttctgggactttttcagaaatcagaattaattctccaatgtggcccaaattttaggcccccagccacagccccttgcttctcccagttttaagtcttggatttgtcaaataaattcaagacttcaaaataataatcaaaaattctcttaaaatttttttgaacccaattcaaaaaaggaaaaaaatttgcagtcaaaaaattattcgaatttctccaattttgtttccataatttccgaaagttattcggtatcataatgccaaaacaaaacgaaatcgttttaaaatattcctttctggacttgacttggtttcttgatatcgaagctgttttctacgctatttctaaaacggttataccaaaccccagatttttgaatccggttttcagaaaaaatgccttgtggtgaaaacaatatttcacatttcactccataactttgtgagttcggcacggatcgagaccgggataagaccattggaaagagcagctcgagctctacaagaaggtatggaaagaaaaaatagttatttctgggactttttcagaaatcagaattaattctccatgtggcccaaattttaggcccccagccacagccccttgcttctcccaggtttaagtcttggatttgtcaataaatttcagacttcaattaataatcaaaaattctcttaaaatttttttga

SEQ ID NO: 41042 - DNA, 1143 bp, Heterodera glycines
  unsure (1)..(1143): unsure at all n locations
tttaatattcacagtgtattccaatataaaaattctatatnaattatgtatcaattaaaattaataaaaacattatttattgtattatntagtttataaattatattgtattnacataaataaatattgtcattaattgtgtcattgtaaaatcagactatttttttatttaatatttaaaagtgtttaatataaaattctaatgaacatacatatttacattttcaattgatttttggttacattgaatttttatttatgtatactttcgcccatttaatattttaattgcttattttttttaatatattatttcttctgtcctggtaatggttatgttagagacaataggtaaatttaactataaataaattaattttattatgtgtaagtctcattacgatgaatccttattttattgatcgcacccaaatatcaaaacggtcagtgaatacttgacagtgtctttattgttgtttttccaaattatatatataaatagaaaaacttttaattcatatttcaggcatttataatttctcttcgttataaaaaaataaaattttacatttatttagcattttacataaataattagactgataaaattcgtttatagattaattatggaatatttaaagattgatttacaggaaaattatatctaattgtactttatttatatatatataatctcattattccatgttagctattgactcagtttgctgaatcgttcaatgttttttttaataaaattttatatagtgcaaacatcttcttgtcaagatggtgttaatccattgtgattcattctaacggcgaacttgttatgcatattcacagaggctcagtgaactggttcttatactatgaattaatttacattttttcaaaatatattttaattcaaattttgaataatcgaattaattcttttttattactctggttgagaattatatttaaaagattttaaaaacgaaaaaaaaatgaaaaatcacttatataaattcctggcgcagcggttttatgtacacaaataaattaactttcaacattaatcaaaaataatgacaattttgaattttaatattcacgagtgtatttcaantataaaaattctnnatattaanttatgta

SEQ ID NO: 41043 - DNA, 950 bp, Heterodera glycines
tgcccacatttttggaatcaatggaagttttaagtctctccacaggagaaataaaatttgggctaataacaatagacacatattattcctgatataggtactcgaaaaactgactttcgtatttttttttcttaatgtcagtcaatatttgcccttttcttgcacttacttatacataaatttttctgagaccttaagctttcgtttgataccaaaaaatgtatagacattgaccaaataagcaaaaaagttatggaggatggtcacgcataaacactggaatagagccaaaatggtttaccactttgcctatgttttcgccactatttttacacacttttcacatttgtaattttttggtaccccaatttaagcgcaattttttttttgttttgtttttttttacccaataaacgcacaaccacacgcatcgtaatgtcatcaaacttggacaaaaacctggagaacattcgccgaattgaccaattcgcccgcaaagtgatcgaacattgcacccatgcggcactgttcaatttcaggtttacatttacatttttgtaaaaattttctcccataatttttcgaattgctcgccactttactaaatgagtgaaaatcgcacaatgcataaattttcaatatcggatgggtttctaatccccgagaatttccatgaaaatttcaacttggctccacatatggcaacctttcagggattcagtcaaaattttgcttcaaataaattggcaatgaatgggtgtcaatttttgggtcaccaatttcgcggcgttttcacaaaatttctttttctcgggggttttttttgggttacagattttgttttcttgttttgtttcattatcgtcttacagtcagaggaaaattttttgcgatttgcattttcgtgactgattgtgtgataaatttaccggaaaatgccaccccaaaaa

SEQ ID NO: 41044 - DNA, 938 bp, Heterodera glycines
ttagaaaccaaaaaattgatataatttatttagatcttcaaaaagcctttgatcaagtcccgcatgatcttttaatatacaaactcaaaaaaaccggaataacggataacttattaaattggcttcgggattttcttcttggaagaacctttaaagtaagaataatcaaaaattttcaaacgaatttcctgtcaaatcaggagtcccacaagggtcagttctaggacctattttatttttaattttcattaatgatttgcctgaagaaattccaaaagaaatctcaattaaactttttgcagatgatacaaaaatttatcattgctattcaaatgaatcccaacgtagttttagaaacagctctaatttcagtctttaattgggctgaaacatggggcttaaatttttcagtaaaaaaatcttccgtcttatatctaggtaaaaataacaaaaaaataccgtacacaattaaaaattcaactttccctgaatcaaaaattattcgtgatctaggtattttaattgacaacaaactcaaattcaacggacatgtttcaacaattctccaaaaagcttatctcaaaagcagaattctttttaaaaaaattaaaaccaagtcaaccaagacttggattacagtttataaaagttatattcgaccccttttagaatacgcaaccgaaatttggaatcctcgaaccaaaaaagaaataaaccgcctggaaaaatttcagaaaaactttacaaaaaatgttttcagaaaatgctgtctcccctatatctcatacagcgaaaggctaaaatttctaaaactttccaagcttgaaaccaggagaaaatatcttgatatcataacagcctttcaaattatcaaaaatactactcaccttaacccaaaaaacctttataatttttcaaataggaaaagatcacctttt

SEQ ID NO: 41045 - DNA, 116 bp, Heterodera glycines
ccggctacatcggtggcagcgccgccaacgcccattatgagcgggtcagcagcggccagaccggtcacgccgaagcggtgaagatcgactacgacccgcgccaggtcagctacggg

SEQ ID NO: 41046 - DNA, 616 bp, Heterodera glycines
ttaggtctatcgtatgatagcaagattgtacaatttagttgcgtctgagaaaagttatgagttgatttagtcaaaagtttagcaaattttgcattttttgtccatcggctaaccaggtttaacagactattttttagaattaaaggaatttcacttttttttgactttctaatctaggttttcgtcacgaatctgtgagtgctctgattaaattcattcaaatttctttattgcttttgcttctcattctcgaaactctcaaaaacgccgcgggggaaaggcgtgggatgggtgccacactgacaatgagaatgagaatgatgggtcccaattggaacatattttcattttatttattattattgaatatcatttgactttgtgttgttttatattattcccttatttcccccccccccccccccctccgcccatttccctcgaggggttttcccatggattgaatggaataatggtctttaattcaggaagaaaagttgatgggggaaagaggcaaaagtgggggacagggggaatgatgggggacacaaatgttcgttcttccacaactttacaccacaaaaccgtcatccaattgccccgggggggggggggg

SEQ ID NO: 41047 - DNA, 833 bp, Heterodera glycines
ttgtacgcatcacgcttttgtgtgtccagtgtctcacgtttaatgcgttcaccttgggaatcattttaattttattttcctatttttaattattaaaattaccaaaatcgactgttacgtaggtgaaaagttcctttgcattgccaaaatgaatgacgaattggcgttggacaccataaatttcatagcttaatttgagcacatgtcacttgagacttggaattttgaaaaatttgaatccgagttgagccctaaaaactcataccgaccggattttctagtctttcttcatattaatccaatttgtatcgattcacatagaatggagcaagtaaaacctagtggattcaacgcaccaggattgtgtttcaggtcttaaatccagattttctggatgctatcaatcaggttaaaagccttatgtacgagagtcgcggtctcgagtcttttttaaagtctcgagattagtgagtggtatttccaaaaataattaatgtactgtatgcatacagtattttcttcacctcgcgagaaaggacgacaagccgccaagcttgatgatttgttgcccatttatttgttcggtagaaacggaaaagccgcgccaatgatggcgttgctcaagtgatctgttgaccaacatgttcttgcaatctttgtccaaattctgttcagttgagtgatttaatatttccaatgtttaaatttcaaccaaaattagcacacacaaacaaaaacaaatatatatttttaatctttttattaattttcgcgcaaattcggtttcgtttttattttttggctttcgaagtaaagcttataatttttcaatc

SEQ ID NO: 41048 - DNA, 1153 bp, Heterodera glycines
ttctttggcgatgatgatttgaatttgcctccagggccacccaatcttcgtccacagccaaatgcccctccgtcacttaacagcgaccaacagaaggtctttgatgctgttttgttggcaatacagtcgaaccctagggatccgactgtcccccgccgtttcttcatatacggcgatggaggtacaggaaagacattcctgtttggccaaattattaggcgcttgcgaaaggccccatacacctacaaagtgcttgccacggcatccactgggtgtgcagccattttgctgccatatgggaaaacagcccattccacgtttcgtctgggtagagaagtgtcattagacaagctcccaagcattccgctggagagcttctttgcccgtcggattcgtgaggcccaactcatcatcattgatgagatcaccatgcttcacaacacggtgattgaggtcatcgaccgagtgtgcaaagagatggcaattcgccagcacaaggatctcctcttcggagggaaaacagtcattttcagcggtgacttcaaacagtcgctgccggtcgtgcctcatgaaggcttaaccgctcaggtgacagcctgttttcaaacatctccattgtttggtcaattcaccacgatgaaattgaccatcaaccagagattgggcaaaggtcagcaagcgtacttgcaaatgtgccgccaaatcgggctcggagaaaccggagagcacttctggattcctccacagttcatcgttaagagcaaggaagagctgatagattatgtctatcctaacttccaacaactccttggcaatgacaaagagctgctcaatcgtttgattctcgctccgcacattgacacgtgtgatgaagtcaacgagatcatgatggcgaatgtgccaggtcaagtgcgggaatacttgtccacggataagccccttgacgaccgtccactggacatcgatgagatcgagtccgaagtggctgcgttgaaccggcgcacagactcgggcatgcccccgcacagtctccggcttaaagtcagatgcgtcgtcgtccttcttatcaataaaagtgataaggaaggactgatcaatggcacacgcatagttcaggaagaacttggcgatgatcgcctcattggtcgtgtta

SEQ ID NO: 41049 - DNA, 1339 bp, Heterodera glycines
  unsure (1)..(1339): unsure at all n locations
aagattttttataagcatcaaattgcgtannggaagaattcttcacattttgnnccaagaaaatatttttatctcaatatttgattatatgattaggaagctcataaaatgctacaataaacgccaaaatattagctcgtttatntttcattcaagaaaaagtacaacaatttgtctcggtttcgcatttgtccttaaacataaccatgagtaccatagaattccaacgctcaaaatttttggaacttggaaatccagacccaaaaattttcagttggtatttcggttatccaaaaattgagttccgaccccaaaaaggtcagaagtcacatttcattatttctcaatgcttacaagcttttcttcaatccaatctgccatatgatgagaaatttcccccagtagcgtttcgattgctttcatttctttttcgatctctgtcatgttgccattgttggttatattggaacattgtgtggcaatgagtgcctaaagatttatcaataaataattaataaggtgaatttaagtgtgttatcattaaaacttagatagaatagctgtttcttacagagctgtcacatatgttcgaatttcttttaccgttttcaaaaggtcttgtcgtgcaaaatcggcaaaacgtaaaagttcagcacggagccattcatttccctcaattgcggttttaagccaacaccttaattttcgaccaaaaaatttgatacaataaaggaatgtttatgatgacctcaattattttgtttttccaatttcgtgaatcccaagaattatgtgcaataaaaattattaaggcattaaattatggaaaaccatatttcccccgcggattatgagggttgtttttaaaaaaattattttgagcttcagggatggattctgcccatatttgaatttttattatggtattttttacgagtctgcatccaataatgaataccgcaacataatatacaatctatacagttggcataatcgaagtgttaaatttgtaatttatgtccgtacccctgttcaggcccaatgcgcaatttatgaagctctttttcaatacgagtagtgcttaaattgtctccggcaactgtaaaggtaaagcataatatattttcaaatgcaaataaattttgcttcgggactcggatccgccaaattcccttttcaaaggaccgatcacttattcatgagaaagttcttcaaaaattttttgacaaatggaagtgtccggcggtgccgataggagctgtctgggaatggggaaaaatgccgatataaaaggggcatctttgaaataaaggacggccaaatttcaaaaagattaaaa

SEQ ID NO: 41050 - DNA, 1139 bp, Heterodera glycines
  unsure (1)..(1139): unsure at all n locations
caaacgcgccgagaaaaaaattccagaacaattcgtattggcgtgattaatctgagaatgcggtggaaattccttgcactgttgagcagaaaaagagatagccatttttccaatcttttcacatacaaacgcgccgagaaaaaaattccagaacaattcgtataggcgtgattaatctgagaatgcggttggaattccttgcactgttaagcagaaaaaaagatagccatttttccaatcttttcacacacaaacgcgccgagaaaaaaattccagaacaattcgtattggcgtgattaatctgagaatgcggttggaattccttgcactgttgagcagaaaaagagatagccatttttccaatcttttcacatacaaacgcgccgagaaaaaaattccagaacaattcgtataggcgtgattaatctgagaatgcggttggaattccttgcactgttgagcagaaaaagagatagccatttttccaatcttttcacatacaaacgcgccgagaaaaaaattccagaacaattcgtataggcgtgattaatctgagaatgcggttggaattccttgcactgttgagcagaaaaagagatagccatttttccaatcttttcacatacaaacgcgccgagaaaaaaattccagaacaattcgtataggcgtgattaatctgagaatgcggttggaattccttgcactgttgagcagaaaaagagatagccatttttccaatcttttcacatacaaacgcgccgagaaaaaaattccagaacaattcgtataggcgtgattaatctgagaatgcggttggaattccttgcactgttgagcagaaaaagagatatccatttttccaatcttttcacatacaaacgcgccgagaaaaaaattccagaacaattcgtataggcgtgattaatctgagaatgcggttggaattccttgcactgttaagcagaaaaagagatagccatttttccaatcttttcacacacaaacgcgccgagaaaaaaattccagaacaattcgtattggcgtgattaatctgagaatgcggntggaattccttgcactgttgagcagaaaaagagatagccatttttttccatcttttcacatacaaacgcgccgag

SEQ ID NO: 41051 - DNA, 963 bp, Heterodera glycines
cgacaattaattctttatttaaaatgttttttagagacctactgagaaacaatacaaaataatttttaaaaaaattttttcaagactagcttataaatcatgaatattaaaaaatatataaattacctgaaagaaatattattagctagtgtcaaattgtctaataaggttacattttaaaaatcagctaattaccaaattgattggaataaaatggtaataaaaatgataatagttagattatgtagataaaatttatttcaagtcttaaaatttggttttcttttatctgacaataattatttcttataattttaattatttaaaattttcttttttaaaaatgacaatgtaaatgaacacataaaatagctttattataacataaaaaatgaattcaaaacaatgaagatgccgaaaattattgcatatcggtttttgaataggagagaagaattcatgaaaactttgaaagaaaataaattaaaattttttctaaatttttaaattactttaaaaatatgatagtttaaattaaaattaaacttaatgaaaatgagacccaaaattaacttaaataattacaatatctacctatgataaaaaaagtaaatagaaaaaaatgattttttttagaaaaaatttattatttatatcaatgaattaatctttaaagaagaaattggacccatatgacaagattaaatttgctctaaccacaaatgggggaccaaatgttcaccaattaaatgaattttttaatattaatgaaatatgtaatagaagaaaattttttaattgactcaggaaaaaggcataaaaataaaacaataatgtttgtgaaaataagataaacatcaaatttaaataaagaactaacataattaaaaatactcatatgtttaattttaataaatcaaaaaaataataaaatataagattaataaattagaattgagaggg

SEQ ID NO: 41052 - DNA, 861 bp, Heterodera glycines
atttttccttaatttgatatatagatggaattttgacttctattgagacgatttctatttcttcaagtttttcttttataaaacattttttgttttgtttaaaggactaacgttattaccatttgtttagcaattaaaaatcaaaattgttcatggtaatttatggtaaatgcatttttaaaagcaaaattgaatatattaattctttacatttcaaataattacagaaaaaggagaaaaacaaaaaaacatttcgacaaaatgcaaaacaatttaaagaagttataaaaaaaaattatcatgagataaaaataattaattattgaattttaatttaaacacaccaaatcaataaataagaaaaaatttaatttaaaaataataaacacacaaataagaaatataaccatataatttaatcaaaaagctaaaaagcgcagaaaacactgcttattttatcagaagcgggaacaagagtttaattaaataaaatagtgacatattccaaataaaaaaatttaaaaaaaacaatatttaaagaagaaaaaataaatcagtttagaaaatatttttccaaaatttgtatttttgattaattaaatcgctttttaattgtgaggactaaataataaaagtgatttgaaataaagtgattttatattccaaaattgcaataaaaataaaaatttttgttttattttcttccaattatatttaaagattaactaaaaaattttactttttattttacatatgaattctcttcgaaggttaaatgccaaaaatataattcaaataaattcgagttgttattatttaaattaacattatacaatatttatttttgctttcgttaatgat

SEQ ID NO: 41053 - DNA, 1058 bp, Heterodera glycines
  unsure (1)..(1058): unsure at all n locations
gatcacaaatcggacattaattttcaccaatccctcccccctaactcgaaatcgaaaaaataaaaataatcaaatatcgccaaattacgttttttgttcaattagattagagagattcgtaattggttgaaatatttgtcaagttcttgatcacgaaaaaaacttacgagaacaattttatactttgcaagtagcgcctttattttttattagtttcttattgttaataattcaaaaaaatttttttttttttttgcattttacattttttaaatgattaatttgtaaacattccaaatttgtgatagactgactaatcatggctttgcattacacatgtgttgaagcatgttattcgcatgaatttgttgcgcaatataataatatttgtgtgccaaatttggctccgtgtcgcgccgcacatttttctcgcattcatttttattattttttcgtatttttcccatgcaattaattgttttatgaataatatgctttttcttgggattttttaaagatctaagtttggcaaatttagttcatatacttactgcctgcgccgagaatttatttattcatttcctcaaccaccagagtcttgccatttctattcatttttagttttggtttttatttttgaaattaatttgaatactttttgttttaataaaatatgaaatgaaaaactatagtaaatttgtccctttaggaaattaaaattctagcgaatttttttccctcgcaatagaaaaatgaaattaaaaatagaaaaaaaaaagaattttttcatttgtttggcgaagacattttgatttcctcaaaagtgcatttttaatgacatttatctttttaagaaaccctttaaattccttttttttctcttttaagtggatttcttggcatttttaaatgggtcaaaaacatggttgtggcataatcccctttttggcattttttanatattttatttttaagcttaaccgcccaacatcttggttttcccgaagtcgaccatttttttgtggttttnctgcataaaatattttttcgtttttaca

SEQ ID NO: 41054 - DNA, 858 bp, Heterodera glycines
aaaataaacaaaaaagcgaaaatttcgcttttcaggttgatttttctccaagatgagtaaattttaaggtttatcgtgttttttcttgtaaaatgatttttaatatagtatttaggcatttttgagggttttaccttacattgagcgaatttgaagaaattttgaaaatttacacctcactttggaaaaatttatgtccatatttttgccattttatatgtccatatttcacgatttttggtcaatgttttaatgggcatatttcgcgattttatatccatataattcaacaccctagtaattaattgttgtttctctgcttggcaattacctgcattcttttgaaatgtttaatttgaattgctttaaatgctttaaaataaaattatgcgttttttccattttctgatcactttgagtgattacaaaacacccatctgaaatcaaaatttaccaaacaatgacttatgtgtaagcacggttctgttgaaatttgttttttcgttagcaaaaacaacttttgtacaacccaatttgatgacaaatcacaagcattgtgaacgcgaaaagaattcattcgccattgcttttgtgcttttgttgttttacagttgcatcaccctgatcaaccaaccatttggccatgcttttgttgtctctttttgcctctgattgattgcttgctaatacttttcaccctcgcccccccccctccctccatttttttggatctctctctctgtgtcacattaaattaaattatataaatattgtgaacactgtgactgatgtattattacttgatgctgttcgacatggaaaaaaacccccctttctgatcgaattttgataatattg

SEQ ID NO: 41055 - DNA, 1294 bp, Heterodera glycines
aaaatttttgagacttggaaatccagacccgaaagttttcagttggtatttcggttatccaaaaatggagttccgaccccaaaaaggtcagaagtcacatttcattatttcttaatgcctacaagctcttcttcaatccagtctgtcatatgatgagaaatttcccccagtagcgtttcgattactttcatttctttttcgatctctgtcatgttcccattgttggttatatcggagcaatagtgtggcaatgagtgcctataagatatctcaataaataatgaataaggggaatttcagtgtgttatcattaaaacttagattgaatagctgtttcttacagagctcatcgcatatgttcgaatttctcctaccgttctccataggtctggtgggacaaaaaaaataatgcaaaaagtgtaattacgagtacaagcataatttaagcatttgaacatttgataaaaggaaaagcaaaaagagatgaaatcactaaagaagaaagaacggagagaggcgaacggaacggcaaattaatggggggggagggggaattagtggcaaaacaaagactaattgactgataaatgccatttggggctgaagaagaaagtaagaaaaagggaaaataagagaattattgaaaagggtttaaagaatttttattttaaactcatttcatttgcgttttgaagaatggatgttggaatacgaagtgagtaaaaatttatgtgggaattcggggggggggggggggcaaagatacaaaagacgaaggaaaggcggaacaaatgaaaagcaacaaaagaatggcaaaaaaggcacttttgaaatgccaaaaaagccattcaaatgcaaaagtaggcaaattttcatacggataaagaacaaaaataaattattttttctgattttttcccttttccttcaaaattccgccacttttgtccaccttcttcggccattctctcatttccaataaattgccccaataaaaggaaaatgaggcttatggacagctgactgactgaatggtaaattggcacgggaatggcaaaggcaaaaggcaaaagaggaggaaccaatggccactcaatttccattcagagggaatgagtggctaaaattatgtgttcaattgggggggggcaattggaatttaaaaaagaaaggaaaggcaaaaataagaaaaaatatcggcaaagaaagacgaaaggcaaatggcacaacagagagaggaaaagtgagcagagcaaagggaaaggcgtgaataattaagtaatgagaaagctta

SEQ ID NO: 41056 - DNA, 867 bp, Heterodera glycines
  unsure (1)..(867): unsure at all n locations
gttattggacagttttatgttgacatcccccacttgatggttttttatataacgaccattttgatcggtttttatataacgactccagcacctttattagccattaaatttatcggtaaattctgtaaataaaaagtagcgaaaaagtttttctcatttttgtacaaattaataaaatttttatgaaaaagcattagaaaaatgataaattcccgcttacaggcgctcgatgtgccaccgtgcaaaattacattggctttatccgtttggcgaaatttgaaaaagcacaaaattcattaaaaaatttatgttttataataagactggaaaccaaatcactaaaaaaccaagagaaattaaacatgattattagattattaatattaaattaaacaattttaattgtcaaatttaattggctaattggggacagactccttgcaaatcttacacctaccccactcgtctttcttctcaatcgattaaagagtacaaaacgtgaaaaaagcacattacaaatttatttaatttagacataatttgtaaaacttttgttaattaataactaataagtctatataatatttaaataatttaagcggtaaaatacggtagcttaaagtgttgacaaaatgcgaaatgagcaaagcaaccattaactaacgaaatatgtgataaatttaatatcaagtgaaaatgcaaatttgtttcgataattttaaaagaccagcttaaaaattgtgttttccgctaattaaactaatgatgaaaaataaagattttaaattaaaacaaagtttataaaaatttatatatttttttcatgtttcaaaataaaataaagatataanatggaaaaaccttaac

SEQ ID NO: 41057 - DNA, 806 bp, Heterodera glycines
gcataaatgccataccaaaattgagttaagatctcttcgaatgggtctgcaattctactcgctcgctgttgtttaaaaaaaattcaaactttggcctcaaaacggaaaagtaccaaatttattatgaatctgattgtgagctcagattttgtagtcattgattctgtcaatgatttttggtactaattcagtttgggtcccggttttcggtcaaatttttcaaaagcgtaaccagacagtcagacagtgcactatttccttctttatttttctcacctcttcccttttcccacacacaatgctgctgcacagcgagcacacggctgtttactgtctacccttccacggggttggggtcaattccctaccgccaattccctaccagccaattccctaccggccgattccctactaaggcatttgggccatctccgtaccaaaaaatttttcgaaaattttcggaaaaatttcaaaaacagaaaggggattttcaacattttgatgtttctcgtgaattataagacaataaattttttgtttaatgttgcagagaagaaaatgaaaatacttctaacaaaaaaagaaccgtacaaatctttaaaacaatgaccattcatactttttcacaaatcgaagtaaaaattttaaaatagtgttttgtctattttagcagctttatccagtctccggattcttaaattggatcgtgaattttttttcgaatttacaattgatttcaaatcgctttgtaggaaggacttcaggggcccgaaaattaggaagtaaggccggggtttaattattca

SEQ ID NO: 41058 - DNA, 907 bp, Heterodera glycines
agtagatagactagaaaaaattgaaattttgaaatcatgttctcactcccttctctcagaggtattattttgtaaagtcttttttctccccaataaacttgtcaaaccccatttttcgcaccgtgaatgttatttttatcgaattctgaaccgttttgagtagattagactagaaaaaattgaaaattttgaaatcatgtttcccactcccttctcccaggggtattattttgtaaagtctttttttccccaataaacttttcaaaccccatttttcgcaccgtgaatgttatttttatcgaattctgaaccgttttgagtaaattagactagaaaaaattgaaaattttgaaatcatgtttcccactcccttctcccaggggtattattttgtaaagtttttttttcaaaataaacttttcaaaccccatttttcgcaccgtgaatgttatttttattgaattctgaaccggtttgagtagattagactagaaaaaattgaaaattttgaaatcatgtttcccactcccttctcccaggggtattattttgtaaagtctttttttccccaataaacttgtcaaaccccatttttcgcaccgtgaatgttatttttatcgaattctgaaccgttttgagtagattagactagaaaaaattgaaaattttgaaatcatgtttcccactcccttctcccaggggtattattttgtaaagtcttttttccccaataaacttttcaaaccccatttttcgcaccgtgaatgttatttttattgaattctgaaccgttttgagtagattagactataaaaaattgaaaatttaggaatcatgtttcccactcccttctcccaggggtattataaaggaagtcttttttcccccaataaacttgtcaaacccc

SEQ ID NO: 41059 - DNA, 805 bp, Heterodera glycines
ccggaggaccggtcgttgaatttgtacgtgaacctccccccgaggtgctgacgatgcaccgacacccggtggcccacctttaaacggaatgcggggaaaagtgagggagggacaaagggacaaaaacgccgtggggcaagggacagccacttcaatgggggcattaattaattaataatggggaaatgaaacggaaacccaaaagtggaaaatggagaccaaagtattaatagccgtcacttttcaatttaattttgtctctgttgcctcggctctgccaatgctttcgtctcttaaggttggctacacgcgcggcttccacgtctggcagctgaattggccggtcaaccaacgcggcacccacgcggtcgtcggcgtggccaccaaagacgcgccgctgcacgccccgggctatgtgtcactgattggggcggacgcggagggcttcggctggaacattggtgggcaaattgcgcaatttgtgccacaaaaacgctgaaaatgccaattccgtcgccagtggagaacaaatgctaccacgacgcacagaacacaaagccatggtccttcccttatgagcagccattcgtcgcgccggagaagcttttctgcgtgttggacatggacgagggccaattggccttcgccaccgactccaaatatttgggcgtcgccttccgcgggctcaaaggcaaaaaactgtacccggtcgtcagtgcggtgtgaagacactgcgaaatcactctcagatatttggggcggattggaccgtaagtccacgaggattagaattattggcaaaaaa

SEQ ID NO: 41060 - DNA, 727 bp, Heterodera glycines
ttgatgtttcgcagctacctcagcggcaacaggtccgtggtagtgggaaaaggacaacaaattcagtgtagcatatcgtcaaagagagtgctcttctgcggatcaacaacaacgacaacggtgatgcctattgtcttttttacgctttggaggcaagcagaaagtaccacagcaaagagatgagccgaagaaatttctgttattatattaaccatcagaacggacgacaactggaagatgcactccgtctaatgagcgacgcgaacattcgcaagagatagacccgtggctcaagtgggcctggtgatggagcaaatgtcgtgcggagaaagtgacccacgggggacgatgaagcatcggcagagaggacatcttgaaccaaagtgaggacagaacatcgcctaaagaggcggaatgccgttggcgttggcaaaggattggtcgtcgctaacagatgacatttcatttccagttagtggttgaacaatcacaagcccaaccatcttctcatcaccataccccaattgatttatccgatctggtaaattattacccgccgccccacccatattcgtgcttctactctccgccggcccactttatattgtcctttgagaatgaatagataatggcggatgagaaaaatcaaaacacccaacatttgggagatgggaggggggatgaatgggacgggggggggggagtgaaaaacattcgaaagagatgg

SEQ ID NO: 41061 - DNA, 1270 bp, Heterodera glycines
tgagaagaacacctccttatatagagagaaaaccttggaatttgggatatggatacctacctacggtactacctgacttttgccctcccttgttgcgtagtactataaatattgtgcccccttttcctcccttttcattcattcttttttcttttatgagtgttttactctgttttttgtgaatttcataaacttcactgtttcaaaaagacatatttcttatcttaaccagtaaatacccaacccgaattccaaaaattatcgacatcgacctgaaagtttatcagagtttccctgactggcctatactaccaaatttgaacctaaatttatcaaatttttttttacaaaaactgcaatttccctatttttaaatttataattcatttcattatgtattgtttttatgttttttccttttttagaacagaactatttgcgtttatcatcatcatcccttcattgtgcaataacaacaacacttcaaaagcgacctcatcgccgtttctcatcgttcattcgtccgtccgtccttcacatcaattcgctcgccgttttcgcaatggcacgtcgacgcatccaaaaggtggcaaatgacaactctctgatcaaccaatgctttaaatgttttgatccatttgcaggaaatggcggagctgcatcaggaactggtcacgacgggttacaccgcggcaccgatggatgacggcagagacttgtaccattggaaggcctccatcaaaggaccgcccgagtcgccgtacgaaggaggcaccttccatttggacatcgttttccgtcgcgactacccattcactccgccaaatgtgaaattcgacacgatcatttaccatccgaacgttggagaaaggggcgacatttgtttggacattctgaagcagatgtgggcgccgtcgatgaccatttctaaaggagaaggagaccacaaaacggcgaccagatatcttacttagagcgaatgtttccacacttcaaaacagacatgtcaaaactgtagtttttgtatctgcgatattttgtacgtctgaagatgtctgagtgagtttatacaacggtggatacatatatatctactgctatattacaatatacgaatcggaatactcttacgtcttatgatagaaataggaatatctgatatatcatatgtatatttttattcatatcatcgtcctttcatcgcattggatatgttttgatggcgccgtgattgttccattcatctctgtgcttattgatcccatgatga

SEQ ID NO: 41062 - DNA, 741 bp, Heterodera glycines
  unsure (1)..(741): unsure at all n locations
ctaatgtgatataacaggttaattcttttcctttcatctactagggaaagnttggggngcttntgataagtttctgacaaaaagataagcctaaactttttggcctgtttaaaaaggaattaaaaatttttaaaaatttattcatctccctttttgatagaaaaagcatcagagtgcctaaactagcatgtaaataaaatttggtgcgtttcagagcattttctgaaaaaaatatttatgaattaattatgcaaaaataaataaaaatttctaaaaatttgatcgtccataaataatttgtaattgatcaggggctcaccaaattatgcaggaatacgtatcggaacactacaaatgcttactaattttcttagattttttaaacccggtgaaaattttttgcagacaccaccacttttgcacttaaaaaaatttcaaaaaactttaaaaattcatagaaaatttaaattcataggtactactgctaaatcaacgcagagacgcctttccttgacctttttaggcccctgcaaaatctggtgcgcttctgatcactactcgaaaaatgagtgattgaattttcactaaaaagttaagcctaaactttttggcctgtttaaaaaggaattaaaaattttaaaaatttttattcatcgccgccttttgatagaaaaagcatcagagtgcctaaactaatatgtaaataaaaatttggtgcgtttcagacccctttctgaaaaa

SEQ ID NO: 41063 - DNA, 989 bp, Heterodera glycines
atttatcaatatattgtttgagtttgatttagtggttgttgtttctcagtttgtttgtttgttcattttttgtgttcttagcgtgaaataattatgctaaatgcttaggcttaatgtttaatctcttattagatttttgattctttgtctaatttttccgatttagcaaaattgaagtgcttaattaaaataaattgtcaacaggtttaaaaataatgttctgctctgccggttcggcaatatcttatcataatgcttagcatttcggaagaaaaagtaaattgcttttgtactcagaattatgtaaaagagtgctataattcgtttttgtggtttaaattgatttagatttttcttatgtaattgtatttgcaaaatttagataatgagctaagtgggatggcctaactttttgttgaatgccttgggattacgaaattcccaaatgcagatgttatacagtttagcgcagaaaatggactcatacttattggaaacttgtaagttcttaattctaagctttaatttgaaggttttaatttgactatattgtttgcaaggtttggaattgtttgagaaaaagtgttgttcgagttagaaaattgcattcgtgtggtatgttgtttgtgttagataatagtgtggtgtgcggttttgtgttagtaaaccacattaatgtggtgtgtcgtttgtgttagacaatagtgaggtgtgcgatttatgtcagtcaaccacattagtgtggtgtgtggttttttagacaagaatgtggtgtgttcatgttttgataaaacattagtgttcgttctgtgagtttagtgtgacacaataatgtgcgtcatgttcgcgaagcggccgagtcgtaccttccaagaaaatgccaagaaacaaaagatgaagaaatgctatgaatgttgtaccataagaaaatgccaaaaaacaagaaaaaagaagaatgctaaaaatgttgtaccataagaaaatgccaa

SEQ ID NO: 41064 - DNA, 666 bp, Heterodera glycines
tcttcttattgtacttttttgattttctattatctgttatttcttatcactggcaccaaatgtgttaaattattcttcatgtactgtcctaacacttataatcttatctcaaatttagaatttccaaaaaaagcttttggtttatttttaaccaaattttcttgtaaattttactcttttcacctctgctgtctgatgcaacgcccccccccccctccctgccccttatccggctattttttttgtctgacatttttattaattattaattgtttctatttttagaaaaatgattataaaaataattttttaaagctttgtgaatccattatttttctgaattgactaattgccctttttaaaatcgcatgattttaaattgtttacctcaagcatttaatcttattctttttccttcaattgagttttgaaattgctacctgttttttatttatttaattggcacatcttttcttgtaattttctcttttcacctctaatgcaaccacccccccccctcgctgcctcttcgccgcttcctccttaattagacccccccccctttctgatgcgaagggatcctctgattttgcccttcttcgacatccccttcctaccttttatttacatatgtaaacattctacagcaaaactattaagtttaag

SEQ ID NO: 41065 - DNA, 934 bp, Heterodera glycines
  unsure (1)..(934): unsure at all n locations
ttttcnggggataaatccatatttcgacattttgtgattttttagggatattntggncattnttggnaaattttcacaccctaatggaaaaaagggaaaaatagaaaggtaaagttgaattttttggaaatttttaaaaattagaatggaaaaatctgaaaaattttgtgttttagtagtnattttggaatttttaaataaatattttgggtttgatantataaaaaatattttggaagttggggagtaaaatagttttttttgggagaaatttagtattttgagaantatttttgagtatttagatatttttttgaaaaatttataaagaaaatgaaagaaaaaatataattataagaatgggtaaaattggtttgggagtaagaaaagtttttggagtataattttttgtttatgaatgaaatataatttttggtattattngaaataaaaattttattaggtttaaaaaaagttatggtgagaagaattgaaaaaatnagattttgtaaattgtttaggtataantttttgtaaaattaattaattttttaaaaatttttgaaagatattcatccctcattttttcttgacaaaattttggatttacaaaatgtcaatattttataaaatattagaaggaaatgtaacctcatttgcaatagcacccagtgaataaaataaaaattttgctcaattttgggctgaaaattatgtcattatggatttttccgccactattttggcatttgtagtacttttactgtcaattttgtttgttttttagaaaaaaattgacggatataatttctgaaaattctatttacccccctgggggataaagggagaatggggggggggattaatttccaaacccctcctaaaatggggggaaaattcgaaattgggggatatatgaaattgggggaaaatt

SEQ ID NO: 41066 - DNA, 871 bp, Heterodera glycines
cgctgtgatcggtgtgtgatgattttccatatatatatcttttttgtgtaaccactgattttattaacttggatatgtggtggataaagttaattgaagacttgactagtaatgaaaaaatcgattaacattgcccagaatttttacttaggtaattaaaagataaaacaaaaatttctgtaaattcacaaaaaaacatgggctgcggaattggttcttttgcactttatgagtccaatcgcattttatgaatccaatcatatttatgaattgagtccaattaattagccattctccattttttgcatcataacattattcattttgagcgaatccgttaaaatgtaacatttattcggaaacggaaaaggttacgaccaaaaattggttgttaaatattgaacagtttgtatagaatttttcctcactttctggttcgtctgacctttgaacacacaaaaattcgtttttctagcggtcgccgtataatgcggtcaggttcaccaccactgactaacttttgcagtaataatggaaatccgccgtcacttccgcccaggccaaactttggcacagttcaacagcaaagtcagcagcaactctttgttggccaacaaccggcatttgtgccgtacaatgccagtggaatgtacaattacaatttgtgtgtattctgtggcgtttttcgacattgaattaccattttcaatttcagttatcaacagagtgctgctcccttcacaaatccatggcccgccattcactcgaaaaataattttttgttggcagccgaaggttttgataacattaggataatataaattgagttggttttcacaattttccttttcgaatcgtcaaaaaatgcgtt

SEQ ID NO: 41067 - DNA, 1129 bp, Heterodera glycines
cttaaatttattaatcaaacaaaaataaattcacacaaaccttaaatgtaattcatgtttttttcatatgtttacatatgtaaatgtaattttataattatcggaaataacaatcaatccatttaattcaaataaatgacttaaaaattgctgctttcttagaatataaatctgaattaaatcgtcaatttattatttattttgacaaaataattgtaattattaattatataaaaagtttaatgcatcgcaattttgtgtttcttttgctgtcattttgcgtaaaaacagccaaatttgactcaataaaaggcgcaaattgtgataaccaacaacaacagaatggcaacaattcaatttttgaaaagcttaggcaaatgtatggcaaaggtgagttagggaatgccaacaaaatattatgatgataatgaaatatttacaatatttatttcttaatatttttaattatttctacaatttgaatttttaaaatgtccaatatcaaaaggcaaaaatccaaaaaaaaacatttaacattttaaaaagatcaacaaatgcaattgaccagcataatatgtgaagcggataaaatgtattgcattttggaggcaattaaaacggaagtaaaaattaatttattataattcatataaattttaatttctcaattaaagaaaccaatttgttgcaatttggcaaaaagtgatgaatacaattttattaaaaagcgtatcacattaattaatcacaatgatccgccgttgagccaagtgatggacactttaattgttacactaatgagccttaaaaaggcaatggaatcgggtaaaaagcaaataatatttttattttaataaaaaaaactcctattattttgataatttttaatataactttaatttaaagttaaaataattttttattataaaaaaacaaatttaaattaaaaattatttttttacataaatataattaatttcctcatataaaatttaggaaattttggcgattctctgattaaaatggtcaaactccgtttgaaatttgcactaaaatttgctgcaaaacgtcatggaattgaatttgatgaacaaaataattttcgtttatggtcaaaaaatggtcaaaa

SEQ ID NO: 41068 - DNA, 1615 bp, Heterodera glycines
accctataaaaacacctgggactgaatcgtggtggacacctcccccgagacaaaacttttaaaccaatattatgggaacgactatagaaaaaatattaactcatgtttattatgatctccgttcgccggcaagctatgcaggagttcaaaaaattttacttgaagctataaaaaagaattcaaatataaaattaaaagatgttcaaaactttttagaaaaacaacgcacttacaccttgtttaagccaaaaagaaacaaatttaaaaggcttaaaactgtacctagtggattacacactgattggcaatgtgatctatgtgttatggatactttgaaagatcagaatgacggattccgttatattctcgtatgtattgatgtgttaagtcgaatgttatatgtttcgcctacgttatccaaaaagggtgatcacatgattgaagcatttgaaaaaatttttaaaaagtctggtgttttgcccaataaaatgtatagtgatagtggagtagaatttcagtctaaacaaatgcttaattattgtaaggaaaaggatattataaaaaaatgtaatgtacagccctcatctacatgccggcgttgttgaaagggcaaatcgtacaatcaaggaacggctttataaatattttagcgaaaaaaatactcttagatgggtggaagccgtcgatcaaatagcaaaaaatattaataattcggttaatcggataacaggtctaaaacctattggtgttaatttcaaaaatgctgtagcattacaacaaaggctatataaaggaaacaattctgcaaatatgataacacaacagataaaatttaaagtgaatgatatagtaagaataacaaaagaaaaaggaaaaattttcaaaaggttattacccaaattatactgacgaactttttaaaatcgaacgcgtaaataacacaaatcctgtcacataccgtttgagtgatttaaaaggtgaagaaatcaaaggaatattttacaaccaagaattggttaaaaccacagaacagaccacccatagggccgaaattttaaaaactcgtattacaaagggtgtaaaggagcattttgtaaggtggataggtcattcagaaaaacagaacagttggattcctgattcaaatcttattcattaaattaaaaaaactatatcaaaaatggatgatttttatattgtacttccttccaattcacccggaccaaacaacacaacctcacaatttactataagacttcctcatacattagagctggattcaagctggactgttgcactttcatcgctcatttatccatattcatttccgtctgtaggaattgaagaagacgattttataaacattaaattggtcaacccgaattataaatttcctgacgatatacgttttattaatatagaatttagaattcctagtatgcagtttacaaatgtagaacaattagaggtaactttaaataaattaatccgtgagggatatatagaaaaattcgggaacataaacgattcggaatcagtaaaacagagaaggattcgtgatataacagatgatagtctcgttgaactttttttcccatgaaaaccccaattgatt

SEQ ID NO: 41069 - DNA, 1154 bp, Heterodera glycines
  unsure (1)..(1154): unsure at all n locations
gatgataaatagctcgagcgcaaaacgtgtgcatgtttggaaagtatcgttcataccaataattgagggtttatttntaattgaaattttatgataaaccttattatctcagaagctatttaattgattcgaatgtttttatcgaggttaattagagcaacgaaaattggtttgaatcgtgaagattatcatttctaactcacttctcaaaattgttgataaattgcaaatatatttttccaaaagtctgttgacactttctgaaaataaattctatactcatgtattttccacttattagattttgcaggcttattgctgcatgttctttgcactttttcaaaataacctatgccctttattcgttcaaaacaccatctttgttgtttcgctttggattaattagagcaacgaaaattggtttgaatcgtgaagtttatcatttctaactcacttctcaaaattgttgataaattgcaaatatatttttccaaaagtctgtggacactttctgaaaataaattctatactcatgtattttccacttattagattttgcaggcttattgctgcatgttcttggacacttcttcaaaataaactatgccctttattcgttcaaaacagcatctttgttgtttcgctttggattgacaagcccgatgataaatagctcgagcgcaaaacgcgtgcatgtttggaaagtagcgttcataccaataattgagggtttatttttaaatgaaattttatgataaaccttattatctcagaagctatttaattgattcggatgtttttatcgcggttaattagagcaccgaaaattggtttgaatcgtgaagtttatcatttctaactcacttctcaaaattgttgataaattgcaaatatatttttccaaaagtctgttgacactttctgaaaataaattctatactcatgtattttccacttattaaattttgcaggcttattgctgcatgttctttgacacttcttcaaaataacctatgccctttattcgttcaaaacagcatctttgttgtttctctttgaattgacaagcccgatgataaatagctaaagcaaaacacgtgcgtgtgtggaaagatcgttcataccataattgaggggttatttttaaatgaaat

SEQ ID NO: 41070 - DNA, 895 bp, Heterodera glycines
aaataaatttaaatttattgcaaattgtggcaacagcaaatattgcaataaaataatgtgcacccgttaagcaaaacgaatgaaggaaagggtcaaaaatcgacaaaagaaaaccggagaaagaaacaatgaaaaggggagaaggaagaaatgggaaaaggggaaggattgccagtaggaaaatcgaaataaatacgcaccactcgcccctcccctcccctctctcccctcttctttcttccccgtccgccatcagtcagtcgcctgtcattttttttccttttttgagttgccattatttaaatagctgcactctctctctctcccctctctctctctgtttctctctatctctctgtctctcgctttccctccctctgctgcctgtctctctttccttcccacccttcttttttctttcactctttctattttctctcgttttctatgcatcttatctctctctctctctgcctaccttttccgcggtcttttcccctttcctcgccctgtccctccctcttcgtttcctgcaatcttttcttcttttgatttgtcacttctctccccctttcccctccgattcttttcaatcgttggctttataacatttatttatttctttgggctttagaatggaaatggtcgagcagtttttcttccatatatgaaaaggagtctcactaataatttgtacaatgtttaaattgatcagcaaatgtttgtaatgcgatgggttattaatgtcagatcgtaaccagggaagattattaatttagtaattacctcggcaccacagaccacagtggtaataagtactgttataaaattgtcattcccagccatttttttacttttgacccatttaagagaaacgattcgaccgatgggaaaa

SEQ ID NO: 41071 - DNA, 965 bp, Heterodera glycines
  unsure (1)..(965): unsure at all n locations
gggatatgtttaaattatgccaatttgaaggtcgtcggtgatccgttgggccccgtgttggccattgtcagtgcgaacccaaaagtgccaattcacgcgttgggcgatgagatgaacgaattggggtggagtttcacttttctacaggtcctggttttgaacgatttcttatttttcaatttctgatttctttttagaatccgaatgctctccgaatgacaatttcgttgcatcagacaaagggcgatgtgattgaccaattggtggacgctttgaagaaatgttgtgacaaaatattaaccgcaacggaagaatacaaataccccgtaaaaacggtgggaaaaaataaatattaaaaatatatttcgtttgtttatgttttagaatgtgattttcggcatttccgccgctttcgccgaccgcgatatttcgcatttgttgcccaatttgttcgtcgatgcgctttactccacgccgacttcgccccacggggatggcattcgaaagcggacgttgagcattgaggggcggaaactgtcccaactgcaagtgagcaccggtacgtttcacaaacaaatggtgaagcactttggcatggagagggcaataaatgcgagcctttggcatttgaaatggatgattcgcttattaattgcagcgggactagcggcactccaagagcaattcgggcacgagtacgcgctgacctccttccaagcgccgccggcggagaagcaaacccaaaaggaggaaggggcaaaagaagagacaccgaagacgaacccagcggaagatgaggaggaaaagaagacgaagacgaactcacagtcagcggaagagcaggaaaagagtacgaagacaaagacggaggaggaaagggagggagggcaatgaacggagtgacagcggagggaaagggacgcatntcatggcactgactctctctctctctctctctctctttt

SEQ ID NO: 41072 - DNA, 1056 bp, Heterodera glycines
atcactcatttttgggttttctctttttattttccaatattttttcattttttccattttttctttctccgttattcttttacagcgaatgccaaattgtttcttccatctgcaaattgttccatagcttacgccaattttcttacaaattccagcataattttggtcccattctttttccgaatattttcctttttgcttatattcatttttcatttcaataaatttttgaacaatttcaagtttttgttcatcactttttgatttataacttttctttttttgaagaccaaattctttaatccatttttgaatataacaactatttgtccccaatttcttcgctatttttgagttaattttatcccattcttttcttgaatattttctccctttttgcttaattttttctttaattttataatattttccaattatttctctttttttgagttcatttcgtttttcttcttctttttcttgccatttttctccaaatatttcgccaaatgacttttgttgcaattttttcttttctgatccaattttgacaattaaaaataatataattactaatagtagcggaaataatttcatttttgtcgtctcgaaatgattttattttatttttcttcaattaaatggcaattcattttttgaggcatttaaatgatttttttctgattaaaaaactgaataaatcattattttacttaataaaataaggaaatcctgtttaatttcaaagaaataataataataattttatcttaatgacaaaataattgccaattggtaaattaatgattaaataaaatttattagttttactggagctcattcgaaaataataaacatattttcaataaaaataaaataaattcacaatgtaaagagattttagaaaaataaagagattttatgaaatttcattatatcagaaaattggtgtaaaatggccaaaaatgaaattttagcgccgaaaaatgttgctgttcacgaaaataatagaaacttgttgaatatttgaatgctttgaacacctgtgggtttcca

SEQ ID NO: 41073 - DNA, 926 bp, Heterodera glycines
ataaaattaaaataaaattatttaaaaattataaaaactcctccatattccaatatacgcatattcgcgacaataaataactatgtataaagaaatggttgaacgatggtaaggagtctcccatttttgccccttgtagtcggccctcaccctccttattttttgtatgaattacatttaaaaatcacaaaattgaaaaaaaaattagaaaattttagtagggcgacaaagagcttcttctgatgacaaattacttttattaatccattaattgctcagcttttcaaagttttgtcttgcctttttcgctgtgttcgggtgagtcgtgcagaagagaaatgttaaactcattttccggtgggtcgaaaaattcgacatggaaagtggcccaggattccttttttactccaggctcagagtggtaaaaagggagggcaaaaaacggcgatttctgaaattagaaaaaaaatgattaatggaaaaaagtatggcatttttctcacataattaacttcgattgtcgtaaaatccatcacaaatggctggtgtagcagaagaaatttgccggccaactgaatgaaaatgcacgcattttagcccggcattgcagaatttcgaaaaatttcaaaaaattaaggctaaaatccaaagttttttggcttttattttttgaatcataaccaaaattttcgaattttgcaggacatttacggcctatagcaaattaatttatttagaacagctatgaacagggttgccagatctgaggatttatcctcattttgtggctttttgataggtcaatgaggattttttggaaatgaggatttttgtggctttttgagaaatttgaggatttttgaggcttttggggaaatcctcagaatctttttaattttgataaattagcataatgtttggcattt

SEQ ID NO: 41074 - DNA, 703 bp, Heterodera glycines
tttcctgcaccgaaggtactcactcggcctcttcgcgctcttgtggtgggccttcgcccccccccccccctcccacgcccttcagagcacgacaaatatttcaacaaaaattttgaaaaattgactagagcaatcgaacgctaacggacgacctaatggaaaaaaatccccgaaggagagaatttaattaaatccattccttcgggggaccgtgccgggtgccgcggggtaagcagtgctggttcgtttcatcacggcaccgaaccttttggctagtcagcaatcgttgcttaacttgccagatcggacgggtgcgcatgattccactgttccaagcaccccaccaaaagcaaaacgatataaccaaaatataaggaaaaattttttaaaaaattttttctccatcttcctttttgatactaaagcatcagagtgctaaaattaagttgtaaataaaatttggtgcgctttagagcactttctgaaaaaaatatttatgaaacaaaaaaatcgattttttcaagtgtccgtttggggtactcaaacaattatggggagcaaaaatccaacgcagaattaaagtacaggctatagggaagctattcgcgaaggattctgactccccataaatctaagggcatcggctcggggggactgccccgaaaactaaatattatcgtttttttctggtgtccgattgggg

SEQ ID NO: 41075 - DNA, 1002 bp, Heterodera glycines
atcagagtgccgaaaatcgcatgtgatctaagcctagcaaaaaatggtgtaagtaaaaatcgtaattacgctcaaaaagcttctcaaacaattttagcgcttccaattccttctacaatcgcctttatacatcccattatgagcgctaaaattatcagagtgccgaaaatcgcatgtgatctaagcctagcaaaaaatggtgtaagtaaaaatcgtaattacgctcaaaaagcttctcaaacaattttagcgcttccaattccttctacaatcgcctttatacatcccattatgagcgctaaaattatcagagtgccgaaaatcgcatgtgatctaagcctagcaaaaaatggtgtaagtaaaaatcgtaattacgctcaaaaagcttctcaaacaattttaacgcttccaattccttctacaatcgcctttatacatcccattatgagcgctaaaattatcagagtgccgaaaatcgcatgtgatctaagcctagaaaaaatggtctaagtaaaaatcgtaattacgctcaaaaagctcctcaaacaattttagcgcttccaattccttctacaatcgcctttatacatcccattatgagcgctaaaattatcagagtgccgaaaatcgcatgtgatctaagcctagcaaaaaatggtctaagtaaaaatcgtaattacgctcaaaaagctcctcaaacaattttaacgcttccaattccttctacaatcgcctttatacatcccattatgagcgctaaaattatcagagtgccgaaaatcgcatgtgatctaagcctagcaaaaaatggtgtaagtaaaaatcgtaattacgctcaaaaagcttctcaaacaattttagcgcatccaattccttctacaatcgcctttatacatcccattatgaacgctaaaattatcagagtgccgaaaatcgcatgtgatctaagccctagcaaaaatggtgtaagtaaaaatcgtaattacgctcaaaaagcttctc

SEQ ID NO: 41076 - DNA, 125 bp, Heterodera glycines
ttcactcctttctgaaggaaatctcttagctcaacaggacttaccggtgaggtaacgcgtctgtaaatggaaaaaatcgttcctacagaaacgttcacatcaatatttgaagaaccatctaaagg

SEQ ID NO: 41077 - DNA, 986 bp, Heterodera glycines
aaattttgggaactgtccccccctcacggcggggcctaaaaaccattgtactgcataattaaaacccgaaaataattttcgtatatttttcacaatttatttcaaaaacaaaaaaaaaatgattcaattttgaaacgaaatagtgcacaaaagggagggatggttagacgaaaagaggaatttttagaaaagagcgcaccccatctgatattcccatttttccgttccacaactggccaaaggcgactgtgctcattgacacgtagttgtccaataaggtacttggactttccacagtaaaatgtggtacaaaattttggaactgtcccgcctcacggcggggcttaaaagcattgtactgcataattaaaagcgaaaataattttcgtatatttttcacaattatttcaaaaagcaaaaaaaaatgattcaattttgaaacgaaatagtgcacaaaagggaaggatggttagacgaaaagaggaatttttagaaaagagcgcaccccatctgatattcccatttttccgttccacaactggccaaaggcgactgtgctcattgacacgtagttgtccaataaggtacttggactttccacagtaaaatgtggtacaaaattttggaactgtcccgcctcacggcggggcttaaaagcattgtacagcataattaaaaccgaaaataattttcgtatatttttcacaattatttcaaaagacaaaaaaaaatgattcaattttgaaacgaaatagtgcacaaaagggaaggatggttagacgaaaagaggaatttttagaaaagagcgcaccccatctgatattcccatttttccgttccacaactggccaaaggcgactgtgctcattgacacgtagttgtccaataaggtacttggactttccacagtaaaatgtggtacaaaattttggaactgtcccgcctaaaagcggggcttaaaaacatttacagcataattaaaaccg

SEQ ID NO: 41078 - DNA, 989 bp, Heterodera glycines
  unsure (1)..(989): unsure at all n locations
cccctcttttttcctctctctcttcccccttctctccctactaggcctctttttttttttntnnntttttttttctctcctcaaancgcgnccgcncncccccgcgcgcgcgccccgcgcncccgngcgcgcccgcggcgcnaggacgcaccccgcaagnagacccacgggagncacggggacgccaaccacgaaaacagaacccaaacnagacaaaggcgagaacggcgaccccgaaagaaacccggcagacgaccaggagggggaggagcagcgaccgcgcaaccaggggaggccaagcggggggcggcgaccggccagcgaccacagcgcacaccngccaaccgaagccaggcgggcggggccgaggcaaaacagccgccacaacagcagcagcagcaacaacaaccacggggccaagggggacgaacgccgagggaaagagacccgacaagcgccaagcacccagaaacgagcagaggcaagcgagccacaaaccaaccccaaccacaaccagcaacaacgacagcagcagcaacaaaatcgacgtccatattttcagcaacgtcaaccattgcagcagcaacagcccccatttcattaccaaggcatgtgttgttgttgtgttgtgtacaatagtgatttgggcgccaaattgtgaatgaatatgccgcaatgaaacccaattacaggacctttgtcagaggaaaaaaaattaaaacattttctagaaaaaatgggcaaatttaacattttcccggccgcccattaccacacggcaccattgaaccacattttaccaaatttttttttttttgaaatttttatcccaaaacggcaaaaaatttgtctgtctttcgcgaaaaatggaattacaaatttctgttttttcttcccggcgctaaaaaatttaaaacactagagaaaaaattaggatttttggcacgaacagcaaaagaaagggcttcgaattcctcatccgaaagttg

SEQ ID NO: 41079 - DNA, 791 bp, Heterodera glycines
  unsure (1)..(791): unsure at all n locations
ttcaattcacaatcataagattcatatgggaattcttcttcaacgtggtttcaagtgataatttgngattatttnattgcgccttttaaggaaatttnagnnngnntttngaagtgtnngaganagggtanggntnntttntgatgnanatttttatctattttgagggggaatagaaaagtttnaagattaattaggangtgagagtggnngaatangagttttttgaaaaatgtattgagnanaaaattgagatggnnaatangagnanagaantgaagggtttgatnagnaggtggtgggnaattgganaattaatggaganaatttgttgggnaaattaaanatttagtatttttagaaatttgtaaaaataagggtattttattatntgatatattnaaaaanaagttagattaaaatgtgatttgtgtaagtttttggtttttggaatttagaaaatggtttttgggtgtantgatatttagangtntattngatggnnatntttaatttgttaggnnantggtnttttnttaattgtttnttggatatgtttttggtatnaaaagaangnttaaaatntnagaaatttttaaatgtaagaataggaaataatggnattaagaaaattaatanaatgagaaaatatgaaaattgagttttttagaatatattgatgagattgaatttttgtntatttnatattttaagattntgtttgatatgaattttatggggaaaggatgattagaaattgtttttgaaaaatgtgaaattaaaaagatatt

SEQ ID NO: 41080 - DNA, 1577 bp, Heterodera glycines
aattggggaaataattttaatacccatttgaattaattaggtggaagataatatcctaactgcggtgatgaaagcccgcgcaaacattcaaatgagccaatatacattggataaatacgaggcattctttggcattgtgcattatatgaaaaagaattggcattgtgtcaaaataacagtggtatttgaagaataggaaaggccagcatgccacaaatatcgcatatattagtacattttgtacaaatatttgtatacagcatacatcggaattaccgcaatggacccaaaatttgtatatgaaaaacaaaatgaaattgaagtgccactaatttttgcggtgaattcactaatcaaagtttcgatgtttgatattatatcatcttcgaatgattcgaagtaagtatcaattttagcgaagtatggagagaggctagttgatccaagcctgtcgaatgatgaggcgaatgaactttgtatttcaattaaagtaaagaatcggaagtgtaacgcccgtctgaggccgcgaagcggccttaaaaccccttaagattttaaaataaattccaaatctctaaaaaaactcaatgcttatctaggtagcgaagctcccaaagcgcgaagcgctttttcccagcgaaatagccgacggttcacgcacccgctagttactatatatgttatattgacaaggagtttcgtttcaaaaaacaaaatctcccggccgaaggccgggagcgccctgaaagtgatggaagggtcttacaactttttgaggagaatccgggaaaactatagaaaaaaattcagcgcggacgactgagtcccagggacggatttctcattttttcgtgcgtttgacggcccataactttttttctgaaactcggatcaaaaaattcccgctgtgagggcactccgcagaagtgtcctctataatccagtattttttatttttttattagagccaccccctggcctgcacgcttggctaattgaagtgtgctcaaaatgtacacttcagtaccaggcgaataactcgccaggggttgctttgaccgaaaaattgtttctgagcaaaaatgtgtagtatttgaaaggctatccaaccaagttttaaaatttcgaaaattttgaaaatttttcgagctaggcctaaaaaacggttttcgggtttttgaattttaggattttttaacgatttttcccagagaaacggagaccacttccaaaacatagtttttcgagctctatcgactggtatttttttcggaaaaatttcgattttttcccggaaatagaaaaaatttttggcctgagcgggacatttgagtcccgggtccataactcgttaggggttggttttatcgaaaaaactcctaagggcaaaattgtagacttttttaagctctatcgaatggtgtgccatatggccggaaattttcaaaaattttcgagctaggccccctagaaattttcaaaaattttttttgggttgaaaaagagggttaaaaatatttttctggggtaaattagggtcctgagcacaaatatgatgtttattttaagtttcagat

SEQ ID NO: 41081 - DNA, 973 bp, Heterodera glycines
aataagagatagtcatttttcttggatataagataaatttaaaaattctctgagaaattaaatggcgattgcgcaccgccctccctctcacgctcgagcgcttttgtaacgtataaaatttctcaaaataagagatagtcatttttcttggatataagataaatttaaaaattctctgtgaaattaaatggcgattgcgcaccgcacttcctatcatgctcgagagcatttgtaacgtataaaatttctcaaaataagagatagtcatttttcttggatataagataaatttaaaaattctctgtgaaattaaatggcgattgcgcaccgccctccctatcacgctcgagagcttttgtaacgtataaaatttctcaaaataagagatagtcatttttcttggatataagataaatttaaaaattctctgtgaaattaaatggcgattgcgcaccgcacttcctatcatgctcgagagcatttgtaacgtataaaatttctcaaaataagagatagtcatttttcttggatataagataaatttaaaaattctctgagaaattaaatggcgattgcgcaccgcacttcctatcatgctcgagagcatttgtaacgtataaaatttctcaaaataagagatagtcatttttcttggatataagataaatttaaaaattctctgagaaattaaatggcgattgcgcaccgcacttcctatcatgctcgagagcatttgtaacgtataaaatttctcaaaataagagatagtcatttttcttggatataagataaatttaaaaattctctgagaaattaaatggcgattgcgcaccgccctccctctcacgctcgagcgcttttgtaacgtataaaatttctcaaaataagagatagtcatttttcttggatataagaggaattaaaaattctctgtgaaattaaatggcgattgcgcaccgcacttcctatcatg

SEQ ID NO: 41082 - DNA, 1223 bp, Heterodera glycines
agaaaaatgactatctctattttgagaacttttatacgttacaaatgctctcgagcatgataggaagtgaggtgcgcaatcgccatttaatttcacagagaatttttaaatttatcttatatccaagaaaaatgactatctcttcttttgagaaattttatacgttacaaaagcgctcgagcgtgagagggagggcggtgcgcaatcgccatttaatttctcagagaatttttaaatttatcttatatccaagaaaaatgactatctcttattttgagaaattttatacgttacaaatgctctcgagcatgataggaagtgcggcgcgcaatcgccatttaatttcacagagaatttttaaatttatcttatatccaagaaaaatgactatctcttattttgagaaattttatacgttacaaaagcgctcgagcgtgagagggagggcggtgagcaatcgccatttaatttctcagagaatttttaaatttatcttatatccaagaaaaatgactatctcttattttgagaaattttatacgttacaaatgctctcgagcatgataggaagtgaggtgcgcaatcgccatttaatttcacagagaatttttaaatttatcttatatccaagaaaaatgactatctcttcttttgagaaattttatacgttacaaaagcgctcgagcgtgagagggagggcggtgcgcaatcgccatttaatttctcagagaatttttaaatttatcttatatccaagaaaaatgactatctcttattttgagaaattttatacgttacaaatgctctcgagcatgataggaagtgcggtgcgcaatcgccatttaatttctcttatcattttatcattcattatataaagtatgtgaatcggtctcgagaagtcgtttcagcttgaaaatgccaacagaaattggacaggctttcgtaatttttaaatttgttaaacaataagtcccgcgggactgtttattgcttatctctcttttatcagttctgaggaactcatcaatcattatctaataaatattataatcatactcttgaaactgatcacttacctcactcctgtgtcagctcagatactatttttatggttaaaaaaaaaaaagtgaacatatttttctaattaatcgtttcttttactaagcacaaatgtcatacgaggcggcgttcgctaattttgatctgggagatatgaagaa

SEQ ID NO: 41083 - DNA, 920 bp, Heterodera glycines
tgccatatagccggaattttcaaaatttttcgagctcctcatcctagaaattttcggaaattttttttcggacgaaaatgtgggtgaaaaatatttttctggggtaaaataaggtgttgagtacgaatatgatgtctattttaagtttcataatttttggaattttttaaaaattctttattttttggcaattttttggccctcgggattttggcctaatatttgaaaattcataacaaatcgaagggtggatcaattttcgtgcaattatattataaaaatagagaaaaatcaggagaattttatgggatttatttgggatttctatcttaaaaagaaaacaagttattccagaatttctgaaaattttcgatttttcagaaaaaaattcataacccccttctgaaaagaaatttttgaaaattaaaatactacaaaaatccgcaatttttttctttataatataaattttattttacatttttatcactttcttacgaattgttacaaaaataaaaccgattttgggattatggaccaaaggggtgagcataggatttttgagttgaaaaattttttcaccaaaaatcttcaaaaaatatgtctttaggggttttttgggcccctgatcacgaatacgtaatcagattttacttttgacatggttaagacctcagaatccctgtgtgattggggattctgaggcacccttatgaggaggggggggggcggcaggttcggacccggacggtgtacattatttttctatgcatttttgggttattttcactgtttataattaatttgaagatttgttttaattatttaaatttatttttttttttaataaaaaaatttttttttgttttttttttattaacaaaatatttttatttaattttatttttttttttaaaaaa

SEQ ID NO: 41084 - DNA, 848 bp, Heterodera glycines
atatatatatatatatatatatatatatatatatatatatatatatatatatagaaaaaaatagatttatgaacaaatataaaaagaattcatatttttactaatttattattatttggtcaagaaattatttcaaaataatataaaattagcattgaaataatcatttctttatttaaaataattattcaaaatgaattactaaaataaattaaaaatattcaaaaattaaaaattttactgagtttttaactgtatgaaaaaaaaagttttttatcgagacggatgggcggacataaatattacccgggagacaaatttttcatccgtaaaaatacatgttgagtgcatggtatggggaaaacatatgaatgaatgggaaaaaaagttgggccgggggaatttccgcttaaattcgctcaaacttttgcttggcatttcaaaagagaggaaatggcattttaaaggcttttaaaaataaataaaatttcgtatcgaaaacccaattttaaattagttgctttttgtttattttatataatcaaaaacgacttaaagaaatatttaattgatcaaaaatcagccttatatgaaagtattttttcaaaaaaaaaattataattcaattcaaataaaaaagaaaaaataaaatatttaaaatatctaaaatttccaaaaattcaatccacgacttaataaataaatttgtttttgtttttccgaatgttaataatatgtggaaatgataagtgccagagaagaatagagtatatgttgcagcatttttgatttaccataaatcttagtgtatgtgtaaacgataattaattacttaattaccattcata

SEQ ID NO: 41085 - DNA, 732 bp, Heterodera glycines
  unsure (1)..(732): unsure at all n locations
cactttctgttcctcttccactttctcttccactatttcaatagcttcnnntttttnttnnnntttntgttnntttccctctccttctaacactnncngngcctcttccactttctcttccactttctattcctcttccactttctcttcccctttcccctccacttccactttctgttcctctccactttctggtcctttccactttctattccactttctgttcctcttccactttctcttccactttctgttcctcttccactttctgtctctcttccacgttctgttcctcttcctctttcctccctcttcttctttttcttcctctttctcgttctcttcctatttctcgttctcttcctcttcctctttccttcctctttcactttctgttcttcttccactttctcttccactttctgttcctcttccactttatcttccactttctgttcctcttccactttatcttccactttctcttccgctttctgttcctcttccactttctgttcctcttccactttctgttccacttccactttctgatcctcttccactttctcttcctcttccactttctgttcctcttccactttctgttcctcttccactttctcttccactttctgtttctattccactttctcttccgctttctgttcctcttccactttctcttccactttcctgttcctcttccactttctgctcctcttccactttctg

SEQ ID NO: 41086 - DNA, 823 bp, Heterodera glycines
  unsure (1)..(823): unsure at all n locations
tggcagggtcactctcctacgaacaaacaaattggctttccaatttataaaactccgcatgcggcaaaatcacgcgtgaccagcagaacgagtgcgcgtccgaagtctcgaaacaatcccaagagaagaagcgcaatttccgagaaacggtttttttaagccatgaattttaccaatcaatcaatttgcatcgtttttagattgaactgcaaattgctctgaaaaactacgacccacagaaggacaagcgtttcagtggaactgttaggtaaatgatggccggcctttgttggtgtcagacagacccgaacccagggtctttaaaccgtctggggaggaaacaaaaagtggcaattcggtcactgtttccgttaaaaatggttcaaatttctggtgaaagtttgtttttgtctttttttttatccggattggtttattcaatttgttcagcatttgctttttagactgaagcacatccctcgtccgaaaacgaaggtttgcattcttggcgaccagaaacactgtgacgaggccaatgccaacggaattccatgcatgacagcggacgacctgaagaagttgaacaaggacaagaagctgatcaaaaagctcagcaaaagctacgacgctttccttgcctccgaatcactcatcaagtttgtgaaatgggttaaggatttgggggtaattttttgtatgccattcaaaaaataaatggnatcattttaggactannatcggttaaaaaaagtcggttgacatggaaacccaaaatacagccaatgactttaaaaacttaaaaaaggtttataatgttctatgt

SEQ ID NO: 41087 - DNA, 1331 bp, Heterodera glycines
tttatttacaatatatactaagattccggtaaatgtcccccccggtcaatttataactgttatgaatttaagtaattcctatcataattttattaacaaatttattggcttttttattcacttgttctatttttttaggcattgcatttaattattcatttaattttattttttgatatcaccatgcttttgaaacgagcttcaagttcgttttattcaccttttaattagataaagtttttaagttttgatcaaaataattaaatgtcttttaatacaaattactggataaatatataaaataaattaattactcatattttcaacaattgtaatttacttttcattgcaaaagtgtcgagtttgtcacatagattcgatatgtgctcaaaatggcaaaattgtatacattgatatgaatcatggtaactggcgttgttctgcttagcatcagagaccgtaattaatttaattattttaaaaatttatctattcaatttatatcttctttgtttaaaattattttgaatgattatgaattgaatttaaaataaaaaatgcgtaataatttagagtaactatttacttgctttatactttttgcttaaaaaatttggttatatttcaatttatttacctatcgtctttctagttctgaaaaataaggatattgtggaaaatttaggtgcttatctttttaatatactactatttaataaacttactttaaatattaaaatttcattaaatgatccatcatttactggattaatttttaacaaaattgcatggtttttatgaaactcttctaaatatcctatttaacttctctcttttgtttgataatcattttattcattacggctaataaaatatatttcttaatgtcacttggaatttttcaactcgcttttgtcactattaatttagtttgtagaaaagtgtattagtaacaaatgttttatgaatattttcgaattaatatatttacaaaaatctacaactacttaaaatccgggttcgctaaagggcatataaaagtgaagcaccgccattaaagaatttgaagagaaatttttaagcttttattctgaagaattcttttattttgtgaatccattaaatatgttttttcatatatttactgtcatacctaaaaccttttggctcaaaattgcaaaaatcatcagttttggataaaataataattttatattacgtgaacatttgattttgttgatttttaaataggattgaaaaaaaatttcggtgcgttatttttctcgaaacttctgcaaattacaaataattatttttttaatgtatcctaa

SEQ ID NO: 41088 - DNA, 675 bp, Heterodera glycines
gaaaaataaaaatgtgtacaattgacaaataataatccccactagattggtcctttactaagtgcggagatcataaaaatctaaataaatgtgaagggttggttcacaaattgaataaagctctcaatgttataggaagcgaacaattacaaacactgggctaataataatagagatctgcaatacgctacttaatattaataactaaacttaaaatacgaataaaacattccattggattggatttatgtgggggaatcagctagctgtctcaaatacttcatcatcatccggagaatgttgctgaacagttgaggtcaaaacactgtttgacgaagcaccctcagccggtgaaatcgaaaaaactctttggccaattggagaatcggtaggagattttcgcagtgctggcgaatcgctgggagacctttgatcattgataaccgactcagcaagctcttaaaataaaaattaacacaaacaaattgtaaagcataaaggttcctctatcaattgtatcaagattaccttcgtcctctgcccccatttcctccgtatcttcatcgtcaatgattcggttcatcagatcaactgaacgataatgctttggtgggatccgtgacagttgagcggcaatatccatctgaatttgtatagtaaggtgagagaaggact

SEQ ID NO: 41089 - DNA, 1141 bp, Heterodera glycines
  unsure (1)..(1141): unsure at all n locations
ttttagcccccattttggttcgagaaaatatcggccgaccatcgacacgtttgtccgatgtcatagcgctatgttttcatactcatttatacagtttaatacttttttattcgtaataaaatatatgttcccacttcaacaattcgtctccgaattgggccgtgatccgtgggagatgttgcagttgtttttgccgcggtttgctctgctcattgtccgccgcaacaccaccagtgtgctcattccgttgttgttgctgttgtactccttcgccctctccgacactttgttgccactttttccgtgccgccgcccattccgtgccgatgccctcccgctcgatgaccacaacgtccatgcgttgcacaatttcggcacggatggcctctgcaaggttggcggcggatgcagtggcgtcactggtggtgccaagcaggtcgtacacgacgccatcggcggtgccggtgggatccatgggcctattaaaaaattcggaaggccttttgacaaattttaacagtagaaatcaataactaataaaaaaaaatcttttgaaaaactaaaaatgtttaaaattactaaaatgcattacaaatttctgtaaaacctttaaaaaattaggggaaaattgcaaaaaaaagcgttttttgaaaaaatgtaattcaaattttatttttttggtttctacttaaccagggtaaagtagaaatcggggaccgggcgggtcaaataatctgtctgatcaaaaaccggaccatttctgattgattcgattcaagcaaataaattttcgttggtcaatatctgtttttatgatcagtagaattggaattaaaatttcataaaatggttttatctttctgtataattgcaaagatttgagaacagtagagaaattatatatacaaattgatgataatttttgaatgaatgcctcttttgccnaaatctaagcgctttttgagaaatatttaaataattattttataatttaacacaaataaaattgtcaaaaatgaaaatatgctatttttatccgtttaattgaatttttaattgtgctaatttaaattggagctgaaaagaaaaaaacagaacaaaaaacatctgatgaaatatttgnagaaaaatgggaagaaaa

SEQ ID NO: 41090 - DNA, 1182 bp, Heterodera glycines
ggcagattggagtttcgtacaaaattttcctccactttaattaaaacttagaatgttttttctcaaaaaaccctagtgatttattttttatttaaaccttaaaaaattctttttttttaatataattccaaataaacctgaaaaatttgctgaaaaaattaagcaaaataaattgtttttaattgttttttcatagaaatataaaatttgtacgaaattctattctacgaactgtcatttttttattaattctttagtgactcctgggtgaagaacaaaaaacggaatggtgcttaattgttggaaccctatccctcggaaaatttttcgaaaaatgagacaaatgtttttcaaatttcctgtctctaattaagattgccaacgtttcgactaattcaaatcaaatttgaataaaataaaatctttttaaaaatttaacaaataacgggcctagtcaaaggacgtgtaccgacgccctcaaaaaatttcgtcaattgcattcggaattccgtcggctcaaaaaaaatttcgactatttgaaatcggttattacaaagacaaaaaatgttgaaatttgccaatcaaaaaagcgaaattccggcatatccctgtttttaatccttaattcattttattttcaaaatttacaaactgggatctttataggtaggtctaagagaaccttaacaaataactaacttttccatgatgttggcaaattttattgtcgaaatttcatgctccatgatcagtaaatttttcattttttgctccaattctttttcaatgccggaatattcagaattttctgagacaattttggcacaaattgagtgccattcttcagtaaatttgtgcccaattctgtttaacacattcacattgtttgttttggaaagtttggcattgaactcatttatcaaaatgtcgagatcaaatttaagaattaattttgccaatatttgcaacactttctcaatttcaatgtgtccatttttggcattttgttctgccagaattttaatttctttttcggcacgttcaattggtgaaaaatcagtcaaatatgatggaacttcttcgattaattcgttctaaaaaggggataaaatatagacaaaatgaaaatattcctagcggtggagggtcgtctaaaaaatcaaaaaaaaaaagtatttttat

SEQ ID NO: 41091 - DNA, 650 bp, Heterodera glycines
tcaaaattaataattatgtcaacaaagagagcgattattcacacccatggtcccatttttatagcataaattaagtgtagcttcccaaaatttctccatttcggttttgcgcttaaattattgtgtaaaacttttctaaaattctgaggtgtaggctcaaaacctaaaagtaccaatttcagactttgttggtgacacgcgtctcgctttcctttcctcccctttcccagtggagtaaacaaataaaaatgaggagctaatagccgacaacgctgttgcttaagtataaaaagccttcaggaattaatcaattggttattattgttaggttttcaaggaacgggccgggttcccgaatttttatgcgggattttgcttctgtcccttctcttctcgttttattagtgtatgaaaattggcatttgaacattaccggagaagtgaaaaaggaaaagaaaaaaattttttcgtaagactcaatttacaaatgaaaactgggtgaattgaagaatagatgaagctggtcgatgaaatgaacgggtaaagaccgaggtccaagcggggacaagcaaagcggggggggggggggaatgggggcagggattcacgtgaatgggctgaggatggatttgtgcagcgcaaggtgggag

SEQ ID NO: 41092 - DNA, 914 bp, Heterodera glycines
gggggtcattcagcactaataccctttaattagtcatttgtcgcttacactttgctccaatttctccttttttgcatttttcccatttgcctttttaagaatgtttagtgaattttcagtttgagctgtccccgtgccattctctctctctctctccgtattttccataaatggaagcatttgagccaccaaaagtcaaaggtcatcctttaaatattaaataatttattaagtattaatgcctttaaattggtcaaaggataaacccaacaaaattgatttaataaatatttttgtttaatttatcttccactaaaatggctgcacttcaaaccatttgtggcgtgaagtgctgaaatgtgtgccttccgccacccataaattgttcgaattgcaaatacccaaaaaaggatgagtaaggaaaggcgagggattagtggcgggggtgggcacaatgcgtccgactcatccgtcgtcccctcaaacactcaccgattctcctcccccccccaccctttttcctccaccgccccaccattttaggccaaccgaaacaatccaaaagcgaaagcactgtccaaacaatgaatgaatgagtgcccccaaaaagtgagtgtttttgccaaaggaaagtaaaaatggggcagcgaaaaaggcaaagcaattatttgaattagccgcttaataaagccggggttttggctgatccatttgtttaagatgcaacaaattcggacattcattcattcgttcgaataaagaataagcgaccaattgcaaacgaaacaatgaaaaattcccattccttgccccaatcactgcacactctccccccccccccctcgtacatccgatcgtcaccaaacccgttattatttaatttgtggatgaatgaaaggagggacgggaaagag

SEQ ID NO: 41093 - DNA, 693 bp, Heterodera glycines
actacggcgtgttcggcacaaagaaatcactgatcagccacaggtaatggtgttgccaatgccaacaaacacaccagggtgtgggggtagtttcgtaggacaaaaagcagaaaaatttgctgcattacagaaattccgacaccaaaaagtgtctgtatgtgggttttttaaaaaaaattgattttttgtctaaaaagtttttgaaatttaaaatttttttgtacgaactgccatttaaccctttgtatttggcactgaaacaatcaaaaaaatttttatttttttttgattttttcacccccccccccccctttttccattaaacagaggctgctcatctacgatgttggatcatcaaaaacgctggccactattgttcaatttcggcttgtcaacaatgacacggaagcagcaccaccgctaccagcaacagcaacaaacagcacaacgaccacagcgaagcgaaaagcaaccacaatttatccacaagtgcgtcgcgtgtggtttggcaggcctatagatttcaacaaaaaaaaatcgagggaggcaggttcttttatggtattcccaaaccccgaaaaatctttaaaaaatcattttgtaaaaaaattaggtaaaaatttcgaagttttctaatgcatttcaggaaacctttgaaaaacttcgtaattgaaaaaatcacattttctttta

SEQ ID NO: 41094 - DNA, 1217 bp, Heterodera glycines
aattgtgcaaattttggcaatttaggagcgaccaaatattcaaagaatacgtaccccttctcataaaccttaaggtaatgcccctattatgttatgggatattattttctgaaagattgagcttagcggttttcctgatgggataatcagtgctgagcaccagcagcaatacgcggatgagtacagacggatatacagcgtcaatttgatccttgaacgtgtgcgcaaaaatcccggactacgcttcattgcgaagttaatgctcaacagcctttggttggttcaagactttcttcttttgtaacaatctgattttttttcatcctttaggggtaagtttagcatgcgaaacgaattaggttccaacaaagtgctgaccaggcctcaggagttttacaacctaattctggaccacaaaattgtgagtagctattaaagaatgtttattttaaaaacgcttaacacattataggaattatcggcggtcattcctttgtcggatgtcgctgtacgtgtactttacaagcacaaaaaaaattttgtcactgagcactcatccagcaatatcgtcttaagcttgtggactacaagccgtgcccgcctaaaactacttgattttatgactcaaattgaccgcactgaaggagccaagctgctttacacggtttgtatattaccgtgttaagaattgcaacccaaaaaaaaaaaaataggacaccgacagtgttgctgtactacacaagcgggacgttatacccatacaaaccggcgaatttttgggtcaaatgagtgaagaatacattgactatgaaattaaagcctttgtatgtgggggtaagtatcactaaatatttccgcatgtaaccatctgttcaaggggtcaaagcagtatggctttcggatgcagaataaaaggtctggagcaatagagtatgtacaaaaaatccgaggaatcacattcgatgtgaacaacagtaaagcgctgcagtttgaaacttttcggcaaaaagtgataaattatggtagaaacggcggagaccgtggtaatcatgtttatggaaactatgataacaatgacgacaacgaaggagaaaatgtgccttcaatattcacatacaataaaataacgccaacgcgtgacagccgtgtgatcacccgtgagctgcgcaaaaaataagtgccggtgtgccagaaaggcataattaacgaacagtacg

SEQ ID NO: 41095 - DNA, 1222 bp, Heterodera glycines
ccattggagttacatccattggcacgcctggttcaggctccttaccataaaatgcactgcttgtgcgttgcttcgtgggatcatgtacttgtacgtgttcttacgttacttgctcagctcggctgtggggttttggtgtgctggcgcgaacttgtggttctaattcgcgttttacggaccgtaactcaagcgcaccaatgctttgcatgctgtggcggagtgcctggattactggcattcctgctttgatttttcgacctgaactcagacgtgaacacccgctgaacttaagcatatcagtaagcggaggaaaagaaactaacgaggattcccgtagtaacggcgagtgaactgggaagagtccagcgctgaatcgcagctcctctggggttgcgaggtgtagcgtatagaccgtgagcttgggttggcccgcttgttcaagtttcccttgaccggggctccagagaaggtgcaagacctgtccaactggcggtgcctacccatctttacgtgtcttggagtcgggttgtttgggatcgcagcccaaatcaggtggtaaacttcatctaagactaaatacggccacgagtccgatagcgaacaagtaccgtgagggaaagttgcaaagcactttgaagagagagttaaagaggacgtgaaaccgatgaggtggaaacggacagagctggcgtatctggtctgcattcacccgtttgttgctgtacgttgggctgctagcctccagactggggtttgctgtccttctgttcagtggcgaatggggcatttgcaggcggagaacgtgagctgggtttagaccgtcgtgagacaggttagttttaccctactaaagacctgttgctatgatagtaatcctgcttagtacgagaggaaccgcaggttcagacatttggttcatgtgcttggtcgatagaccaatggtgcgaagctaccatctgagggattatgactgaacgcctctaagtcagaatcccgcctaggcaagatagcaatattcttgctccccggtgtcgggaggcactacttatgcgccgcttgcggtgcagcacaaatgccccagcatctggcccgatgtgcgtgcttaattgctcgcacattgccaaagccgtagcactcgtgagccatggtggaacgtcggggcgcaaaatcacttgtatacaaggtgactactggtcagggggttgttagcagtagagcagct

SEQ ID NO: 41096 - DNA, 1448 bp, Heterodera glycines
ctgacaggaaaccggtctttgccaggggcgggaccggctctatctggaatttgttagaggcacccagaatcattaggacattgtaaattcttcaaaattccttagtttttttggggcccgaaacccagccctgcttgtctcagcccgattgccacctcgaccgctgcccctcgtgcacttcgccgcccgtgtgccgcttgccccggtgctgtgctcccctgccgatgaagccgcccccgcgttggttgtggtacacttggcgatgctgtcccataccaccaccgcccccgcggaaccgacttggccgaacgccttttgaaaatattttgttggttgaattggaaaatgaattttttcaaaaaactatttgcattaattttattatgccttaaaataaaattcaaattagttagactttcgaattgcatgctgggggacgttttcaaaatccctcccgcaaaaatgggcatttttgcgagaattttttttttttaatttcattatacaggagaaaacatttaggactatatatcaaatgataaaattttttgattaattcgagtgcttatattcaaaatatgccaattttagcggattacgaaacacatactagcactaaagaagaaaaaaaacattatttttttttatttttggagaatttaatttaataaaagttacgggaagaagatggacagactgccaaagatcccatggacaaagtgttatgcaaaaatgcgctttgttccaaccttgtttggcacaatgcgccaaatagcgacgaatgtcacggaaccaactcagctccaccttgtagccaagcatttccccctcggggccaaatctgtaacaataaacgacggtcttaggttcaactataatatttgagatgccgggaaatttgaaatttgaaaattaaaaattacttttaacaacttggcatttttgcccaaaattctttaaaaaggcaccatcccctttaaattgcttctttcgcaaacaaaaattctcaaccaaaaattttatattctctaaattccactttatcctatgagcatggaccctaaattttcttctttttttttttgctccactggggccaaaattttccaaatccatgggattaaatttttctgggaatcatatcccgcttctgcctgctctgcaaaataatataggaaatacagtatgcacggtattctcttcccgcctgggtactgtaggcaatcacagtttaatcaattcacgcaccgttccatcgcttcgcgtgcgcacgatttgctctcaaagcggaccgccacatacagcttggtacggtccgggttcaccttgacaaagtcgaaggagcacgtgccaaagtcctccttctcgagaaagtctctgaacatgcaacgaatttaatgggacaagcaaacgtaatttggctaattttgtggccaattatattttat

SEQ ID NO: 41097 - DNA, 1284 bp, Heterodera glycines
  unsure (1)..(1284): unsure at all n locations
gatgcgattgaaatttttcagcttttcttgaaaagtttttcccagaaatttatacagctttccgnacaaattgtntagatattattctagacgatttttttatatctcagtgcttaactattgcctttttgtatgataactggtagatattgggagtgaaaaaaagtttgtttgtgactatttacaataaaaatttatgcagcatttctaaaaaggatgtaaaaataatttcttgcgtaatattttttacattatgttgttgaagaatttgagtctgcttctgatgcaattggaaaatttttcagcttttctcgaaaagttttttcccagaaaacggatgggtcaaataaaaaactaaacatctcacatgaccaatttaaattcacttacattttgggtttactttattatgctggcccataaaaaaatggagtttttccggtgccaaatttttgtgaattttctttcggcccgtcataagcggattgtttgggggcaaatgaaaacaaattttgtgttattcgaatgcgctagccgagctctacattttcaaatgtatcaacaaagggtctatctccactctctggcgagttatgtccagccaaagcagagtgggccataaacacgaattttttaatctttggtatttcctctattttgagcctgctctacatttatgtattatgccaatatgcctattgcaactgaaatttattcaactttcccgacaaattgttgagataattattctagacgatttttttatatctcaaagcttaactattgcctttttgtatgataactggtagatattgggagtaaaaaaaagtttttttgtgactatttacaataaaaatttatgcagcatttctaaaaaggatctaaaaataatttcttgcgtaatattttttacattatgttgttgaagaatttgaggctgcttctgatgcgattgaaaatttttcagcttttcttgaaaagttttttcccagaatttatacagctttcccgacaaattgtttagataattattctagacgatttttttatatctcagtgcttaactattgcctttttgtatgataactggtagatattgggagtgaaaaaaagtttgtttgtgactatttacaataaaaatttatgcagcatttctaaaaaggatgtaaaaataatttcttgcgtaatattttttacattatgttgttgaagaatttgagtctgcttctgatgcaattggaaaagatttcagcttttctcgaaaagttttttcccagaaaacgg

SEQ ID NO: 41098 - DNA, 1037 bp, Heterodera glycines
agcaatcataggcagaaggactccgcgtttgacaatgtcttccctcgattgaagagcatggcatagcgtgtgggggatttcgttgcttcaaatttatgaccgactatttttatgaggtacaaagagaaccctatcaatcataggcagaaggactccgcgtttgacaatgtgtggaatccattgaagagcatggcatagcgtgtgggggatttggagcttcaaattgatgaccgactatttttatgaggtacaaagagaaccctatcaatcataggcagaaggactccgcgtttgacaatgtgtggaatccattgaagagcatggcatagcgtgtggggggtttggagcttcaaatttatgaccgactatttttatgaggtacaaagagaaccctagcaatcaaaggcagaaggactccgcgtttgacaatgtgtggaatccattgaagagcatggcatagcgtgtggggggtttggagcttcaaatttatgaccgactatttttatcaggtacaaagagaaccctagcaatcaaaggcagaaggactccgcgtttgacaatgtgtggaatccattgaagagcatggcatagcgtgtggggggtttggagcttcaaattgatgaccgactatttttatgaggtacaaagagaaccctagcaatcaaaggcagaaggactccgcgtttgacaatgtgtggaatccattgaagagcatggcatagcgtgtgggggatttggagcttcaaattgatgaccgactatttttatgaggtacaaagagaaccctagcaatcaaaggcagaaggactccgcgtttgacaatgtgtggaatccattgaagagcatggcatagcgtgtggggggtttggagcttcaaatttatgaccgactatttttatgagggacaaagagaacccctagcaatcaaaagcagaaggactccgccgtttgaccatggggtggaatccatagaaagagcatggcataaccgtgggggggggttttggagctttcaaatatatgaaccgactattttt

SEQ ID NO: 41099 - DNA, 892 bp, Heterodera glycines
  unsure (1)..(892): unsure at all n locations
atataaaagggaaatttttctcaaattaaaaaatgtaatttgagaaaataataaaaattaagggataattggtttaaaattgtaattaactcatgtaatttcaaattgtaatcatataattaattaaaggaacctgtaattaattaaaggtacattgatttcttatttatgatggttttttaagtatcgcccaaatttcattatgatggttttttaagtatcgcccattatgatggtttttaagtatcgacccagcaccgaccgaacgactgacggctccggtggttcagctacagaaaacagcggacagcaggtgaacaaaacaccgaacattgtttgttttaatacgatctcggaagaattaatttctttgaaatttaattttagaaagattcatttttagcatcagctccgccacgagcagcaaattgtcgttgcattagttggagtgttgcacgggcgcggaccgggacgaggtgcgcggggcgggcactctcgtggcaatcactgtgcaaagtttgacgctgatcgagaacagcttgggcaatcttaaatattttaataggtcaattaattaagttttgtgcgccattttccattgcaccacgggcagctgcgaattgtctccgtttttgttgctcccgtttatgttagaaacagtggaaaatttatcatttaattatttcataaaattccgtcgtttagtgaatcattggaataatttttaaacatcacaaaacatttgcaattttccatttatccgatttgtaaaaataaaatgcctttctccatatattttttgctgctcagttattatattatctccaatgaaaaagtncttttgctgaaaagggagaaaagaagtttctttgcaaaattaatcacatttaaa

SEQ ID NO: 41100 - DNA, 686 bp, Heterodera glycines
taaataaatggtgcacaaatattgcaacttatttggtttattcttctcctcatgtgagaaatgggagaaacgcctcccattagggggggggtggggggggggggattttcacacacacacgattagcagaataggcacatggaattgctaataagcaaaagaaaatgcaaagtgcccaaatgccaaaggatttatacgggtttattttgtgccgataacataattctcgtcatgtttctcgaaaagaaaaattcaaattaaaaaaaactgtcctttctatgtacaaaaaagccaattatcccctatcacccgtttgagttggttggtaattagtgtgctaattatgtaattaaatttatgttaaacttcataaaattgtgtcaaaatcttctatgaacccgaaaatattttttaaataggtatgtagaatatattttggttttccaaaacgattaatacataaaaatgtattcatttttcgaaagatttttaatatatcttttttaaatagagaatttaaaattaattattggcatgatattcatttgaaaattttaaccttcaggcaaaaacacaaatgttttactcaattaattaattgaaaggggcaatgtcccgatggcattttcaattgtatgtgtgtaagggtcacgctataaatccctgtaattttttaatatgaaaat

SEQ ID NO: 41101 - DNA, 1160 bp, Heterodera glycines
tgcaggtcgtaccaaaaaagataatttataaattcccatgtaaattctcccccaggttcttagggaaatatttttcatttattatttacccttttgttaattctaaaactttcatttaggctatccctaatctttgaaaaagggcatttgttctgatcctaatactggcattttgcctacatttgccatttaaaatgttgtttaattttcattttgactcactgaccccctgggcttaatcccttccatccgctttatctccccattttctattttcgcttttcccccggccccgttccatttttcgtcatttcacatcatcgcatctcatcatcaagctttctcgctttttctagtaaacttcctccttcctcccccctctgttcatttcttccaacccaaaatggcatttcctcccctccccgccgggcgcggcattttctgcctcaggcactttcgcccgctttggcattgccgcggggtattttttatgctttatccccacgctcgcccacccaccacaaacattcccacaaacagcagcaacaggaggacatggaatgtcgtcatttttgttttcccacttttttctcttgtcgtctttccccctactatcttttcccctatttcttttcttttccctttgtcgccccctcattctctctttcttttcacacttcttttctgcctctctcattatcatttaatcttgtttatctcttctttacccacccttttgtttccgcatcagctgttcccattctggcacactttctcttttctttctccctcatttttcagtttatctcttacccgtctctctctctctctctctatctgtctttctctttccctctctcctctcttcctttctctcgttatctttcaccccctactcgtcactctctccgctgcttttcctccgttcccccgcttttaagggatggcatttccgtcccagcagtggcacggcaactgctgctgttccatttcacttaatgagttcattcattcctatttttgtcctccatttttcaatgccatccgccctttccctttacatttatttattcttcgtctatttttttctaatcccgcaaaaatgggtgtgagaaatttcccatgttttgccggaacaaaatggggataaatggagcggg

SEQ ID NO: 41102 - DNA, 1080 bp, Heterodera glycines
aaaaaaaataaaaataggtttagaggagcccatgatcagctgaatcggatgccaagtccccgccgttgctgtacgcctaaacagttggtgagcaatgccggaaaattgcttaaaaaagaaaaccaaaaaaactcatcaattgttagctcccgttgacaaaccgaagggtacattggggcaatggatgttgggctcccgtatcagttattaaaattgttgtttttcaaaaaggatactaaaactgggataacccattcagagacaagtcaaaaaaaataataataggcttggactaccatactaattagaatttttagaatgtgtctgttaaatgcaaaactgttgtgaaaaattgttataactccattcagagaagagatagaaaaaaaaaataaaaataggtttagagagcccatgaacagctgaatcggatgcaagtgccgccgttgctgtacgcctaacagttggtgagcaatgacggaaaattgcttaaaaaagaaaccaaacaaactcatcaattgtttgctcccgttgacaaaccgaagggtacattggggcaatggatgttgggctaccgtatcagttattaaaattgatgtttttcaaaaaggatactaaaactgggataacccattcagagactagtcaaaaaaaaaaataataggcttggactaccatactaattagaatttttagaatgtgtctgttaaatgcaaaactgttgtgaaaaattgttataactccattcagagaagagatagaaaaaaaaataaaaataggtttagagagcccgtgaacagctgcatcggatgcaagtgccgccgttgctgtacgcctaacagttggtgagcaatgacggaaaattgcttaaaaaagaaaccaaacaaactcatcaattgttagctcccgttgacaaaccgaagggtacattggggcaatggatgttgggctaccgtatcagttattaaaattgttgtttttcaaaaaggatactaaaactgggataacccattcagagactagtcaaaaaaaaatacggggggagactaccatactaattagaatttatagaatgtgtct

SEQ ID NO: 41103 - DNA, 823 bp, Heterodera glycines
ttcagtttcgcaaatttcgcttttcgcatttcgctttcttcttggcatttggcccatccctgctgttgacccctcatctatttttgcataaatacccctcctctttcctcctttagaaccaaatggaaaataattttcttcaaatttgcatttatacaataagatcgattcaaatagcaaaataacaatggcacttctttgcagtgagtccttcgttgtgtggtgtttttgcatcaaaatggcattagaaacacctctgaaagtgttcaaattaaatcaatttgtatgtttttcgtatttattaatttgagcccccgcccccttcaaagtttggatttaacgtgtcttacgtatggctggatggttgtgtggcgttggcagtccgatgacattgtccaattcatcagtccgggtagagccacggcagccgccctcctgcagtgatttcgcacgtacgcagcgccaatacgtcactgttcgatccgcgtttgtgcaactgcggtagtaaacgtgcccttggaagtgcattttccgtccgccatgggtggtggggacgaagtgtggatgatgtacgccaatcattattaggacagaaagctaaagtaaagaaaaaaatctcgaaatacaacaaaatttggtactttttcactttacgccacataaaaaaatatttttatttttctgggattttcggggtcgctgatcacgaatgtggcattcatttcgaactatttcgaaacccaggaccgaattcgaacaaaaaatctaaagtttaatttttcgaattttcgtctaaaatggtttaaatgatctttattgcatg

SEQ ID NO: 41104 - DNA, 919 bp, Heterodera glycines
  unsure (1)..(919): unsure at all n locations
ttgatttttaaaattcaaaaatcccatgtcaggagattggacncaggccatgacaagcctggacctttcctggacctggattttcctgaatttttgtcaccaggtccaacattgaatccaggcccaggcttttttttcaagatgtgagctctagattccattccaaaaccatgcacatcaccttcatcggtggtgactggtgctgtgtgtcgatggacagctgggccgaaggcagtttccggttggtgacaagctcacgcgctctgctgatctcctccagtgtacggcttggaaatgtggacggaggaacagatgaagcggatgatgaagcggcggcagcggcggtggctgacaaatgaagcaattgacgatgatgaagttgatgatgatgattatgattgttgttattattatatgatgagacagagtgatgatgatgatgatgctgctgcggtggcggaaacattcgcggcggacgcaaatgaacggacattggggaaagaagcgcggatgatgccggaggcggtgatgagaacaaatggtgggcaaccgcaggcaaaccgagcggattttgaaacatcagtgccaacgctgtgaccgcttggagctggtcctgcgcataattggaacacacagttcagcttaattgtatccgcatatcggtggggggaggtcagttagttccgtctgacaaattaaaagaaaaaaccccataccatttttcgactatttcccatgaaatgatcggactaaaatctttagcacacttaaaatttctgaaaaaaaaaaaattgaaaatcagtaggtaacaatgcaaaagcgtcgactagaaaaaaaagtacgcatttttattagggttcctccccgagcctcggggagcaaaatgtcggggaacggggaggaaattccccgaaagaat

SEQ ID NO: 41105 - DNA, 1001 bp, Heterodera glycines
  unsure (1)..(1001): unsure at all n locations
ttatcaattttttacagtttattttttaattatttctcccacccggggggtttaattgaaatttattaagaaaattttaccttttgaaaaaattttcagaggaaaaatccgaaattatctatttatgtgtaaaaaatatgtcaacaattttgggtgttctcaatcagaaaaacatcgaagcctagcacaagagctttaaagttaactaaactaaaaacagtttttcattcgtattaggcactcactgttaagtgaacccaaaaattagagaacataaaatgtattaataaataccatttacctttttaattttcttaaaattcactaatatttcgactttaactttttatttttaatttaaaaaaatccctaagaaaaaacagaaaaaaacaaagtttcaaaacttttcgatgtttaatttgaagttattaattcaactgttttctcatttgagcttttctcaaggcccccaatttcttctggcagctttcccacgggattttccgcgtccgcgcgttggattgcctcgcgcaaacgcttcgcgcccaattcgggcaaaacgtctccgacccatgcgcccatggcagcctcggaacccgccacgaattttagtttgtccaccgcccgacggggcgacgtaatttggcacattaggcgaatttcatcacgacgaacgtgaacaggggcctgaatttacaaggagaagcgcatttgtaaaatcgaaaccgaataatttgcattactttctctctctctcccgccccacctctctttctctcgcctctgctctccctctttcccttcccctctctctctctcctgctctctctctccccctctcctcctctccctctctctctgtggcacctggtgccacgcggctatgtacggcgtcggagtgccgtcctcataaagcgcgtcaatgccgcgcaacactcgcagataaaaggtggncaactcgtcccgctctgtgtccgatggtgcgggccaatcaacgatgt

SEQ ID NO: 41106 - DNA, 963 bp, Heterodera glycines
gctcggcttagatcacatgcgatttccgcccctctgataattttagcgttcataatgggatgtataaactcgattgtagaaggaattggatgcgctaaaattgtttgagaagctttttgagcgtaattacgatttttacttacaccattttttgctaggcttagatcacatgcgattttcggcactctgataattttagcgttcataatgggatgtataaaggcgattgttgaaggaattggatgcgctaaaattggttgagaagctttttgagcgtagttacgatttttacttacaccatttttttctaggcttagatcacatgcgattttcggcactctgataattttagcgctcataatgggatgtataaaggcgattgtagaaggaattggaagcgctaaaattgtttgaggagctttttgagcgtaattacgatttttacttacaccattttttgctaggcttagatcacatgcgattttcggcactctgataattttagcgttcataatgggatgtataaaggcgattgtagaaggaattggatgcgctaaaattgtttgagaagctttttgagcgtaattacgatttttacttacaccattttttgctaggcttagatcacatgcgattttcggcactctgataattttagcgctcataatgggatgtataaaggcgattgtagaaggaattggaagcgctaaaattgtttgagaagctttttgagcgtaattacgatttttacttacaccattttttgctaggcttagatcacatgcgattttcggcactctgataattttagcgttcataatgggatgtataaaggcgattgtagaaggaattggatgcgctaaaattgtttgagaagctttttgagcgtaattacgatttttacttacaccattttttgctaggcttagatcacatgcgattttcggcactctgataatttta

SEQ ID NO: 41107 - DNA, 815 bp, Heterodera glycines
aatattcattggataaatatgaggcatactttggcattgtgcattatctgaaaaagaattggcattgtgacaaaataacagaggaatttgaagaataggaaaggacagaatgccacaaatatcgcaaatatttgtacattttgtacaaatatttgtatagagaatacatcggaattcccacaatgaaaccaaaatttgtatataaaaaacaaaatgaaattgaaggaccactaattattgcggtgaattgtctaatcaaaatttcgaaattttattttaaatcatcttcgaatgaatattatgaagatcaattaaaaagaagtattcgaaggttagttgatccaaaactgttgaatgaagagcgattgaattatgaatttcaattaaaaaacgaatcaaaagtgccaaataatgaacaaaaaatgctaattaatgaaatgattttgcaattaataattgatccatcaaatgaatgccaatcaaataaaagtttagacggaataattcatataatttattgtatttccataatacttaacctgtgaaataattacaattaaacttaaagtcaagaaacaaatttaacaaaaaaaaatgtattagcaaaaaaacaaaaaaaaatagaattattagaattttattaaatatttaatgaaaaatttcagaaaaaacaaaaaatttttataaatttaatcgcattaggtcaattcattgtaaaaatatgctttaattaacaattttaatctaaacatggagacattaatagaaaatttacaacaaaaaaaaactaaaaatttttatatatttttcttaat

SEQ ID NO: 41108 - DNA, 1448 bp, Heterodera glycines
  unsure (1)..(1448): unsure at all n locations
ttatttttgcgtctcctttctcccagagcagcagatcaaacagnacagnnaggacagaccccttgtgggaacaacgctacgaaacgnacaaaaacaatgcggnaagaaatttctactttttaaaagtcattgcacataatgcatttttgaccgacagacaatcgaccaggacaaaaggagcaacattgagcatttgtacaagcaaatggggcgcatggaattggacttggaccaaatggtcaagggaaggcccaatttggtggaggaggaggctgcgtatgggcagcgaaagcgcgagatcactgcctccatcgccaacatgttcgagcagtacatcgactcattggtgagtggattcaaaataaataacagggctcttggaccggtttcttctggtattctcaaaacggcatattttcagtcgcaagaaatactaaataaacaattctgaatcagaaatacagattttttaaacttttttgaatttatcgtttcgaactctacaattgtattaaactgaatataaacgagtatcataaactgaaactaattgtaaaatttcaaaattaagaatcggttgcgccctttgagcgtgaaatgtgtgctggcggatgacgaattgaaaaggctgaaacgacgacggcgcgtgatgggcatggacgacgacgacatcggcgaacagctgaacgctgttaaggtgggaacattcaaataataattattccgaacattgggcaaaggatgaaaggaacttttggctctattgcagttcaaacgaacaaaaaataaatttgacaactttaatacgtcataactttttctagaaatatccgaattaaaccttggtctcattcgatagtctcaatcaagggcgtatccangggggggggggggggaaagaaatttaattatttacctgaatgtgtcgcgaactgcctcaccatattctgccttctcgccgtacaaatgcaccagaccaaggcgtttgaaattcctgtacaggctttgcccgtattggaacatgcagtacttgatcagtgccgtggggaaaaccgcgcgaacggacgccatttcgggtttttcaaagtcacaaagactaacaataaaatttttcaatttattccttttccgtaaatcgaagagttaacctttgcctgagacctctggtgaggtgcgttcacggacaaaattctgtgcttcttcgtagcagcgtcgctgttttccaggcaggagacaccacatgctgatgcacatcctctgatgcactgaagcaccaatgacgaagcactgctcccacatcgctggagcacatttgaaagttccatcgaggtgacacgtgccacattgatgcaaaatgtccagagtctaaaggaatgacaataacaaacagaattttataggctaaaaatgtacctgaacactgccgaaaaataaagacaacgtccttt

SEQ ID NO: 41109 - DNA, 1167 bp, Heterodera glycines
  unsure (1)..(1167): unsure at all n locations
ttaccgtagttcatggacatccaaaaaattgtcttctttatggtgcgaaggaaaaagcncagcacccanncagttggtgaattgngggataaagcggtgaaatctgaattttataatgtggtttatctatattttttgagatagataaggacttttatccctgaattaaattgtttggggcattacncaacctntatgattataaattctctaattaccgctttaactgccgaaatgccatctttatatggcacaaaatattcactttggatttcatttccatcattgccggtcatgccaatgcggtaaaccaacaggccataataccacggttgaactttgttgagttcaatgctaaataaaaaattgttgaataattcacgaattgaaacgcattaattaggcatattaacttacaaaattggactaattagagtattcgaatgttgacggttggcaccatacagagaagaaagatttctcaggttctcatcttgggttgaattagccacaacagtgaagcttaaatgcatataaatttttatttgtttaagaataaattatttatttaagttttagtaattttgggccaatgttttttaatggacaaaaaaaaaatggcgagataaaagatggatcaaaaaaccacgaaatttggattaaaaatccgaaaaatgaccaaatgatcatgacaagtttagcaaaaccatggcaaaaaaattaaaattctaataatgacattttgcctacatcactgatgtccaaactctggcattttgtagtgtgttcctgaacgtaacagtgtaacctctgttttggaggtcgtcaaatttttcataaacactttgttctggcattctgaaagcactgccatttttaaaatgcaaacaaataaaaattcaactccgtgaacacatagttgactacgtcgaagctgggcaccaaattcaattcaacctaagcaaacaattaatgataaaataaaaacaaatattttatttaaatatttattaaggattaaattaatttgtaatttttaaagaaaagtatgacttaaatgattcaaaaaaccaggggtttcaatttgttttttgagtaacacccattagagctgctcgagagttgaaattttcatttactncagtaacgagaccgaagaccattgac

SEQ ID NO: 41110 - DNA, 899 bp, Heterodera glycines
aaaaggcaatattatgaataaataaaagataaaaaggaaaaaattacgaatattcaaatattttattatcttttgcccatcgcattttctcccatttttggtcatcgttttgccgtaaattttttactttttggcctataaatatgtgcacaattcagtcactgcaatagaactgaccatcatttgttctttctttttttctaaattcattaaataaattaaaactgaaaattttagatttaaaattaaaatgtcatctttcacaactttttcatctgcggacgaattttctcctctccaacgtaaatactttgcaatcctaaagaatggggatccctattttaacttctttttttcggctcaaaaccagtttattgggttttcaagtgatgacattttaaaaattagtaagtgcaacaaaggatgaacatagagagagcggatttctatgcacaaaaaatgataattaagcacttaattcagcattcaaaaatgctaaataagataggaatgaatgaaaaacttctttggctttttaacaatttttacaaaatgatcataatttcattttctgctttttggattaaaaacaaaaatttcttaaacaaatcttaaatatgagtgttcagaagcccagaaaagccccgagattatttttttttatattagaaaatgtttttacaaaaaaattagggaaaaaccgaaaattttgactttatttgaaatttcatgttataactgcagcaacaacagcagtcaaaaggtgggaacaatttaacgaaaaataaatatttttgtctattatttgataattttcccaatgaatattttaaaaacatttcattataacaaatcaaaatggatttgattttctgatatattataattacattttaatt

SEQ ID NO: 41111 - DNA, 1093 bp, Heterodera glycines
  unsure (1)..(1093): unsure at all n locations
ctctagagtcaacacannagcagaattgggatttggaaatttaaatcgcgctccccctgggtttaatttttatatgtcccacgcattttcaggcataaacttttcacataaagttgaaaaattttccaacggcaccagacacaattccaacagttcaacaaaagcaaacaaagtattaggcaaacaacaatgatattcctgcctagttttaaactatttaaattttttgttgaaaatatcaaaaaaggaagcaattttactgacaaattctttccagaaatttacttggtgaggaaaaataatgttttgagttggtaataaaataaaaccgctcaacaaaaattatgtgaacaatcagtcgtgaaccagaatgtaaattcaggagttgtacattctcacgccgaaacactattcgcaaaatttggctgtgactacgctccaatttgtgatcagccagctcagtaaacacaagcagaattgatttggaaatttaaatcgcgcataataggtgtttaatttttatatgtcccacgcattttcaggaaaaagttttcacataaagttgaaaaattttccaacggcaccagacacaattccaacagttcaacaaaagcaaaaaagtattaggcaaacaacaatgatattcctgcctagttttaaactatttaaattttttgttgaaaatatcaaaaaaggaagcaattttactgacaattctttccagaaatttacttggtgaggaaaaataatgttttgacttggtaataaaataaaaccgctcaacaaaaattatgtgaagaatcagtcgtgaaccagaatgtaaattcaggagttgtacattctcacgccgaaacactattcgcaaaatttggctgtgactacgctccaatttgtgatcagccagctcagtaacatcccctctcatttagatttgaatgctcagtctttaaggtccatcactccaaatcttgcccaaaatcctgacatccgcaacaggggactcactgacagatcaacccctccccttatcaatcaaatcataatttgagaaaaacagcaggatgattcccatgtctgggctgatgaatcctct

SEQ ID NO: 41112 - DNA, 1188 bp, Heterodera glycines
atacctattttagcttgaaagattagtttttgaaaaaccttagttttgccatgacaaagattaggcatatggtacggtatttgaatttttgtagattaatggcaatcaaagaatacagaaccttaattcacaatactcaaaaaaaaaaaaaatcaaaaatagcagatttcacagaaattttttaatttcaagtcgtgactgggacaatccgacagtggacaatccgacagtaaatttctattttaaaaatattttcaagacattagatgcattttactggccaaatgcattttgaggtgtccaatcaaaagtaaacttagttatgccataagtatggatgagatttacagtaactaaaaccgccaaaatcgttagtttttaggttctaaaaaactataaattgcatccctagtcatagaaatagagggtgatcatggacgccaaaatgctctattggagcgtaaaatgcaatggaaaatgccaataaaatacatcagactaaccatctgcaattcggcttaaagcttcaaagctatactcgaacccgtcggccaataaaatttctctgcgctgagttgtttcggaaacaaagaagattttttcatttggttgcagattagcagggggtggtgggatttgtggattgggttggactgcttggatttgtgggacgggttcatgaatttctccttcttctgaggacgacgaatccatttggacgaaaatgaatgaatgatttgaagaggtaaacggaatggtcaagactttggcaaacatttttatcagcaaaaatgctctcatttctcatcactttggttttatgggtcactccacatttacttttgcatatttatttatttatggttgtatggatcactatcattaattattttttattttattgtacttttgttaccagcataccaaactaactttttttaatttggtaacaaatttaagctaaattgatttgattgagatatttttaggaaataatccgttctaatgacttgaaaatattttttaaaatagaaatttactgtcggattggattgtccactgtcggattgtccacttctgtcggattgtcctcactgtcggattgtccaactgtcggattgtccaactgtcggattgtccaactgttggattgtccaactgtcggattgtccactgtcggattgtcca

SEQ ID NO: 41113 - DNA, 1010 bp, Heterodera glycines
aatatccctatagattaattttattcgtttaccactactacgcagaataaaattgtcaatcttttcggctttcacttcagtccttttgtctgttttcgttagagtcttcatcttttcatcaaatttggttttgtactccgaatctttatgcttttcacttttcagatgacaaattaatgatgatatgctcccgtcggaaagcttgaattggtattttggctgttttttggctttgcattctgccagtttgtcgttttccttgctcttctcaaacaacccaattttccaaatagggtgaaatggcgccattaattatgaattattaaaatcttaactaaattggaagaaagaatatcaaaaatttattcctcatgagaaagttgacaagtaaatattaatctgactatttaattttggcaaaatgttttgccaaaaattcaaaaaattccaattcttaccagtgcatttttactctcgtttttttggtaaaatttccgggatcggggagcgggattgggagttcaaaattttccgggacgggagtcccgaacgggaatcccgtaaaaatcccgatcccgtaaaaaatcccgttcaccgaaaaaagcgggagtcgggagcgggaatcccgtaaaatcccgcgggagtcccgatcccgccgggctctagtttatgtatatgattgacaaacaaaagaaatttataaaaagtaattaatttgtgggtgaaaacagctaaccagactaaaccgaccctctgactaaaacggccagactaaaccagggctcggatcgaaaaattttcaaaatcagaacatcgggtccaaaaaatcagattttggggtcgaaaatcagaacattttgcaaaattgcttcaaatcagttatttttacaatttttcgatcaaaaatgtatctaatattatatttttcgtctcccattatcgattttaacaattttggggagaaaattagcaaatcatcaattttagcgcattcggaatcaaaaaatcag

SEQ ID NO: 41114 - DNA, 809 bp, Heterodera glycines
ttgattgggaatgcaaatagatgaacaaattatccgtttccatgcaaataatattttaaaaattcattgaaaaaactcacagaatcctcctgctgttcgttcatctcattgccttctgtttcttcgtcgtttctgcgcattttgagccaaattttgatgattttggcagaaaaaaaggacacgtaaatggtggcgatgacggcgagcgacagaccaaaattggcattgtgaacggaaaatgcctaaaaagggaggcaaatgccattaatccatttacgtacataaaaagccaaattattttcgaaatttagagccataatttaaagaaatttccccactcgggatgattctctcagggactcgattttgatgactcattctttcctcactcatctcttttcctgacttccaattcccgacttagcattaaccacttaattatttattctctccatttataaaattagtacaatttacagtttagttttttctaagcttttttcatttatggattccctctgttggtaagaagcacatccaaaaaggctaaattcgttaggaaatttttggattttttaaaattaccaccccatccctccatctacaaagggtaggaaaatgatgccacacttttggcagcagatggaaggtggcggagccggacaaagaaccaagtgcaaaactgaacatgaagtcggaggaccgatggcacaaacacttcttcagagcggaaataagcagtgcgagcactgaaaatgtttagaatacatagaaagactaatgatcggggcagtcaaaaatatgcacga

SEQ ID NO: 41115 - DNA, 934 bp, Heterodera glycines
  unsure (1)..(934): unsure at all n locations
aactgaaaaaaaaattgtatagaaaatttttttcacattcttaacagctaattgtaagtcgattcatttttttcctttgctattaggttactgtaaaattaggccccgactaaaattcgctaaaaattaactgttttttttcagattagtcaattttttggtggcggtgagaggagacaaaaaaaaacgtttatgaaaaacaaaattggtatgagatggaattgttgagtaaactcatcattctttctcaccttcaatgacccctctccatcgtccaagccaaacttcgccaaaattgccctcgcccaacttccggtccaacagcaattcatctcgcggaatttcccaatttttggccgtgtcatagctcagatcgggccgaaccggagcaatttttggagccggataagtgagatgataacaaaggccacccgattcttctattgaaaaataaattaatatataaataatcaatcaaaattttattttagattttctattacaaaaaaaatctctcatatttttttataagaaaatttcaaaaaattattttaagccatcagttattgagattacaaataacttatattattacgtttgcgttcaaatttgaaactaactcgaataatattcgatcaaatcccggacggttccgaacgttttccgggcggtgataaagaaacccgagccgttgtcaagcggtcgtattttgtagtgttttacctgtaaagagagaaattaatgaggacggacggataaaggataaatctgattatgtgagatcagaaataaattcattaaagtatttaataaacgggggatttgcattatgaccgcataattgtcggttgtatttccatataatcaaaatttttggcttanataaatgaaataaaaagactaattctgcgcttgtggacgacggtcactactt

SEQ ID NO: 41116 - DNA, 979 bp, Heterodera glycines
tattactagactaatatattggaaaaaatagcgaacactcccaccctagaataatttttaaaatattttttcacaaaaaaattaaataacaatttttttttattaaaatttaaatttaaacaataaaaaaaatctaagtttgaggtgtttcaatggtttgtttagaagaagctttggaaaaaaagtcttccaagctcagcattttggatgaatactaattattttgttttgtatttttttcgaaattattatttttaaacaaattttaattattgcggtaaacttccaatttgatgatgatgtttgtccttgtgcttgcttacttattcgacaataaaaaaacttcaaaatatgacaaatttgagcataaatttttataacatgcacacatcgcccccatcaccaccacactgaaaaactcgtcaaccgatggccctgaaaatataaacatttaatcccatccgcgcggcaaccacagccatagccaacactgacgtggctgtggtggctgtgcggatcgccggagacttaatccgggcgcattttcaaaattcaccaccaccacttttagtacacattttaaactgatgaatggggcttcagccaaatcattttgagcgatttgttaatagccagccaccaaccatttctaattccattgtcagcaaaaaaaatttttcacttttcttaataggggtggctgttgaatgctagaaatcttttgccgattatacaatatggcatttcaaaattttgccgaggattgggtttgagtcatggtcacctatcacttgggctgatcgtgaatggctttgaatcaaaaacgagaatctcgcaaaaaacttatggctatacttggctttttgttaagctttttgtcgagtgcttatcatttggtcctatcatttggcgatcaatggcttgattattcaattgccaaatgaagcacaatttttgatttactattattgttttttat

SEQ ID NO: 41117 - DNA, 1335 bp, Heterodera glycines
  unsure (1)..(1335): unsure at all n locations
ggggggggggtgggggagaggaggtggcgatatctcgctcgctccttctcttttcccctccttcccccggtctcttttattccttcgttctnttcttccactctgttcgacctgcacaaatgtttctcgttcttcacgcagccgtctgatctcctcgtcctgccttttcagttggttcgtacacacgtggttctgcgtctccatctccatcaccttctgccgcatttccttcaactccgccattgtgtccgcctctcgaattttcagtccgatgaattggtcctccaactctctttgactccatccctctaaagcttccgctgtcccaccgttttcggcactcgccaatgaattggcactgctcccaaccgcgcccatcaaagtggcggtcagtttggcaattcgcgctcgcgcactctgtgccgatgggttttggcactgttgcgcatgcgtgttctgctggtttgttgtttgctgtgtcggcgattggcatggctcttgcggtggctcctcctccatggaagaggaaggcggcgactgagcaatgtccaaagagacggacggagaagcggagagttgggcagcagtgactccgcggaggttcatgaacctaagcaaacagaagttgggcacaatgtgaagaccaacacacctcgtccagtgctgctcaacttcggccaacctttggcgcatttccttcaacgacagcgacgcttccgcttctctcattttcacttggattagctcctcctgaatcgccgcaacgcccccatccggcggatattccttaagccttttgttggccgattcgagctcttggactcggttctttaactctcgcgcagtgttctccaaatcagccttgaaatgcgaggttcccatattttttcaggtccaaaaaatgtttgcctttttggtgtgggactcgatcagttcctgctgcaattgatggatatgttcaatcatcgaagtatcatcaatttgtgctccttggtctatctgaatggcaaatgatcattaagatgtccctttttaccatttaaatttgagttcaagccgtaggcataaaattttttttgtagccgttgttcgcaaaaaaaaatttcaaaaaataggggaaatgggggtccagcgtttccgatagtcgccgccgggagtaattttttgaaaattttaatacattgttaagtaaaattaaatctttaaaatgccattttttcttccgacagactttgtccttagtccttttgctgctcagttctctgatcgtctcatatgcgtcctccaaccgtcgataaggtccgaatttatgtctcgaagtgtgctcaattcatg

SEQ ID NO: 41118 - DNA, 898 bp, Heterodera glycines
gtggaatcatgcgcacccgtccgatctggcaagttaagcaacgattgctgactagccaaaaggttcggtgccgtgatgaaacgaaccagcactgcttaccccgcggcacccggcacggtcccccgaaggaatggatttaattaaattctctccttcggggatttttttccattaggtcgtccgttagcgttcgattgctctagtcaatttttcaaaatttttgttgaaatatttgtcgtgctctgaagggcgtgggagggggggggcgaaggcccaccacgaggcagcgaagaggccgagtgagtaccttcggtgcaggaaaattattaaattttaaaaattttttaattgctttttaaatatgccaaaaaatgtaggcttaacttttttagtgaaaattcgatcactcatattttttgctaattgagcagaagcgtaccaaactttgcagggatactccccggtaaaggactaacttacactgaaatgagcgccgagctagctggctcaaaaaaattttcgaaaatctgagtctttcgtttttatttattttttgcaaaattaattcttaaatattttttcagaaagggttctgaaacgcaccaaattttatttacatgttagtttaggcactctgatgctttttctatcaaaaagggagatgaataaaatttttaaaaatttttaattcctttttaaacaggccaaaaagtttaggcttaacttttttttcagaaactgatcagaagcgcaccaaactttgcagggatactgaaaggaagggaaataacctgttttatcacattagcttgtcacccgggggttataaaaaattttcaaaattctgagtctcctattattttatttatttttcaaaattttgaagggcgggggggag

SEQ ID NO: 41119 - DNA, 1446 bp, Heterodera glycines
attagtccctaagcatatcggaagttggaattccgtcccaccgcggttggtttgaaattttttaaaaattctaaaattttcttagtttcaaaatagtaaaagttaaatttactttaaatttttaagttttcccaaattcctacctttcggagcttttaacaaactttcataaagaaatttttgccctattttgaaacaattgcaaataaaaatgtattaatgagttttatactttttacactcttaattgaggacaaattaaaaaactatattaattttagaactttttaaagcattttcttaaatgtccaaaattatttccaaaatttttcaatttttttgcacatattttcatcttttttataaatttatcattttcattttaataatttaattttaaaaaataagcatatgatttttaattatgtttttattactttttttgtttctcatcaatttttattttaatcacattttcaaatgcaattccatcggtgcgttaatactgaaaaaataataagttaatatttattgcgtttttattttatttgataatttaattaaaacagaaaaacaaaatgatgtttaattctatttctaaaattccttttattatttttattgctaatcattttttaaatccattttcaaatgctattccattggtgagttaattaattagagaaattaaattaataatccatttgaattaattagggcgaggacaatatgctaattgcaattatgaaggcgatcagcaaattcaaatcagtgaatattcattgcaaaaatatgaggcaaactttggcattgtgttttttatgttcgaaaatggaagttacaaaatttgtgagaaatttgatgctcacttttcggaatttgtcaaaggatttgcgataaattttgacaaatttttaaagatatctaaagaatattcaaattatttatacgatttaaagagaaaagtatggtgatgacctcatgagcacttttgggttattgaaattgagaaaatgatgaagcagatcttggcgttatgcattgatgcgagagaattgacactgtaaaaaaattggaacggaatttaaagaaaaatgccaaaaatattgaaaatatttggatgttttatatgaatactaattcagcttgtatgttgaaggtttgtatgatttttggattaatttaaatttttcatttattaaataataatgattattagggctcggaaaaatatggccttaaaacatggaccaaaaatcgccaaatatggacataaatttttccaaattgagagtgtaatttttcaaaatttcttcaaatgcgctaatgtaaagtaaaactttcaaaatggctaaatatggtattaaaaatcattttagaagaaaaaaacacgataaagctaaaatttactaatttttagcgaaaaatcaacccgaaaagcgaaat

SEQ ID NO: 41120 - DNA, 952 bp, Heterodera glycines
  unsure (1)..(952): unsure at all n locations
tttaagagattgccttgtagaaaatgaccagtcaaactgtccgagtgacgtgtgaaagtccggaaaaattgcacaaaatgcaaagggcgaagaacggaattcagacgaaaatgacaaaaatgaaattatttggaagggattacaggggaattgatttggagaaataacgaaaaatggggaaatgtacgccaaattgaaatgggtgggggagggaatgccaaaatgaatgagggggggggggcatttgccgaaatgaccgctgtcacagtcactttttacgatcacatttctgctgctaatgttgcctttctgctcccatttaaaagccgtgtcgccctccgtttgcccattttccgtgccattctctctctcccgatgccctgctcgtcctcctcctcctcttccgccgcttcgttttcctccgttttccccgtccctttccccgcttcccatccatggaatcctttcgcttctgccgccccttttgtcatcgcaattggcagtggttctgtgtgcgtcaaaaatggcgaatgtcgccagtacaaccaactgaaacgacaccaccacgagtcagcaccggtcgcagcagaagtgccatcagtcgacgagggaatgaacgcgacggacaaaaggagaaagaaacgcggaccgtcggcactcgcaactctttccgcccttttgctgcttggcgtggcgctaattgtcagtttggcattcgtcgcgtggacaatccatcggatggtaaacgaaaagaaaaggccaaacgatgccagggaaagtgggaaaattgaattgcagaacgaacagcacaaagaatgtgcggaagcgatganaacacaagcggaacgaatcgaagtgttggaaagtgcggtgacaaagcaaaaacggacggaggaaaaggaaacggaagagccaaatgacaatgggaaagaaagccatggtaagggaggga

SEQ ID NO: 41121 - DNA, 1244 bp, Heterodera glycines
ggcggatttgcttttatattcggttttttagggggggggggcgggtccgctataatttttaaatcgaggtttatcaagttttgccatcctacttatacactttcccccccccccccccccctggccagacagctggaatcggtggtatcccgaccgaatcccggtcctgataatcccgaagaatttcgaaaagcgacccggacagataataactgggatcccgatcgaatcccgataccgatctatcccgtagatttttgaaaagcaaccgggacagatacccgggatcccgaccgaatcccgatcaatcccaaatattttttcgggatcacacgggatttgctttgaaactcattttttttctataaaggccagtttttgggattttgagccatatggcgacgaccttttaccgcttttggcgatccttttccaagaacatttggggaacaacacatgggagtccggcagcgccgataggccccgtctggaaaattttagtaatttttaatgcaatctgattttgcccaaaaatttataagaaaaaattttcaaaaaaattttacttataatttttgaaaaatttaaaaaaaatttcgcggggggggggacgacctgctctgtcgtgcagcatgagaactcgaaatgatctgcacaacatgggaccgtgcacatgtggcgacattgccggccttcttttgcgtcaattgccaatccgcatttcatgcaaagcagttcattaaatcttatgccaaaaggaaagtttatcacatgttaaaacccttgaatgtagacttcgttttatttattgttcaccatttgtcactaataaactcattaaccatgaatacttgatcaacgcatttttgatcagtgacactattggcatatacataccaggtttccgatacattcatcaagttgttgatccgtacaagtcgaagattattattccatttttggcattccagtgaactatttctgaatatttttaaacatttatttattatattattctatgcattttattattttcataaacacgaattaaatatgttaggataattatccgacctttcggggtgagaaaaacgaattgttaatttattaaactaagtgaaagacttttaagtcaatgtgatcagattactgaaatgtttcatctttgtccgaccaacttttctttttgacttcattttattaacgaaaaaattctttctttaatttcaaatttaaataataaa

SEQ ID NO: 41122 - DNA, 957 bp, Heterodera glycines
tgccaaccaatttaatttaaaggtcatataaattatctttacgctctttaattagcgcgatcggtccattgtatccgggacatcgttataaggtaataccaagttaattcaaatcattttattcaaaaaatgtaaatggcttttttgaatcttcccactttaaaaaatttttcttttttttcgtctattaccctaattttgttcatttttaggtggtgatcgaggcacgggacaccgatgggcttgttggccatgctgttgtgttggtccaagcattggccgcagaccatctgccatcaaaagctgctttttcctccccctcctcttccgctgctcgcgcttcgctgttcggcagtggccaagttccggtcattgctgatcatcagccatttccgctttcatcgtccgcatttgtgccaccattagcaaaagccgtcggcgtcggcatacccccggcgtcaccaccgtcggcacaaatgtcctcctccctttctcaaaatgtgccaccagctgcgggttcgcagcagatgatgtcatcggcactgattgcgtcctcggccggtgggtattggcagccgattagcaacggcggcaacaacaaagcaaattccaaccaaaagccgaacccattttggcgagttgatccaacaacaacattagcaacaccagcagcagcagtgaagttgaatccgatgcttataccattcgcaactaccacaactgccgtaccaccgccgccaaatcagttcacggtgagtgttcagtgaaattcgggcttaacccggattggcaccgatcgaaaaagacagtctctcgataagaataaggttcaagaaaagtctgcaatttttgggcattgaattcgaaacttggccatgtttcggacagtatgtcaacagatgaagcgatgatgtaaatgctttgcccctcgtatcttcgttttttatagctttttac

SEQ ID NO: 41123 - DNA, 808 bp, Heterodera glycines
ggaaagttgcatagcactttgaagagagagttaaatcccagcgccaaaccgatgaggtggaaacggacagagctggcgtatctgggtctgcattcacccgtttgttgctgtacgttggcctgctagcctccagactggggtttgctgtccttctgttcagtggcgaatggggcatttgcaggcggagtgcgctgagatgctcggagtagctgcgtgagctcggtcttgaggccagcctttcggggtctggtacccggatcgggggagtgctgtttactctgggtgaattgtgcaatggtttcgggtccgtgttgactcgagctgggggtcggtggcggtcgcgtgcgacacgtaccagcaaccagttcggtccagctcgggctctcagttgtgcgttctcggtgtaaaagccggtcatctgttcgacccgtcttgaaacacggaccaaggagtttagcgtatgcgcaagtcattgggtgttcaaaacccaaaggcgcaatgaaagtgaaggcttcttacggagctgatgtgtgatccctggcactgcggtgttggggcgcaacatagtcccgtctcgatcgcatgcgatggggcggagacagagcgtatgcgctgagacccgaaagatggtgaactattcctgagcaggatgaagccagaggaaactctggtggaagtccgaagcgattctgacgtgcaaatcgatcgtctgacttgtgtataggggcgaaagactaatcgaaccatctagtagctggttccctcctgagtttcccccaggatagctggagctcggtaagcagttata

SEQ ID NO: 41124 - DNA, 1415 bp, Heterodera glycines
ttagtggccaattagtgaaattgagccattttacacgacaaattagcgacttgttttcggggtaatgcgcacacacccctcaaaaaaggtgcccgtgtaaaagcctttcgccggcgttcggccgtcatggtttttcttcgaacagcacatccacaacggttttggccggttcggcttccatttaaagcgcatttcatggccacactcgcagaaacgccgggtgtgcaacagtttgtgttcctgcagccattgctcaaaatcggcgtcaggcaggagcaacagtttaaacaaatcgcgaagagtaaagtttttaagcgtttccattaattattattgtgcgtacaacttaagcggtcttttttttgaaaactagcggaaccgaatgaaaaaaatgcgtttgttatcactacaaataagcaaaggtaaaagccgctaagcttttaaagtgaaattaaaagccaattttccggaaaagagagattccgatgataatttttataattttttcagaaagggaggcactatgggtcaagcccagtgttagacaaaattgctcataacgccaaatagcgcattttgcgtaactttttgcgcgctatttcaaaatttacactggaaaatgcctttttcgcactatttattttgatctgccataactcgcttcattcccaactaaactgaacaaaattggtatctaaaaaaagattttgaaaaggagaatctttttctaagcaaatgctaagcaatttaactcatatgaaaaaagttgtgggaatttcaaattttcattgcgttataactcaggtccgaggccgctgttttcaaccaaaatgcggaaactaatcacttttttattgattctaaaagtcaaaagtggttttgtactcttctaaccaaaactagtagaatttgcgaatttcgatttttacatgtgctagagacatgaaaatagtacgccaaaaagagagaaaaagaaatgcaaatttttttcatcccatttttgtaatgttcttggccgaaacttttactcaaaacactgaaagtttgttcattttcctttttttttatcagtttgcaaaatttggtgcggatttaacatagagaaaaaaagctagacatagaaaagtgaatgttgttttttacataattaaaatgaagagatagtacgccaaagtgagagaaattacaaagaaaaagagaaacgacgagatagtactaggcttttctctgcacagtgggagttgacccatagcactatgggtacgcgccagtgtcagacaaaattgctcataacgccaaatagcgcatttggcgtaaattttgcgcgttaattcaaagatatactgattactgccttttttgaagaccaattaacattaataaactttattcattgactaaaactcttatttaat

SEQ ID NO: 41125 - DNA, 509 bp, Heterodera glycines
ctcctttcatacattgacataactggaatgaattaaaacccccccctcccgctaaatgttctctattagcttgccaaataaaaacctcgttgtggtgagttttattcattcagttaggtcaattacaaaaggtgctatacccaaaaaaccggcatgggacccattttgagcggggcccattcggcccccacccgagacgaaatgaggtaatacggttgaatgaaacaagggttttactccaaaaaacttattgttagagtaataattttgggaatgaaaaaacaaaccttgataactgaaagggaaacattgcgaaatgtcattgctcaaattaccgcagtaataaatgtccgtcaatccacccaaaccattttaaaagcttttttatcgtatcgagcatggacgatttggtattgtgaattttcggcctttttcccgaccccccccccgaactgatcggaaaaaaagtaaaactctgaaaaccgctaaaaagcgcaatttttcaaatt

SEQ ID NO: 41126 - DNA, 672 bp, Heterodera glycines
  unsure (1)..(672): unsure at all n locations
cccgttttttaatttttaggggacattcggccgcttcgcggcctcaggacgagcgcttcgcgcccgtcttttaattttgttaagaacatttggccgcttcgtggcctcaggacgggcgcttcgcgcccgtcttttaattttttaggggacattcggccgcttcgcggcctcaggacgggcgcttcgcgcccgtcttttaattttgttaagaacattcggccgctgcgcggcctcaggacgggcgcttcgcgccagttttttaattttttggggggaaattcggccgcttcgcggcctcaggacgggcgcttcgcgcccgtctattaatttttttggggacattcggccgcttcgcggcctcaggacgggcgcttcgcgcccgttttttaataaattaaaaaataataaacacggcctgggtccgaacatgccgccccacccctcagaatccccaataacacggggattctgaggtcttgactatgtcaaaagtaaaatctgatcacgtattcgtgatcagcggcccaaataacccctaaaatcatatttttggaagatttttggtgaaaaaaattttccactcaaaaatcatggtcacacccctgtgttcccaaattacaaaatcacttttatttctataacttttttcaaaaaagtgantaataagctaaa

SEQ ID NO: 41127 - DNA, 752 bp, Heterodera glycines
aaatacacctcataatatgaaaaatggtaattttggctccacgccgtgaaacaaatacaaaaaatgcattttttggtgttcattatttaaattttttaggaaaattaatgtgtccgcgtaaaaattttagagattctccaccccgcgccttcagaattttctatttccacccaccttgttcgagtgacggttacgcacacgttcaacaccatgaccatgttgctgctgctcagagttgttgttggcggtcatcttgcgcaccgctgtcgccgtcttcgaatgttttttgccagctgcacgttgcgtagaagatgcataaaaaatattttaaaaaatgttgtgtgaaaagattttctgaccagctccttcctgcttccattgggcttctgcaaattgaacaaacacagaaacagtggagaggagaagaagcaaaatgaaggtatcattgggaatcatttctgtcgccccaagtggcaaaaaaggtaaaaaaaaatcaacaaaaattttacaaaaaaaacaacaaaaatactcttagtttttacccaaaagataatccaaagccattctttttcaactacaaatttccctctgcttttgattcttctgccaattggcttttctgttttgttgggtccgtaggcctttaaaatacactataaagtcaacacagatgttttcttcgcttctccaaaaagcctaatgatcaagcccatccggcggaagaagaatggagatgaagcgacagctgctgt

SEQ ID NO: 41128 - DNA, 1093 bp, Heterodera glycines
aaaaaattgttttttaggccttacttgaaaaaattttgagaattttgaaaatttaaaatttgaaaaaattgagctcatttagctttacaattagtatgctagccacccttcgctcaggtcaaacccttgcgcggtattcgcgtcgtactgaagtgtacactttgggtaaaaaaaattagccaaggatacagccttgggcgcgcaacgtaggaatttggtcttgatggcaaagttgtcggagatagtctgacttaatatcctatcagcaagatctaagcgatctcggtccaaagaaaaaatttcgtagaagaaaaactgcaagaaaaagtgacaaatcgcttctcgggactcagtcgtccgcgcagaatttttctctatagttttcttggattctcctcaaaaagttgtaagacccttccaccactttcagggcgctctcggccttcggccggtcggaattagtttttgaaacgaaactccttgtcaatataacgtatatagtaatagcgggtgcgtgaaccgtcggttatttagctgggaaaaagcgcttcgcgctttcggagcttcgctacctagactgtgaagcgattcaaattgatcgaattggttggagagattttttgaatttttaaaaaattattagaggtttttagtccacattgaggctcaagacgggcgcttcgcgcccgttttttaaatttgttgaactcatacgggcgtttcgcgcccgttttttagcttgttaggcgcttcgcgcccgtttttcaatttttgttggccttggacgggcgcttcgcgcccgttttttaaatctgttgaacttatacgggcgcttagcgcccgtttaggcacaaaagtgattaaaagaggtacaatagtgattaaaagaggaagaacagtgattgaagaggtacaaatgtgatttaaagaggaagaacagtgattagaagaggtacaactgtgattaaaagaggaagaacagtgattgaagaggtacaaatgtgatttaaagaggaagaacagtgattagaagaggtacaacagtgtgagaagaggtacaacagtgattaaaagaggaagaacagtgataaaa

SEQ ID NO: 41129 - DNA, 1076 bp, Heterodera glycines
acattattaacaaaaaaattaattatttaggtataagctgtatttgcttatatttgtaatatattagtaataatattccaataaattttaaatgacatttttatgtatttgcgagagaaatctctcatgtctacgcctctaaaataagctcatatctattgtgtgatggcaaattgatttgccgagagagaggcaaaatgagaaattcaaataatcttattaaaacattttttaccgattttgtagccaaaaactctcgttatagatagtcttttttgaacttactattttaaatattaaagagattcactatttttgggatgctgaagtgacatttggcctcatattttagagggatcggatttttctctttcgcgtctatttgtccccaagtttttctttaattttaaaaagaaaacggtctgaatctgtgtaaaaaggtttaaaattgattaaaaatagaatttagggcgagcttgcccgctttcaggctggaaaagtgccgggactaaagtgaccaaactcagccgagactcaacagaccatactgaaaagcactcaaaagctcttttaaatgatttttaattttgattcgaccacctctacagtttgtcaaggcctccaatttgttttggtatgatttgtaaatgtgaacatgataataataatcatcacatttattcaattatttaccatttattttgtaatccaaatgtcacattttatatatgtcctaaacaattgtctcccttctagtgggcggttctttgatcaccccctctacctttgattacgcccccggggactttctctcgatcagtcttatattcatcgggcctctcccccggcagtctctgctcccgagaccgaatcgggaagagggcctaagcattgtatccttcccccggaataaaggcgtactgttgcatactgtattaagggggaataaaagaatacaaatggccctacggtgacacataacattcatggaggtcccgccatcgggaaaacagagactcttgtacaattttgtaaattaaataaccattatttttgtgtgcatattatattaattc

SEQ ID NO: 41130 - DNA, 60 bp, Heterodera glycines
ccatttggcccatcagtttatgattgaacatgttttgggaatgtgtgccaaatttttggt

SEQ ID NO: 41131 - DNA, 825 bp, Heterodera glycines
ccgacggaaaaaaagtaaaatttcaaaaagcattttttctagggtaaaaaatgtgcggatcacgaatctgaactatgattttgaaaaaatcattgattttgtctatgacttttcatcaagtactaaattttttcaaatttttatttttttaaagtattttctttccaatgagtttagggtaaaaaaaatgcgctgatcattaagttaggttacaaaatctcgccgggacagcggcgcgctttttccaaaaaatttccgggtacagggcgctccaaaaaaatttggaaatttttgtacaattttttgcacttctgagctcctctctcttgcccaatctctctcctttttcttttcttctctctttcttttctctctcctctttttcctctccctctctctttctataaattactgcaccaagaattaaaataaaaaataattttgtgtttaatttatctaacttcccaattaaaatctgcgagttaactttatttttccttttttataatacattttacaaaagaaataattaattaaatatctgttgttgtaataaaaatggaaaagtgaaggcgaaaagtagaaaaggatatataaattgttaataatttgtcgacgaacgattccaaaagaatgtacgctgtctaaataaaacaaacaaagaagtaacaatgaacagatttcccagatagaaatactctttaaatgtgcagatttggtaggaattgtgagctgaatgaacgaatgaccatttggggatagaaatagagaaagaggcgatacaatttacgtatatatttaatcacgaaatcaaggatgaccaaa

SEQ ID NO: 41132 - DNA, 1160 bp, Heterodera glycines
ggttcactgctatataatttcaagggccgactcagtccacaaggatagaaaaaagaaatagggatttttggaaatatttttcaaattttcacggacaaacccgtactggaaaattccaaggaagtattgggttcactgctatataatttcaagggccgactcagtccacaaggatagaaaaaagaaatagggatttttggaaatatttttcaaattttcacggacaaacccgtactggaaaattccaaggaagtattgggttcactgctatataatttcaagggccgactcagtccacaaggatagaaaaaagaaatagggattttggaaatatttttcaaattttcacggacaaacccgtactggaaaattccaagaaagtattgggttcactgctatataatttcaagggccgactcgatagaaaaaagaaatagggattttggaaatatttttcaaattttcacggacaaacccgtactggaaaattccaagaaagtattgggttcactgctatataatttcaagggccgactcagtccacaaggatagaaaaaagaaatagggattttggaaatatttttcaaattttcacggacaaacccgtactggaaaattccaagaaagtattgggttcactgctatataatttcaagggccgactcagtccacaaggatagaaaaaagaaatagggattttggaaatatttttcaaattttcacggacaaccccgtactggaaaattccaagaaagtgttgagttccctgatatataatttcaagggccgactcagtccacaaggatagaaaaaagaaatagggattttggaaatatttttcaaattttcacggacaaacccgtactggaaaattccaaggaagtattgggttcactgctatataatttcaagggccgactcaatccataaggatagaaaaaagaaatagggatttttggaaatatttttcaaattttcacggacaaacccgtactggaaaattccaatgaagtattgggttcactgctatataatttcaagggccgactcagtccacaaggatagaaaaaagaaatagggattttggaaatatttttcaaattttcacggacaaccccgtactggaaaattccagaaagtagtggggtcactgctatata

SEQ ID NO: 41133 - DNA, 135 bp, Heterodera glycines
cctgcgcacgctgtcgaaggcctttgcgctggccggcctgcgctgcggctttacgctcgccaacgaagatctgatcgccctgctgctgaaagtgatcgcgccttacccgctttcgacgccggtggcggatatagc

SEQ ID NO: 41134 - DNA, 954 bp, Heterodera glycines
tgcctacatgaaaaatgaaggagccgaaaagttgcttgcttaagttactaaaaaaactcagctaaacccaaatcacttaagtcaagggtgtaaccgtacggagtcaatacgtcgccaaccgaaacatctctggacgtatttttagaccataattgaaccaaattaaaatttttggtatagttaaaaagcgctattaatctgcaaattttgaaaaaattttgttcatgtacaaaaaaatcagagcaacatttcgaaaactaagttttgagttcattctggccataacttttttgaaaataataaaaaaaattttaaatttagcagaataataataaacacactaagctatcgaaaaattaccaagaatgcttaatttggttcgtctgggtctggacaactatgaatcaattgacacatcaaaggagttggattatagatggtttgggtggactgtaaactgatgtttggcatatttgttaaatttaaataattgttcattttatgtaaaaacaataaacaaaaaataacaaataaagttttatatgtttgagtttgagggaaggaaatgtgttttctgttgtttaataaagtgggaatgttatgcaatacttacggcttactgggcttgttgtgcagctatgaagtgaaaaaaaagtttgacacaaaaatcttaatctgaatgaaaaatcgactgaaacatgttaaaataaaaaatttcgtacagataacaagttaatttccggttttgtaatattatttttttattataatattatttatttaatctataattaaattttcaattttataaatcaaattacactcattagcataaaatagtttttgcaaaactatgacaatgactcactgtgaaaaggaaaacaaatctgatgctagcccatatagattttagcttgttttatgcataacgcaaataaatttaaaatattactt

SEQ ID NO: 41135 - DNA, 1656 bp, Heterodera glycines
  unsure (1)..(1656): unsure at all n locations
tttgaatggacattttccccttttttgaccatgctcaactcagcctcaaattggcacttctttcgccctgtttcgatgcgctggtggacaaacattttcaatggcaaaacgaattgacgtaagtttcaattaaaaaaaacataatcataagaaaaattgcaaaattttctaaaaattttcatttttttttgagacttacaaatgaaggcctctattttttcacttctttttgcttttgaacataaattttgtgtttaatccatatcgaaatttttggttaaatttaattcatagaaatgccgacttatcaaaaaattgcaccgaaataaaaattttccaaattcgacatttttttcttgtaaagcggatttttaggcattttgcacatatcatttttagcctttgcgattttataatttttattacttttttcagcaagtgcgcaacgacacttggtggccttttcccatcttttgaccatgctcaactcgggctcaaattggcactgctttcgccccaattcgatgcgctggcggacaaacattttgatggaccaacgaatttttgtataaattcggcaagttttttttgggttttctttttgtttttttggtcatggccccaaaaatcttaaccgccccgaattttcaaaaatttctgaaatttttttttccaatttcatttttttgtaaaagtaaatagtttttttttgtttttttgaacgtttttgtgcacaaaattttaatggcctcaaattatcaaatggctctgaactccaattttcaatatggctcataataaaaaaattttccgaattcggcgtttttttgtaaaatgccgggggttttttaggttttttttctggaatctttttttgtgatttttatttttcataaatttttcagcatgtgacatttgatggacattctcccatcttttgaccatgctcaactcggctcaaattggcactgctttcgctccaattctatgcgctggtggacaaacattttgatggaccaacgaattttttttataaattcggcaagttttttttgggttttctttctgtttttttggccacggcccgaaaaatcataacggcccgaattttcaaaaatttttcagaaattttttttttcaaattccaattttttgtaaaagtgaatttttttgtttttttgaaggattttgtgcacaaaagtttaatggtctcaaatgactctgaaaatacaaaaaagtttactaatccaacagatattttggtaaaattgccgaatacggtaccaactcaaaaaaaaatcctaaaaacatgttttataggttttcttatgtgctgagaatgacagaaaagcttaaaattagatgcggagatgcatttanaaccggtttttgaaccggtttgacgagctaaatctaaaattaattattattttatccatccattatttcttgngaactgaaatgtccattttcacttcgactcagatgtcccagtgctctgatggcatcggccaaactaattctttgatttttagacttagcttgtcaagagtttataatggcctcaaattatcaaaatggctctgaaaaataaaatttttaaaattcacaaacattttatgtattttctttaaagtgcctgggacttaagctttt

SEQ ID NO: 41136 - DNA, 1177 bp, Heterodera glycines
catgaggggccccagcgcccatggcctttgatttcacaatgggccccaacgcccttggtctttgacttcacgatgggccccagcgcccatggccattgacttcatgattggccccagcgcccttggcttttgacttcatgatggcctcagcgcccatggctttgacttcacaatgggccccagcgcccttggcctttgacttcatgatgggccccagcgcccttggccattgacttcacgatgggccccagcgcccatggcctttgacttcatgatgggccccagcgcccttggccattgacttcacgatgggccccagcgcccatggcctttgacttcacaatgggccccagcgcccttggcctttgacttcatgatgggccccagcgcccttggccattgacttcacgatgggccccagcgcccatggcctttgacttcacaatgggccccagcgcccttggcctttgacttcatgatgggccccagcgcccttggccattgacttcacgatgggccccagcgcccttggccattgacttcatgatgggccccagcgcccttggcctttgacttcatgatgggccccagcgcccttggcctttgacttcatgatgggccccagcgcccttggcctttgacttcatgatgggccccagcgcccttggcctttgacttcatgatgggccccagcgcccttggccattgacttcatgatgggccccagcgcccttggctattgacttcatgatgggccccagcgcccatggcctttgacttcacaatgggccccagcgcccttggcctttgacttcacaatgggccccagcgcccttggccattgacttaacgatgggccccagcgcccatggcctttgacttcacaatgggccccagcgcccttggcctttgacttcatgatgggcccagcgcccttggcctttgacttcatgatgggccccagcgcccttggcctttgacttcatgatgggccccagcgcccttggcctttgacttcacgatgggccccagcgcccatggactttgacttcacaatgggccccagcgcccttggcctttgacttcatgatgggccccagcgcccttggccattgacttcatgatgggccccaggcgccttggcctttgacttcatgatgggccccagcgcccttgg

SEQ ID NO: 41137 - DNA, 767 bp, Heterodera glycines
ttttttgcacttacgccgctggttgtggtgcagctgctgaacaatttgctgagcaactcaacttcctggttcacgttgaacaggcccatctgcaggaagggcaccacaaaagtggtggtgccgtcggccccgtccggcactaaatttgggaaaaaatacgacggcaaaaaataattgccggaccaccaattctctcactcggaaataaattcaaaatttagtgcgctttttgacgtaattttgctactaggcacaccaatttaaacatattttttatttataaaaaaacagaggccatccatctcccatcatctgtcccttgccactgctccgcctgccatttcccggtggagcaggacaaaacgtcgccgcaattttttttttttaattttagaaaaaaatctaaaaaaattgccaaaaatttagttagctaacttaatacgaaaaatttttttcaagttttttttcccggaaattcagcaaatttagtttttattaacattagattttcaaaaagctaaaattactttgaagtttcttgaaattttgaaaatgttttattttttttgcggctacgtttcggcggcgacgtttttggggtgtacccattttccggaccaaaattaaaaattttttttctatctaacaataagaaaaataaaattgtttgaaaaaaaagatttttgaaaacacgaaaaaatggggatcttctgttttttgttttaacatttttaagaatttttcgtcgtttttaatttttctttttc

SEQ ID NO: 41138 - DNA, 778 bp, Heterodera glycines
  unsure (1)..(778): unsure at all n locations
tcatgagtattcattaaaattgttnttntaatattacagattattgttgcatttatatttcattattaaaaagtttacttttacaattattagttgcgggactaatcactttgcaagataagtttttttattggtaatattttcaaattattatcttcgttaataataatcaatcacaaaagactcatattcgtttttaaatgacgtcatgtcatttcaatgttgtcttacgaatttgaattatattttccatgtaacaattaaataataaacattttcaatataatttattcaaattggttcttcgcttagatcaacttaattatctttttggctatgtaataaataccgtgcagctacattcacaatattcagcaaaaaacatttttgttgaacttctttgctttttaaacttatccaaaagatagcttttgttatcgattaatttaactttctaattttatttcacagacttttaaccttttttagttttttcaatatgatgaaattaatacttcttttttttaaatttcgtttaaaatcaaagaaaagaatggttatattccaaaatttaatcaattattacgtggtgagtcgttccacaaaaaagctcagtgattgattggttattttccggaagccgacagcaccattttcggggcaccaaaagtgcctgatccggaatccagacctgtccggttaagaatcattttttgttcagtttttgaagggctatctctcaggccgggtcagattcttgatccattcacttggagcc

SEQ ID NO: 41139 - DNA, 1536 bp, Heterodera glycines
  unsure (1)..(1536): unsure at all n locations
ccgtaatttgatgtgtaaaaatatcgatctaaattttctaggttatttattttattaatatccatttcggtcaattcggggcccgccgaactctagttttctgagcttaaaagtgttggaatgaaatacataaatgaaccaaattataaagaaatttactattgaaactaattgtaatgcgagactaacgacaaataaaaggcaaagtttatcggtccatcaatcaaaggaaagtttttcatgattgctcgcatcccgcaatggaagcaccaaactcgacgtctgttcctttttggccgtacgcaaaattggagaggccggcaattgagtgcgaaaagatgaactgaaagagggcgaggcgaagattgtcctttcggggatcacttgcactccctaaaggggaggagggaatgcggggaaagagtggccaaatggtgaatgaatggccatactttgtcgaccattatcggactcttccgctcctttgtgtccgtcgtctgtttttgttcagcgtcaggcagctttttctctcctgaaaataccaaagtcaaatttagcacaaaaacatgttttttgatctgatatgatgttaacaacccattcgggccaattccgaagacccgagaaaactttttcccggaagggaaaatgttattgtttctaaaaattttcagttttttttagaaacttgaactatttaaataatagttctgatgaggagagtttttatcaatcaacggtaaaaaattaaattatagcaatgtaattcctcttttaagcaaggttgcactacttttttttttgtggatttttttttatggacattaacgtagtttcagacccctaaaccactgatagtattaccggaaatcctgaagaatggggcgtttattttttcttttgggtcgagaatggtatatgtatgtgggttagttttccgagatgcgaacaaatccctaacttgaacttgaacatcgaaaattcaattttttcgagtttttgatcgagttcgggttagggactaggaaatggtcagaatttatgttagatttgtatccagcaccccataaaactcccaatgtaccaattttcaaccaaaaaaaagatacattagaaacccccattctgcaggattgccgtgttacataccggcacctgtatcagctgctattgatgcctcatcctttcccgtgtcattgtttggtttctcatataattggaaggcattttcacgcatttcgttgacaaaagacacttcttcttgaccattatcaagctgaatttttccggaaaaatttaaaaaaatttaacgaacgaaccaataattggtaaaactgaagcacattggtcccttcggtcaaacgaacaatggcatattttggacagcgccggggattgttattgatatgaaccagtgatttgctgatgactgccctatttttgtggccactattgtttttgccgttatgcatttttaaaaagcnggtgattaatgatacagtttgtgttaaaaaagaatttaaaaaattataaaat

SEQ ID NO: 41140 - DNA, 875 bp, Heterodera glycines
tcttcattgccattgtcatcatccgtgtgacgggccgtcatttggtttgcatggaatcggctggaagtgccattcgggaaacttacctcgtaaatgacttcttggcattggctgacgattccagcgcgccatgattgctattgacggtgccgtgtgaaaactttgtcaccaagataaaattttcgcggtttcgcaccaaaacggcgattgaactgcttttccatcgcctcgtctctgatcaatggtgccaacggttttgctctcagcaaatccaatgttgttcgcggctttcgcaaaaggaagagttcggcagggctttgccgtcgggcaaagcgtcatttggcgttgtcctgtacgacgtcaaaaatgtgttcacaacattttgcgcgccctccttcttcagtttgcgacatgcccttttaaaggtgttgacaaagcgctccgcttgtccattcgacatcgaattgtatggcgctgagaagaaatggtttattccattttctttgacgaattccttaaattcgttggagctaaactgggttccattgtcggtgaccaaactttccggcagtccaaaacgagcgcaaagcgaacgtaattgttcaattagaaaagagcgaaaagagccttaaaaaataattaataaaaaaaacaaaatttttttatttttgaaaaaatgttttgatagttaaaagtttttttttttttttaatttttttttgaaaaatttctccaacaaaataaaaacctaaaaacaaagccatcgctcgcagttttctcaattatgcagccccgatttggtccccccaactggccgactcaaattggtccatccgcacggagatgccagaactccgcccttgcacaatccagga

SEQ ID NO: 41141 - DNA, 311 bp, Heterodera glycines
cgagaaaagggcgaatagcggagaaaaggcaagaccaactattgaggaagtgaagggaggaatagtctgttggatgagtttggagtgggcggaagaaaaacaatgggcggaagaagagagggagagagagagaaacagagagagagggagggagggagggagagggaggatgagagaatgggtgtacagaggagggaggaaatccgagagattttatccatttatgggataaatgagggaaaaacggaagctaaggatggaaaaaatggtgaaaggaaaaagggcaaagctggaggggggggggggtggaa

SEQ ID NO: 41142 - DNA, 1635 bp, Heterodera glycines
  unsure (1)..(1635): unsure at all n locations
gtcaacacgggcccggaaaccattgcacaattcacccagagtaaacagcactcccccgatccgggtaccagacnccgaaaggctggcctcaagaccgagctcacgcagctactccgagcatctcagcgcactccgcctgcaaatgccccattcgccactgaacagaaggacagcaaaccccagtctggaggctagcagcccaacgtacagcaacaaacgggtgaatgcagaccagatacgccagctctgtccgtttccacctcatcggtttcacgtcctctttaactctctcttcaaagtgctttgcaactttccctcacggtacttgttcgctatcggactcgtggccgtatttagtcttagatgaagtttaccacctgatttgggctgcgatcccaaacaacccgactccaagacacgtaaagatgggtaggcaccgccagttggacaggtcttgcaccttctctggagccccggtcaagggaaacttgaacaagcgggccaacccaagctcacggtctatacgctacacctcgcaaccccagaggagctgcgattcagcgctggactcttcccagttcactcgccgttactacgggaatcctcgttagtttcttttcctccgcttactgatatgcttaagttcagcgggtgttcacgtctgagttcaggtcgaaaaatcaaagcaggaatgccagtaatccaggcactccgccacagcatgcaaagcattggtgcgcccgagttacggtccgtaaaacgcgaattagaaccacaagttcgcgccagcacaccaaaaccccacagccgagctgagcaagtaacgtaagaacacgtacaagtacatgatcccacgaagcaacgcacaagcagtgcattttatggtaacgaccctgaaccaggcgtgccaatggatgtaactccaatggcgcaatgtgcattcgaatgttttgtgttcaaggtttctgcagttcgcactaattatcgcagttggctgcgttcttcatcgatccacgagccgagtgatccaccgataagactagaattcattcttcaacagaagtgtaaaaaaaaataatgaaaaaaaagaaaaagctggcggtgcccgagctgacactcattgagtcttaagccacgtgctaggccaagcacgggccctaccacgtcgtctcatcacggccacggacgtagcagcaagcacaaacacaccgctagttacggcacgtaagaccgggaacgaaaccaccatccccagtcagtgtgttatgtgcctgccacaacaaccgctcaacgacgcacagacgccaacacagccgttaggtcgccccacgagcgtgcaccccacattggcgcagcgaaccaaccaagcgaggcagcccgccaccgacacattgccacgcagcagccatacacaggctttaacatgtgcagcactgagcggtataccacagctccaacgtatggaagcaccccaaaagcatggctcgtgaggcagctgccccgtaatgttgggcagcgtccacaagtcagctcgaacgacctgtgcccgtcagcggacgggggcatttggtggtgccaacgctagcccaacaggacagcaggtaggtggtgaataggaatcacttgggtaatgat

SEQ ID NO: 41143 - DNA, 958 bp, Heterodera glycines
caatgataaattacaaatagtaaataaaaattcgcattttccaatgattaaattacaatagtaaaatacaaatgcgcatttttcaacttaatacgcattttaatcattaactacaactgaaaatacaaatgcgaattttccactgactaaattacaattgaaaatacaaatgcgcattttctaatgataaaattacaatagtaaaatacaaaatacgcattttccacttaatgcgaattttccaatgatgaaattacaatagtaaaatacaaaatacgcattttccacttaatgcgaattttccaatgatgaaattaccatggtaaaatacaaaattcgcattttccaatgattaaattacaatagtaaaataaaaaatactcattttccacttaatgcgaattttcaatcattaactacaactgaaaatacaaatgcgcattttctaatgataaaattacaatagtaaaatacaaaatacgcattttccacttaatgcgaattttccaatgatgaaattacaatagtaaaataaaaaatacgcgtttccacttaatgcgcattttcaatcattaacaacaactgaaaatacaaatgcgcattttctaatgattaaattacaatagtaaaatacaaaatgcgaattttccaatgataaaattacaatagtaaaatacaaaatacgcatttcaacttaatgcgaattttccaatgcttaaattacaattgaaaatacaaatgcgaattttccaatgataaaattacaatagtaaaataaaaaatacgcgtttccacttaatgcgcattttcaatcattaacaacaactgaaaatacaaatgcgcgttttctaatgattaaattacaatagtaaaatacaaaatgcgaattttccaatgataaaattacaatagtaaaataaaaattcgcattttccaatgattaaattacaatagtaaa

SEQ ID NO: 41144 - DNA, 177 bp, Heterodera glycines
ctgctgttgctggacgagccggccgccggcctgcgctacaaggaaaagcaggacctggcgcgcgtgctggaacagttgcgcgccgagggcatgagcattctgctggtggaacacgacatggattttgtgatgcgcctgaccaaccacctggtggtgatggatttcggcaccaagctg

SEQ ID NO: 41145 - DNA, 1014 bp, Heterodera glycines
  unsure (1)..(1014): unsure at all n locations
gagaacaatgaccatttttattcccagggattttcaaaagcttattctacgccagaaaaatggctacctctttttctgagtaattttgtgttcaacaaatgctccaaaaagcgagccaagggccggagagcaatgaccattttaattcacagagaattttcaaatggctattctacgccagaaaatggctatctcttttctgagtaattttgtgttcaacaaatgctccaaaaagcgagtcaagggccggagagcaatgacccttttaattcacagagaattttcaaatggctattctacgccagaaaatggctatctctttttctgagtaattttgtgttcaacaaatgctccaaaaagcgagccaagggccggagagcaatgaccattttaattcacagagaattttcaaatggctattctacgccagaaaaatggctacctctttttctgagtaattttgtgtttaacaaatgctccaaaaagcgagccaagggccggagagcaatgaccattttaattcacagagaattttcaaatggctattctacgccagaaaaatggctacctctttttctgagtaattttgtgttcaacaaatgctccaaaaagcgagccaagggccggagagcaatgaccattttatttcacagagaattttcaaatggctattctacgccagaaaatggctatctctttttctgagtaattttgtgttcaacaaatgctccaaaaagcgagtcaagggccggagagcaatgaccattttaattcacagagaattttcaaatggctattctacgccagaaaaatggctatctctttttctgagtaattttgtgtttcacaaatgctcncaaaagcgagccaagggccggagagcaatgaccattttaattcacagagaattttcaaatggctattctacgccagaaaaatggctacctctttttctgagtaattttgtgtcaaacaatgctccaaaaagcgagtcaagggccggagagcaatgac

SEQ ID NO: 41146 - DNA, 1145 bp, Heterodera glycines
  unsure (1)..(1145): unsure at all n locations
cgctgtaaagatggaaaattttacgattttaattgtattttgtaaatttttnacgaaattgcatttcgtttttgtatttcgtaattttcttttacgaattatatgaaattggtntaaaaaatagcaaaattcggcgttttttggacaaaatctgttaaaaaattgcactaaaattcaaaaaataggcgtcacaatgaaaaattttcaaaaaattttggtacaaagatagatttgctaaaccgatttttacacttaaaaacaaaagtctctaaaacattttttaattgcccaaaaaatgttttcctcctttttttttgcagatcaatatggcgaactttgccgcttttttcgtgccaaattttgtgtattcatccatcagttgtccgtctcggaatttcagcgcacattgccccgcttggtcactgcaattcgtcagaatggtcagtcgtaaaaaaaccaacaaaaaacgggaacagaacaaaatcatgccgctcaaaatctttaaaaaaaatctaaagaaaaaaaaagttgaaaatttttcagcgatttttttttgaatttaatgataacttaccaagtttttttccaaaattttccaaaatttttttattcttgaaattttcgtataaaaaaattttctaagatttttttcttgaaaaattctaagtttgaaaatttttaaaaaaaattctagcgacgtgatttcggcggcgtgattttggggtgcaccccaaaaaacgaccattttttaaaacgcaaaaaaaaatttttaataaaaaatattaaaatgttttaacagcaaatttttagtggaatttttttccaattttttttttgctgaatttatttatgcgtgattcccatttcaaacttcaaaaaaaaattacaagctttttcgaaaattcccccccccccaaccgaaattaaaattttactagaaaaaatgggcaattttttatttaatttttaagcgattttttgaaaattttcgaataatttcgtaattcaacataaatttttcaaaaattgcttacaaattttcacttgcccgtccttcgtaggtctttttttgcgcgctccgttggctgccgtggtggacaaggtgtccggtcagcccaacaaatggagcgtcgcgtacgccgctt

SEQ ID NO: 41147 - DNA, 1075 bp, Heterodera glycines
  unsure (1)..(1075): unsure at all n locations
tttaaggcattcaccattcacaccagcagataaaaactaacgcgaancgctcacaacatttcattatgatttcgtttttttttgtattaaatgttttcttntgaggccttagaaacggatcaaaacctattctcctccaattttttgttgttgttttactgttactcattcattcataacaaacatttgaataagttgtttaaaggaatggactaattgcttacttttgttctgttgcgatattttgaatgtcataatgaccaattacggtgattaaatttcgaatggtcgcaattccaccctatcaaaaatcaatttgtcgttaatctatacattggggacgccatttgattgctatataaaatcgggttggatacctatttgtggtgggaattgaatttgggggaagatttggctttatgacaataaaagctacaaaaaattggttttctgttttgatcttaggtgaatttttttttcaaccttcgtaacagagaacttttgaggcaattgaatgggcaaaggttagtttactcgatttttctctgtgtttataagggagtttatgaaacaaaaacaacaacagcaattggtcatcgtctcacatgtacaaatttgggttttttctgcttcttcttgtcctctttctcatcgtcgtcaagagtcggtctgaagaaccaagggccgagaatgttcgtccaaagtttgtaaagtgtgaaaaagggaatggacagcagaacgaagaagaagccggtccaaatcagactcagaagctgtgcagacacactcagaatgacgatgtctttgcagtaccttaagggaccgcagttgtggcgaatgttaaagcttttttactctccaaacgcattcggatcgttgaggtccaacccagcatcgaccagctgattacgctcattccgctcggttttcatctgagaaaatgcaaaatttatgacaaagcatcattaaacttgtgcccaaaaatcggtaatccttcggaattggtgtcccgaccaaaaataaaattaaaaaaatttcttacccaaatcactttttctatgggaaaaaaaatgcg

SEQ ID NO: 41148 - DNA, 948 bp, Heterodera glycines
  unsure (1)..(948): unsure at all n locations
atcaaaaacatgacgcacattattgtgtcacactaaaatcacagaacagacactaatgttttagcaaaaacatgacgcacattattgtaatgtcgacattgttcaaattgtccgtctttttgtcttgccgccattgaattgtcgccacaatttggcatcgctccaacacaaaattaatatgtgtatatacatcataatcatcttctgccttcaatgtcagcttttctttagtccgttcgttcaccaattcaaactgcgcaattgtggtgtaagttttgaattggattatgtaactggcagaagagttggcacggagaaattcctaaaaaatgggaaacgaaaagtaaatggcatttgatccaaaattttacgaaaatattggcacacctttttgaaattgttgaaccattcattgctttctgacgtataatcacaacaactcaattgcttcggcggatgcccattttttgtcggagtgtgcaaccaattggtcaatgcttgacgagaagttgcatttggcccatcatcagcaatagacgcgggcaacaaattatcggagtcaattgaattcaattggttgcaatcggtgaaaattgtcggtgaaatttgacgacgcaaatcgcccaaatgatggccagtcaaatggcgaatgtttggcgcgaaaatgggccaaatttcaccagcaaaaaaattccaaattggctggaaaatgccgttgttgtcataatgcaaatcatccaaatccaaatataaatccatattggtgcctttctcaaaactttgccggttggaatgaagaaattcgatgacggaatggccaatgtatctgaaaaggaaatcatttagctgtatcatttaataattctttgatttactcgattcgaaggttgttaaagcggattttgatggcaacggattgctcttagtaaccacagatagaangttttg

SEQ ID NO: 41149 - DNA, 1341 bp, Heterodera glycines
  unsure (1)..(1341): unsure at all n locations
aaaatgatagggccataattgttatataataaataaatcattgaattaatgaattacttatttaacatataatatattaatcctctgattttttaattgttttgtaagaaataatgaattagtttttaaatgattcataatcagaattttactcaattttaaaatttttttagtttaaaaattcaattgattactattttcttttttcaaatttgaaaaaaacattgataatttataactaatttttaacaaatatttgtaataaaaaacgcatttctaataaattaattattttatgtacttgtattgttttttttgataattcactgcaattttcgatagaaataatatagaataattagtttgattgaatttgttcatttatcttttcacaccataaattttcaaaaagtcaattttaaattctttacattttattctcatggctcaaagacgaattatttaacattgtattgtttattgcttgatatttcgatttaattaaatttaagtaaattttattaatttattttttaaatttaaatttcatttaaatttatataaaaataatttaattttaaatgcatgtttatatacatacttgatgaatatttcgtcctttttaaaattttctgttatataagcaaaattacttggagtttgattttttctattttttatttaattgcaattaataaaagataatttaataatttatttataattttatatttattcatttaatattgttcaacccatcccaaaagggccatttacttagggtgtaacataagtttccgcactaaattttttctgacaaattcaaaaattcataactccgtaatttctgcagttattttaataattctttttttattttgttctaaagaaagtcttcttttatttcatgccatcgtttcatttttttatttgcttgtcaatttttcagaattttttcccgaccatgccaaagttgaaaattggtccaataatttttctcgaattttttatgatcaatactaaacctgatataacaaagttttctgtaaattttagatcagtaaaatccgaatatgcctttaaacctgatctatattaaccctgagcttgtactactccaactcgatacacgaagttggagctgtattatattcttatagtcctaatttttctctatttactcttgttttctctacctctatatctcttttcattttctttaagtcagccatcaaaatacctagctcgaaaatgaccatttttacattatcaactctaaactccttaagacttttctaatgggattnatctcttgcctgataaatnagcaactcattctca

SEQ ID NO: 41150 - DNA, 792 bp, Heterodera glycines
  unsure (1)..(792): unsure at all n locations
ttccatttttgaattgtcttctcacttttcccgtccatttgtgtcctcatcttgcgccattcgctgtttttgcgcgtgccgttggctttggtaaatccgtgcaacttcccacgcttcgggcactccttgggcaaattgggcagcgacaacgacaaagacaaggaacagaaacgatactttggtggttgagaatggcatttgaaggcgcaaaagttgacgattgatagcaataacagattgcttaatggatgttcactttactcaaaataaaatgaaaaccacgcccgaaggcacaatttataagggggggnggggagaanggggggagggagggagaaccgcacaaaagcgcgattgctgatcgctttgcattgcgaaaagagaggagaggaagagtaaaggttgcatccaaatgcaaatttttatttacgttgaactatctggatggcttgatggatgcagaagaattagtctactatgaaagaagcagcacaacttgtgaatgggccaacgacccctaaccattcaaatagcaatcgattgggctgactatactccatatttgaaggaatagcaatggaaggtctatcttaaaagactgactagttatgtttcgacaagcatcctgtacaccatatatcgattagctaatgtaatcgaactatataaattcttcataaaatgattcatcttttttatggttagaagatatgtctctagctgtatacaaacggtcaccgagtctgcgaggaactacttatgagagagttgctatcgattattattttgcat

SEQ ID NO: 41151 - DNA, 1164 bp, Heterodera glycines
  unsure (1)..(1164): unsure at all n locations
actaaaaataaaaacctacattttaccctctaccctaggtttcataccctctgtnnaggtngntgnntgacctttaatnnnatgnaatgaaaanaaanggntntnggaattatgngttnnatgatatatnatgaannnnattatctttatanaaatatntgaaaatgngagntgagttttttttggattattgtgttggnatnttngaaataaanggggaanaagttanggtatttattgaaatggaagtaaacttgaactgtccattcacctcatttctgtctacctgtgtaattcctcgtacgacccngatgttgtgcctttctgtcgttacatttggcatttcttgctcggcacttgctgaagtcggctcaaatgaccattttttcttttaaattgaatgattaaaaaatgaagacgataaaaaatccagataatttaattcaatttcacatattgatcaaaaccaatatcaaaatttagtaatccaattttaatctatttcgcccacttaattgtcttgacaagtcataaatgagattggatgtcgcgtttctgtgtcttttccctttcagatgatttttcccattgcgaaaattctgccataatattgcaaattccacaatgtttcatctgcttcaattgggcgtaatccggaagatcaaacaattcgctagcagccaggcaatggcatcaaaattgttgggttttccggcgaaatgtcattgataccaccgtccagataaaaagcgttcgagcgacgtcaattgcaaatggaacgacgtcctcatggaaatgcgaggaagtgttcaaagcgatcgagtagggtaccttaattgaattatatattttatttacaaactttcgcctctccccacgaacttctctgtatttttcccgcgaatgaattcggttgtaaaaccgtttcctttgtgtcttggcgatatcgtcgagtgtggagcttcaccaaatcgactcgtttccttcgaaatcttttgaccgaattccgagatgccattctttttcggtcgattgcgagagagggaaagaaacatctctttgagacccgaatgcgattggagtaatttccgaaatgagattcgagctgattttggtgcggtaagggaaattgaagaagagaatcggcgtaaaaaaccccaaacc

SEQ ID NO: 41152 - DNA, 1630 bp, Heterodera glycines
  unsure (1)..(1630): unsure at all n locations
tgtttgcgattttntaagactttttcccattttctgctaaagctctaagatgcttagggaaaattttaagattctaatgtgatttttaacagattcagaccaaaatgttaaattttgaagaatttctaaaatatatttttaaatcataaaatttcttttctctttttggcaaaatcggctacgaaaatcacttaatattttttatatttttattcattcggtgatttttaaaaatctgttaaaaatttatttgatttaaaaaaaaaattaggaaaagacaattgaagaaattcaagaaaaaatccctgctgtgtgtgggggtcgagcctaataaaagcagtagtaatatcaccacagcaataaaatcatctcgtcaattcgctaatttttgtcccttaacccgccggggataggctgcgggggtccccgtttccggggatacgaaaaacggggtacggcgatgaaaatcccggggatcacctcggctctccccgttacgattttattttgacatttcgccaaaaattaattaataaaattgcaaataaaggaaaaatggaaaaatacagcctgaagcgttgatttcttattttttagtttttggaattttttggggctgggtgttttagttagggccttatctatagcctacataccattgttggcttttttggtgtctaaaagaatttacccaaattatgccgaatttttttttcgaaaaaatgaacaattgattgacggtttcatgaattaatttgcccagtggagcgccctcaaaaacacccacatattttttaagttacctttgcatgtgttttttgcagtttgtgctgtgatgagttgtcagtgagtgcgtttgtgtctttaattatctatcaaacgttattttgtttgtcttttcttctctgccataaacactcttttgaatgcgtccgtccgttagccaatcatcgcttgaatattntaaacgcgtgcgtatgcgtcctttccttttcttctctgccttaaacactcttgagaactcttttccgtccgtcagccaatcatcgtgaggcgtgcgtatgtgtctttttttctttacccaaaacactcttttgaacgcgtgcgtttgtgtcttttacttttcttctctgcccaacactcgtttttgtgcgtcgcacgcgtttcactccgtccgaatgcattttcaatggtacatattagggctgtattttccgagactcgagccgggaatttaccccgaaatgcgagaccgagaccccaaaaaacccgagaattttctcgaagctggagttacaaaatgttgtgatttacataaaaaaataaaattcctccaaatttgttaataaaacatttttgttttttttatgtcaaatgatttaatagttaatgaacgaactaaaattttaaaaattcataattttttaaaatcaaaagcaaattttatttacacacaatcaaaaaggtcaattttgctgtgtatgtttgccgtgattgcgattttcatccaattttttgatgaaaattaaggatttttatgcgcggtagagcgggggaaatttggaattttatgaatttattaaaaaatttgttcaaaattccaatagtttcggccttatttaaattgaat

SEQ ID NO: 41153 - DNA, 1211 bp, Heterodera glycines
  unsure (1)..(1211): unsure at all n locations
atggtttccggaagtatttggagtctctgatcacaaaccccaccgacacttattttaattcgggtttggggttagaaattgttcaaaacagatgtccgatcaaaagggtccccaattttctggagaaaggtctcgaaaatgtatggcattttaagaataataaatgatcaaacaaatcaatgaccctatctattattatatagcatgttaacagagtttaatgcatttccaattgactagtcacagataatttttcagtttttcacaaaaaaactatcatgtaactcactggaaatacatatgttatagctaaaaataaacaccagattggtgaccaacaccaaaaattagcctaagaaaaattatttaaaaaaatcagggctgacaaaacctacaaatccattcaaaagatatgatttttaacttgcgccgtaattctgtttttttttcatcatttttcacgttattttttttacatttgctgttgttcaatttgattccttgcttcgcgtatctcttctagcagtttagcaatttcatgaattctcctgccataattttcgccaaattgtttaatgctttccaaatgaatttcaaattgctcattaaaaaatacggtccgatacaaaatgagttcatccttcatttggtaaaataaatttttgttgttgttgcgttgaaattccgaattttgtttaacaaaacattcaattacatcaagttttttgggcaaatcattgtcaaacaaatcttttcgcatccgtctgacatctgttaacgtagcctttcgtaggatttcggcattataacaaaactctgaaaaaacggaaaattgcaaaaattttcaaatttgtcagggttanagtggtataaaggaaaattatggagaatctataggaagtgcccgtagctcagtcggttagagcattccacaaaggcagtgggtgggttcgagtctgtgatgccagaaagaagcggagtgtgggagaaagtgagataaaggacatgggagaacctctaaaaggagcgcccgtagctcagttggttagagcacggcacggattgctngggtcgtgggttcgagtcccgccgngcaagttacccttttaggttctacaaaaaatagacggttcgccacttggctagtcaattcagtatacttcccatattaataaaaaagaaacattgaatttttctaaattttattttct

SEQ ID NO: 41154 - DNA, 1672 bp, Heterodera glycines
ttctctctctctctctctctctttctctctctatttccccaccggtctctctctctctctctatctctctctctctctctttctttctctctcactttagtcactcttgccttttgtttttgttgtcacaatacctccgcgtcaaagtgttgtccgttcactgtatgttcacttccgtccccattttgggaccaatgaaatgaaattgggccaacaaatatctgctgcttcccaagccaccgtcggtgatgaacggccgctctggccaagtgtcaaagccgtcaacagccactttgaaaattacttattattatttgcgaatgaatttatattttttaagtgaacgcatttatgttttatttatttttacttagcgcgtgttaaatttttgcttatttcttcaatttttgtatgaaaattacaaaaaagcggcgtctgtcggcactgccggacaaaatcttttttttttttaaattttttttttaaactccaaattgggtctatttctgtgttcttcacctttatgcccatcgttgtgcattttcactgtatgttgtttttcataatttacaaatcgaattggcggagttttgttttcatcaaactaaaaaattattacgtgaaataataagggaaatcattcatgaaaaattgaacaagtttcgtttttggtagtttaaaaaaagagaaattggcaatttttgtgctaaattttaaataaaaaaatcttcaaataaatatgaaattatgtacaagaaaaaatgttaggcaattttgttgaaaaatatcccttttggggaattttaacgtcaatgttaggaatgaattttatttttttttttgtaagcaatttttcaaaaagctaaatatgtataaccataaacattttaatgcagcattagcataaaattccaaactctgaaaaattaagcatgaaaaattttcttattttcagttattaattagttaattaaataattaaaattacccattctttccgaatatcaattggtgattgcctttgccccgtttggcactgccctccccaacgttcgaactcctcataactgaatgtctcctccccactcggcacgtgaattactgtttaattggaaaattggttttagtccacaaataataaaatttaaatttaatattttgattcgttattcaaccgggttatttgtttcagaaaaattctgtattcttttgaaatcaagaaatgcaaaacatatttacgaaatatttataatttaataaatattttttaaagaaattcagattattgatggttttgataaaaaagtgacaaaatgtgaattatttttttgaactaaattctttgacttgtttttgtgattttcctaaatttttcgtctttttgtgccaaatgctgattgtttaagtagtgttgagcgggaccgggaccgagcctgagattctcggtccccccctgtcccggttgggccaccggcggtagggaaaaataagcgctgatcaaaaattcactcattagacaaaaattttttaatttattttttggtcataaattgataaaaaaatagtcctttttttgcattatccgttaataaataactagggatgcaaattttaggtaaaacctaaaaattttagcgcatttaacacgcacagataagcatgaaaagagcat

SEQ ID NO: 41155 - DNA, 350 bp, Heterodera glycines
aactagggttcggaccccgtgggcgggggtggcttttcgcgggggcgggggatggcgggggtcagagtcgcgggggcggggatgggggcacgataattccgcccccgcggggccgggggtttgaattaattccaaaaaatttcacaaaaaattaatttttatgaatggtgtgttggctccacattcctttagtcaatgtttcgcctcgattcaattcctttggcataaattacacagattttgtctaaagaattaccaaatttagggatttttgcgaattttttaagaaaaaataggtttggagggccggcgtgccgataggggcgaattttaaatttatttctaacaga

SEQ ID NO: 41156 - DNA, 1003 bp, Heterodera glycines
aaatgcttgaccccaaattaattataaacaaacaaaccatatatattttttcagctacattgaccacttcgtcatctcatttcttcgttcaaataaacaaattttttgagtgcggcatcaaattgaaattgtatgtgaaaaatacatgtgaaacagaagaagaagatgctaatgtcctgcggatttgggatgttttgctccgacatgttttgcccatttttgtgtcaaatattcgccatttgaaatctgctggcatccaactctacactatgctgcacatttcgccgaccattctctctgatctcagcattaattcaatccattcatattggcctggtcggattaaaaatggtgcaaatcggccaaatttgactgctgaaggacatgcgttgttcgattggttgcacactccgccgaccgccgatggacagccgaagcgactccgtttcgaaatggacagtgcatcacaaacagaaacattgatcaacaagttcaaagaggtcagaaaatagtgaacttttgaaaaagagtcggaattctgggcctgaatcaggcgtgcagacccgtagacaaaaaatttggaagaaatttaaaaaaaaaatttttgtttttcttattttttgggccgaaaattccaagatttttatgatgttacctattttaaaaatttagaatcgggtgaaaagccggaatttgtttccgttgtcgccaaaaaatagtaaaaatttcaaaaattatggtaaaatttgggggtttggcggtgggatgcaccccaaaacgtcgccggaagatttgttagaccataaattcgtccggcgaccctggcaacagcctgaggctgggatagttttacataatcgaaattttatcaggatgttgtttcggtgtatattatggctgggattccggctggaattcgaaatttttccaaaaaaaaaagaaaaattcatttaattccccgacagctaaaaaagttttttgaatcccagtgaaacttgaagaa

SEQ ID NO: 41157 - DNA, 1799 bp, Heterodera glycines
  unsure (1)..(1799): unsure at all n locations
atgatggcattttttccatcncaatttcatgggntaatggttgatatgtgcaggaagacggagaaaatgcacntaaacaatgnatcaaggaaaaattgtgaatcttagtntaaaaaaatcacaaaaacctaagtgatcagtgccaaaaattaatcagtttgataaatactgaataacctaagtgatcaaagccaaaaattgatcaatgaaaaatgcaattaaaaaatttgatcaaagaaaaattgtaaattagccaaaaaataataataaaaaactagtgatcaaagccaaaaattaaccatttttataagaattcttttgaaatgtaattgaccataatgaattttaaaatgttaatcaactgatattacacctctcagtggtgatgaaatattgtttcctgaatatgttgaagtttgtgaaagtgaacggggagaggccaccggaggcggtgggacaggaattcgtccagtcttcaaagtctaaacagaaatgtaaaacacccttaaatgtcgagaccagacaatcgagtgatgctaattatgccaatctcgagtttcagcgggattgtatgcttttgcgtgattaatcccgcgggatcccgtcccgcaaaaatttttttagctccaatcccgcagcggagtccgcaaacccaccccattgttagtgccgttgaactgcttgaatttgggctccggcacggcactcttccaaatgccttcccgcatttgaaataattgtccatgccgacgttccgctgctggctgaggtgccttacggtgctgttccaccgcctcgtccaccaattttttacagtcacgcaaccgttggtccatcccatcgtcagactcatgagtactgctcgacaaccccgtggacaaccaatccgaaacagtttgcccattactgtcacaaatgtcaagggcgccacctaaaaacgaggggagtatagccaaagctgggggaggctagcctctgccgaaaacgaattttagttaatccactcccttaccgtaatccaacagtatgcgaagtgctgagcactgtccctgacgtatggcaacatgaagcgcagtgccatcggggcccaaatagttcgggtcaaagccatgctccaacaaagcctcctgaaaattcattgtttttaaaattttcggtggcatctatcagtaggggcacagatgaactttaatttttcaataaattgtcaaaattaaatttgttttaccatgcaatcagtgtggccaagtctcgcagcagagtgaagcggatatggaggtgaatgtgattttgacacaggtgttgttgttgttgttagagtggaggaacaacagtccgaggcacactgaattttatttgatttcgaattaaatgcataaatttaatttaaaaaacaatggttacctaattttgtaatttatttaattaaaaaatggattaaaacattttttttgcatttttcaaaaaagtaatttttaattcataaactcgtgtttaaatgcactcttctatgtccaattttcataacccaattttctcaccatcaaattcagttcgggacaattgagcatcaaaagtctgcaaaggttggctttgtcagttcggacggcgatgtccaacgcggtttccatccgggcatttcgcagtcgggcatcggcatggtgctgaatttacggaaaatttttanaaatttttgaaaattttttccaaccctgagcagcaggcgggcagcatttgcgtgaccattaagtgtggccaaatgcaacgcactntctcgtgcattgttaacggcattctga

SEQ ID NO: 41158 - DNA, 1362 bp, Heterodera glycines
  unsure (1)..(1362): unsure at all n locations
ttttttgaaatgtatttctctactatattttttttattatactgtatgtgttgtgttgccaaccagtcaggatatatgtatagcagggatggcattccgaattttcggaaaattccagacctaaattttttgaaaattggaattccgaccccgaaaatgtcggaaaccggaattccgtgccaccctggtatatatgtaggccccaatttaaatacttttgaaaggcatgccacggcattttcaaattcaaaaaaaagttggctaaactccacatggtttacataatctatcatctctacatactatatatatatatattgtctacgcttgcttttctttgcttcttgttctctcttcattaatgcgggtaaaatcccaattatttttgtgtaccccattttggctcgcccattaataacccacacaccactaaattgctaaattaatttctttgtaacccaattttaaacacaatgtcgggcggcattctgatgtcgagcattttttgaaacaattaattcaaaattgaattaatttgttttctgtctgttaatatttagtctcgacaacagaaagggcttttttgggctaattaccgaaaatccaagagaaaaaaaacaagtttgtaatttgattgttttggggtgctcgtgaatcaaaattttcagtaaaaagagacgagaccaagagaatgtgcccnccgaaactctcgagcagccctagcaatttaattaagcacccaacctatctgttatcaatcccgacactgaaattgtcccctttaaaagttgccataggtcatcatttccaccactcaatttttgttgtttttgaatgaatgtgtaaaacgcgttatattatatcccgtcctcacgtggaacctctgaattgcccaccattctattaatgtatccccgtgatttgttgtgtgtgagcaaattttttttttttgaattttcacattgtttttaaatttaaaataatttctcatacagtatataaaattataaagaaaagggtaaagaaagtttaaattcggtataaaaaatgttgtgcgcaaatttggccgaactaaaaactcagtaatgaagtttagacgacaaattataaatatttattttaatatttgatatgattaagtttctattaaaagcgattttttttgtttatcgtacttattgaattagaacccccccccccttcgagggggggttgaaaaatagaaccccccgggtgtattaattcagtaaatacggtatctggacaaaatctccgaagggggtcagcccaaaatgatagaaaatatatgtataagatatgaatgataattacgacgcccatgatctagatcccccggggttt

SEQ ID NO: 41159 - DNA, 1026 bp, Heterodera glycines
cccccccccccctcagagatttgcattatttgtcccatcattctctccccctctcccccctctctctcttttctctttttcctctgactcactttgtgccccttccaatcgctcatcagccgtgaaaacaaccattcacaattccctcgaagggattatcatcgccccactcatttctcgattgatctgtcgaaggattagtgagcgaaacgaaatggagcaatttgggaggagagggggggggagagatcatgacaagaaaagggggggggggttctgataatgggtaaacgaaagaaatgggggaaaggggcgaacggaaggactttttgaacgcaaatttggcaaaacaaacgaacggtcgtcggtacttttcgcttaacggactccccaaattaaaagtaaaacaatttttaacatttaatgaatggaatgcttcaagttcaaagtaagactaaaacactgatttgtaaaacattaataaaaaataaacaaataaatgaatgaatcctcccataattttgtcccattaaaaaaggataaaacagtcaaaagagcgacccttgcaaaattaattttaatcaattttttttttgtttcttttcacaattttgggtcactttgttttggccgtttctctaatcttcactttcctttgacttttgccattgattgaattggcagtttccatgaacataaataatcacttattataataggaaatgaatgttaagggaatcggattatgaccgcgcagaagaaaaatttggtgggggcatcgatcggcaaaacaaaagcgaggccataagcggataaacacggacataatccgcttacgggggcagaggtgattggtggtggtggcagtgggcgggaggtaaattggggaaaggtaaggacgaaaagaaacaaaataatggacagggaaaaggaagagagggacagaatgccaaccgaaagaaaaattcaaaattgggcattttaaacggacagaagaagaaagtgcacttggggggggggggggaa

SEQ ID NO: 41160 - DNA, 1027 bp, Heterodera glycines
  unsure (1)..(1027): unsure at all n locations
tcaatttatcaaaaacagaacaaattntcgaccacataaattaaattttaacacatgttagctaatttacaaattattggcattttgttcaaccatatcaattcaagttttaatacataatttaattgtaatactttttgtcaatctttttcaattgaatccaaatttgaatttcaggcattttttctttctttttcaaattattggcactccgtttaattacatcaatttcaattttgctttcacataaattgttcttaacgcattttcagccaattgctttcaaatttattcaaatcaatgccattctgatcatttaatataaatccctaacatcattaattacataaaatctgtaacaaattttcaatcaaatttcttttttcttttcttcctctccttcaaattactggcattcggttcaatttgttcaaattttaattctaatcatacattttaattatacaatttgcctaaccttttaactcaaagtgaacaaaataatttatgcaatgcctaatttgattttagcatgattgcaacaaaatattcaaagtcaatgacattttgattcaacttttccaaaacacaaaattttgagcaaataaattcaaattaatgcattttcaaccaaaaatattcaaattattggcattttataacattttcgccaatctctcaaacaaaaactgtacagaaataatttatgacatgcctaaatgattttagcacatttttctgcaatacaattcaaacaatgttattttgattcgtcttttccaaaacgacgaaattttgagctcctaaattcaaactaacacattttcgtccaaaatacttaaatttttcaaaaactgttagttaatttggttcaaatttcttactaattcaaaaaacgtttcatcaatttcatttcaaattttcgtcatatttaaaaacaattcgtcagtacattcacattttcgaacatattaaaaaaaacatgcattaagtcgatcacttcttcatacaaatgcgaacactattt

SEQ ID NO: 41161 - DNA, 1249 bp, Heterodera glycines
  unsure (1)..(1249): unsure at all n locations
ggaccccgacatntggggactgacatnntaaggtcaaacagacttttggagacctgacatttggggattntaatgaaaaataaaagtgttgaaatatntaagtattcagccgaaattcgacaaaattgcatctgctttgcccacacagtcccaaaaaacgagagatgaacgaataaatagagagcgcagagaaaaatgcataaaacgttttaatttttagaaaacagttaaaaataatcgtatcgtggagtggactcgaacctccaccctttttgccccactgatgaattacacaagccaattttttcgatacggagcccattttccggacgctgtatgccagagttataaagaagagatgtacttttctctacactctctatttattggttcatctgtcattttttgggtctgtgtgggcaaaagcggacgtaatttgtcgaattttgggcttaattcttaaatatttcaatattttttcattgaatccccaattttcgcgccacttaaaaaaagagtgcaccacggcgctaattggattcgagtctaacctattgagctactttatgcgccatgggggtggagagagtataccaaaaatgagaatggcatgaattcaaaaataggatgccattcgttgaaggattttgctcaaaataacaattttaggatttctaagccgtttttaaatctttcttttatataaaaaatatttaaacaaattttcgacaccttagacattacggcgctagttaaaaagttgtcctttttgaaaattttttaaaaaagtcatgaaaatacatttccgggggctttcggggccgctgatcacgaatatgacattcatttcgaccaatttcgaaccccggacccggattcgaacaaaaagtcgaaaatcgtaaattttcaccaaaatttacacattcatgcaattttaatgtgtattttattagatttaacaagattaatcattaaaattataattaaaatgcaacaaaacattccttcgcatttgttcgtattaacattgaattcagtcccgtttggaagcgtgatgatttttgagaaaccaccaccagttgttttttgtgacgaattagacattttcagatatgcgggccattcgtcactgatgatcaccgtgcctggaagaaccaattgaagcagaagacgaatagaattcatggcaccagcctaaaaatgacataatcatatatgcatgaactaattttccgattgaatgctaggg

SEQ ID NO: 41162 - DNA, 1203 bp, Heterodera glycines
  unsure (1)..(1203): unsure at all n locations
aatccgtcagtggacaattcgtcatcaaatttttttgcgcaatgatcaaaaatcttgcgaaantgattgttaaatttagactgcagcgggaccgggagttttgggcttgaccgggaccttttcgggttgaaaaaccgggaatttttggctgggaaattcgggaaaaaaccgggactagtcccggtcccggtcaaaaccgtgacctcggtactcagttgtccgtgtttaggtaccgcccggtcttgctgcactcttttttaagtgcaaaagtggtgggtgtctgcaaaaaattttcaccgggtttaaaaaatctaggaaaattagtaagcatttgtagtgttccgatacgtatctctgcaaaatttggtgagcccctgatcaattccaaattatttatggacgatcaaattttttgaaatttttttaagtgcaaaagtggtgggtgtctgcaaaaaattttcaccgggtttaaaaaatctaggaaaattagtaagcatttgtagtgttccgatacgtatctctgcaaaatttggtgagcccctgatcaattccaaattatttatggacgatcaaattttttgaaatttttttaagtgcaaaagtggtgggtgtctgcaaaaaattttcaccgggtttaaaaaatctaggaaaattagtaagcatttgtagtgttccgatacgtatctctgcaaaatttggtgagcccctgatcaattccaaattatttatggacgatcaaattttttgaaatttttttaagtgcaaaagtggtgggtgtctgcaaaaaattttcaccgggtttaaaaaatctaggaaaattagtaagcatattgtacgtgttgttgataatgtatatgtgcaaaatcctggtgagacctatagatcacattacataatctatctatcagtcggagcaaattttttcatatatctgtgagggcaaaagtggtgggtgttgtcaaacaagaaatttatggtggtatcatctacatatactactaagcattcgtaatgtttggatactgttctacatgatttagggcgagccagggttgaaagaccacattatcagtgcaagatatgttcatttcaatcttcattatagcagatagtggagaatgtggacaaaaagtgaagatagggcataacaaagttgacgccggactcctttctcttaaaggtctttagaaaaagagcgccgcg

SEQ ID NO: 41163 - DNA, 1167 bp, Heterodera glycines
  unsure (1)..(1167): unsure at all n locations
tgttttaaattatttataatcaatgataattagattcccccagtcgttcctaagattaaagcttgaaggtaataaaatttaatttataaatatatagataattcattcattagattaattacctatctacattggcatgtccagcaaaacgcccaaaattgcggattgtgctggtcatttgctaaaaaaaataaataattttatttgtttttttaatcttgttttatatttgggtatgttcacttcaaaattgagagatttcctgtccattattttcggtctcgacttttactgcatcattgtttattgatatattctagattcactcatcaataaattttctggtttccatgtttagtaaatcttatggcatttcgggattttctctgggttcccgctcgcctttttccattttgtcatttcattatccaaaattccgatttattaattttcattttatatttaaaatgattaattccagaaattaccgctgctgtctcatttatatttaaataatttatgtagccgagttcggtgaggagttttttgatgttttgctggtcaacatttgagccacatgagggcgtatcccctagtttttgagcgatttgggtacctaaaaatgcaaaataaacaaacaattaactaatgaatgttttaatttttgtttaattatttataaagaaattttttttaatgtttgtgataataatttaaatattttttattttgtataaggctgtactcgaagccgttccaaattcggcggaagtgcaaccatgcttctcagggcaaccacctttctgtcccataatccatctctcacatcgatctccattgcttgaaactcatggcgagactcaaatcttgcattctgtataaaagaaaagaaaaatatgatttaattataattatatttttaagaataatttaaatattgaataaaaaatttaaataagcaaattttatttttagttttattttaaaaaatttctcaacattttgcgtaaaatatttaattataaatattatttacttcggtaaatatttaaatatttttgttatctgtttttcacataccgcatctctgccatgtgcaaatgcgtgctgatgacatgaacgattgtggnccaatgaaagagatatcagtaaatttatcaatgaatc

SEQ ID NO: 41164 - DNA, 1323 bp, Heterodera glycines
aatgcttgaatatatgataaataatgttcatttgcaattctcactaccactatcagaaaaatataactgtacttttcgcttcataagactagcatttctggttacgaattcgcgcatttttggctttcccggattctgctctataccacaatttccacataagtaagtattccttgtaattagaggttaatcacgaaattatatgttagatcgactctttcatcaaaaccatggtgaagagaaagacatttttaaactttctcaggtagacagctaaaaaccattttattttttacaataatgcataaatgtcacaatgtattcgactcaatttcaacatgtaggaataggatgctacaagaattcctaaatattttaattcctaaaaaatgctagaatatatgataaataatgtttgaattgcaattctcactaacactatcagaaaaatataactgtacttttcgcttcataagactagcatttctggttacgaattcgcgcatttttggctttcccggattctgctctataccacaatttccacataagtattccttgtaatcaaatattgagtctagtcagcccaatcgattgctattcgaatggtttggggtcgttggcccaaacaaaagttgtgctacttcttgcaaagaagacttagccaactgtaaacagcaagccatccaaatgcttcaatgtaaaaaaaaaaattacatttggatgcaacctttatttttcctcgcctctcttttcgaaaagaaaagctattagcaagcgtatttggaccaattctaaaacaaatcggagtaattaatttaatctgactttataagataaatgggaatttaagcgaaggattcatgcagaataataatctatagaaattctcaaaaaagtagttcctcgcagattcggggaccgtttctataaagctagagacatatgcgctaaccataaaaaagatgaatcattttttgaaaaatttatatagttcgactaaatttgcaaatcgatttatggtgtacaggatgtttgtcgaaacataactcgtcaggcctttaagatagacctgccattgctattcctgcaaatattgagtctagtcagcccaatcgattgctattcgaatggtttggggtcgttggcccaaacaaaagttgtgctacttcttgcaaagaagacttagccaactgtaaacagcaagccatccaaatgcttcaatgtaaaaaaaaaaattacatttggatgcaacctttatttttcctcgcctctcttttcgaaagaaaagctattagcaagcgtatttggaccaattctaaa

SEQ ID NO: 41165 - DNA, 867 bp, Heterodera glycines
  unsure (1)..(867): unsure at all n locations
tgaagacttcaaaaancgtttatttcttcggatgtcttcccaaaaagtcagttgctcgtcgagcaattgacttgtgcccacattctgatgagaactacccacgtgtagtagaaattcccttgaaaatagcgacaaaattataatgtattaattagctaataaaattaaaataataaatttaattattacaaacactgatatttttgtcacttcgtcctaggcacaggagagttgttgtcgctcctaatatgcgacagtaaccaagagaccgtccttagtaattaagtctagaggaaccctttctttattaaatttgaacaccaataaagttattggtctttcttcatcgccccgaggctatgataattgtgccctatatatttgagttggtgcaatatcgttataaaaactagagaccggaccgggccgggcccggtaccgggttttcccgggcccggcaacccggcccggcgatttttggagaaatccgggttgaccgggttaaccgggttgaccgggttttgagaggccgggcccggaacccggtcgtttttgaaaatgtaacccggcccggaacccggcatttttgaccgggttttaccgggttatgatataaacaaaatttgttctttttcctacgaaaatctctttggcataatgtttataaatgtttgtttgtcaattttctggttaaaatttccattcggagaattctactttatagaaatgataatttcggtctttttctttttaattttagagaatgagtcttatttggcaaattggcctatttaaaaaaacgtcaaagactacagcaatttgtcttgaatgtcaagcaaatggaaagcttaaatataaataccagct

SEQ ID NO: 41166 - DNA, 1041 bp, Heterodera glycines
aagagacaaattccaaaaacgaattttaggagaagcatttgaagaagaaaaaacaaagcaatgcgtaaaagaaaaagaaagcataaaaggaaacaaaaaaagaaaagaatggactaattaatgggaaaaacggaaggacctcgtgggttttaatgataccctcaattaagaacaattaactgattaattaattattgatgaaggaaaatggaaagctacgccggaaagaaaaccaaatgatttagggattggggaaaatctcaccgaattcgcgcactttcggcatgaaaaaatggatgatggatctgtcccattcagttgttaataaattgcgttcggtgagaaatgaaaccataaaattaattttgaatttgcgtcactcattatttgggattaaaaatgtttggcgatccgtccgtcctcgtctctgcccactttagctgttgcgtctgcttttggttgttatttttgtccatgtcactctcgcgcccctcgccgccctctctttgcgccattgtcttttcactttcttcgcttccctttctttttccactatttttctgctgtccttttccgtttttcagtggcataaatcgcccgtgctgatcgcgtttcgcattgtgtacagtgagcgacaacagatggtgctgatcatcgctttcgagcgcatttggtgagtggtttctgtgtaccgtaaacatttcaattttgttactgtcagtttcactcattttccattctgatcagtttcccttgctggtgtaacacgcctccctttttgctttaaatatcaatgtttcagcttaccccgtcgatgggctgtacgtgtccgacccctggtagcccgagtcgcgtgtggtcttcctcgacaaattgttcggtaaaaacgtgccgttttcgcccggcactgtgccctcctccccctcctccatgccgtcctggtcttcttccgcctcacttcgctctgtgccaaattcgatttcgtccaaatcgctctcaacaaaggaatattgatcaattgggttcactgccagcgaatat

SEQ ID NO: 41167 - DNA, 1209 bp, Heterodera glycines
atgcttaaattttttaaataaacaacagatttttatacatcaagttgttcttttttctttttgaatgatttcttgaaaaagccgggtattctagtctggacccggtcgggtcaaacccatgtaaccctaaataaagttaatgatttttcatattattttctgatagttttttgaagtggaaacttttttctatatataattctgatgataaatatatattctccgtatcaaatataatgcatcgcaatttttcgtgaatttgaacactttccgtgaattaccaagcacagattctttaaaaaaacattaaaataaattcgaaaatataaaagaaaataaataatgaattttttctgtaaatggccccaaattcggcactatctacaattttttagaaaccacttaaaaaattgaaaaaatttgtacgcatatttttttacaatcaaaaattctaatcacaccgaagatgatcagatctttccttcatgaagatcaatatctccaaaatgcgctgaaaccgggaagtttttagggaaaaaaacattcggtccgcatcacgtttcacggaaaattttaacagccaattttttagcctcaatagaatttttttatgaaatctacattttaagccatttaaggaatattgcatttaccatgaaggaatggtctgattttttcgcccgttttaacagctattaaaaatcgaaaaatcgttacaaaggaacatttcgaactgaaactgctcagatcactttaaaaccacttctatcgtgtagagtatagtcgaataattcaccatcagtcgggcggatccgaacccaaggcaaaattgccccaaatttgctgtaacaaaattatacgttcaaaactttgaacacatgtgaatatttttatagggcaaaaaaacctgaaaaaattcatgtaagaataatttttattcaattaaaattccattgcaccactgtaatcagatcactccttcagggtgatcaggattgagcagaatttcagtccctcaggaaattttgatcctctaaaacatttttctagcatagtaaactgcagccaattaacatgaacatcattcatagacatcttacataatttttgtttataaaaagacccaataaatctaacaacatccattacattgaaatttttagtgatcaaaaaccgcaaatgctggggtgaggtggcgaaaaaaattcc

SEQ ID NO: 41168 - DNA, 1201 bp, Heterodera glycines
attcaaggtccatttaatttagaaacttaggcaaatacctttttttatacaggcttattaaatcaaatttcaaaaaaaaaccggtccaggcctaggctctagacccacgttgctggatagacggctgtaatcaagaaaattcaaaatgatgtttttttttctcagaacgttttgccaacaaaaacaaaaattggcacatacaaaaataacataaaaaataatgataaaaaagttaaagttaaaaaaaattaacaacaatttttacttgttttatttatttttgtttaatctttatgtttttgaaattttattttccacttaaaagaaaaaaatcaaaatttttttttaccttttcaacttttttaaagaataaaaaaatacatctgccttttttatatagctttgccctgtaattctcttcttactctcaagtgttgtgtccattttatcaccatattttgaaattccaaaaattgttgctctgttgatttttaattgccaaaaatttggcttcattagtatgcgcttgcatatggttgcaattgcatttaatcgagctcatgcagtgcttttcccattcaattttgcgcaaaaagtcacaaaaaggttaacaaattattaatataattaattttttaaccgaacttattttttctttgtgtttttgatttaaaaaaataaattaatttaaattaattttattaagatttcaacggctctcaattcccgagtcgagaaatttctcgggctttttgggtctcagttctcgtaccgtttctcggggtcatttcccggttctcaattttccgtaaaaaaaaattagcttctcgcagattcccaataaatctcaaacccagtgggttttacaaatttgccctcttcgagtattttttttatccaaaaattcataatatttgtttctaaaaatcagccagcttatattcatgtcatcgggggcaattataatccaattaataattcctttggtatggttcgaagaaagcaaatgataaatctatttgaacttgcaaaactgataaaattttcattccaaaaaaatttgggccgaaaattttccgactttttggtacctatcattagaaaaacttcaaaattttggactatttgaaaatgttttttattagtataaatatttaagcatttatacttatttgcgatttttaagcacctaaaaatggaa

SEQ ID NO: 41169 - DNA, 974 bp, Heterodera glycines
ttcatctccctttttgatagaaaaagtatcagagtgcctatactaacatgtaaataaaatttggtgcgtttcagagcattttctggaaaaaatatttatgaattaattatgcaaaaaataaacaaataatgaactctcttccttaataattttcctgcaccgaaggtactcactcggccgcttcgcggcctcgtggtgggccttccccccccccctcccacgcccttcagaacacgacaaatatttcaacaaaaatttttaaaaattgactagagcaatcgaacgctaacggacgacctaatggaaaaaaatccccgaaggagagaatttaattaaatccattccttcgggggaccgtgccgggtgccgcggggtaagcagtgctggttcgtttcatcacggcaccgaaccttttggctagtcagcaatcgttgcttaacttgccagatcggacgggtgcgcatgattccactgttccaagcaccccaccaaaagcaaaacgatataaccaaaatataaggaaaaattttttaaaaaattttttctccatcttcctttttgatattaaagcatcagagtgctaaaattaagttgtaaataaaatttggtgcgctttagagcactttctgaaaaaaatatttatgaaacaaaaaaatcgattttttcaagtgtccatttggggtactcaaacatttatggggagcaaaaatccaacgcagaattaaagtacaggctatagggaagctactccggaaggattcggtctccccataaatctgggcgcatcggttcggggggactgccccgaaaacaaaaaaatcgattttttcaagtgtccgtttggggtactcaaacaattatgggggagcaaaaatccaacgcagaaataaagtacaggctatagggaagctattccccgaaggattcggtctccccataaatctgggcgcatcgcgttcggggggactgccccg

SEQ ID NO: 41170 - DNA, 1718 bp, Heterodera glycines
ctttctccagacggacactttgctatattttgcagaaccgttgaccaccttttccgacgtgcaacaaaagtattgggctccggtcattcaatttgtcaaccatcgcttcggtctttccctgtgccccgtggagagtgccgtcgctcaaccggaattgaccccggacaccttgcaaaacatggaacgacatctgctggggctgcaaaacacttttccgtcactgattggcattttatatgggattgaatcggtcaaaagtctgctgattatgctggccactttggaacactattttgatgtggacacagcggtcagactgagccgacttgaacaaatccaccagacgaaagtgtggggtaacgtggaatgggcgcacgatgttgaacataatgaacagtgtgtacgattggcagcttctgtgctgttcagccgatgcttttcttcttcgtcatcttttgcaaacgcatgaatcccttctgtttcggcatgctcttctgacaatgagtgcccacttttgaattttaaaaattcgcacattttaaaattgattttcgaatcattccgttaataagtcttttatttttggtactttcgtgcgacattcattgtcagttggtccctcatccttttgtttcctttaatagttttgctcataaaaggaaaaacgtacacttttattttcatagaaattgttcgaaatggcaatttggaatatttctctttcctggttactttttccgtcgattgtgagtctgtcattgtctctctgtttgatgcatgacgacggttacatccgttgcaaattgatccacagggccgagaggggcttgaactcgtaagttttcagatacagaatatgctttcacagttatcaaaatacaataccttatgttttaattattcatttttcctaattattagagtcaccggcttataccgaatttggctcccggcgatgtgattcaaattcgttctgcgctttcccacgattatgtggcgttccaatacacgtcggaatgtgctaatgaaagtcgtttcaaagaccgttcaatcgtcgtttgttcaaaggcattcgagaatcggaaagcacagtttccgactcgatacgatgttttggtgcgtcgggttgagaaaaaggatgtgagtttacaaatcgctaatgaattactttacattagcttcaaatagagtttaggttgccttggacaacattgagttgactttcaaggtactctacaaggtttcgccgattttggcttttgccttctatttggatgtcctttaggagtattacatttctcgtgctgacatgtggcgttttcgcaactgtttgatcgattcgtgtgtttacgtggggaagaaggaagaatggctcggcattctttgtactgtcagtgatttgtggcgcgccggtgaaagtgtgagttttcgcttcgtctcatatttggccagttttattaacttgatattcatgaatttggtaattcttgtttcatttccaaggtttggagtggctatgtgtccgaggaaaccaggcgagttcttggagcagttcgttccatcctctccctccggaaaattttttaaaaaattgctttgctgttaaaatttggtaaatggtcgcactttccctgaagagtcgtctttcgctcctcgagttcccaagtgctcattttcaacgaatttggcgaagagatgtgggacattgaccctaaggg

SEQ ID NO: 41171 - DNA, 995 bp, Heterodera glycines
aaaaagactttacaaaataatacccctgggagaagggagtggaaaacatgatttcaaaattttcaattttttctagtctaatctactcaaaccggttcagaattcaataaaaataacattcacggtgcgaaaaatggggtttgaaaagtttattttgaaaaaagactttacaaaataatacccctgggagaagggagtgggaaacatgatttcaaaattttcaatgttttctagtctaatctactcaaaacggttcagaattcaataaaaataacattcacggtgcgaaaaatggggtttgacaagtttattggggaaaaaaagactttacaaaataatacccctgggagaagggagtgggaaacatgatttcaaaattttcaattttttctagtctaatctactcaaaccggttcagaattcaataaaaataacattcacggtgcgaaaaatggggtttgaaaagtttattggggaaaaaaagactttacaaaataatacccctgggagaagggagtgggaaacatgatttcaaaattttcaattttttctagtctaatctactcaaaacggttcagaattcaataaaaataacattcacggtgcgaaaaatggggtttgaaaagtttattttgaaaaaagactttacaaaataatacccctgggagaagggagtgggaaacatgatttcaaaattttcaatgttttctagtctaatctactcaaaacggttcagaattcaataaaaataacattcacggtgcgaaaaatggggtttgacaagtttattggggaaaaaaagactttacaaaataatacccctgggagaagggagtgggaaacatgatttcaaaattttcaattttttctagtctaatctactcaaaacggttcagaattcaataaacttaacatgcacggtgcgaaaaatggggtttgacaagtttattgtagaaagaaagactttacaaaataatacccctgggagaagggag

SEQ ID NO: 41172 - DNA, 170 bp, Heterodera glycines
acctcttctaatcaaaaaaacgggcgcgaagcgcccgtccaaggccaacaaaaattgaaaaaccgggcgaagcgcccgactgaggccgcgaagcggcctaacaagctaaaaaacaggcgcgaagcgcccgtatgagttcaacggatttaaaaaacgggcgcgaaacgccc

SEQ ID NO: 41173 - DNA, 478 bp, Heterodera glycines
aaaaatgaaaaaacacgtcacgttcactccgagtctctgagacgatgtccattccaccaatgtatcgtcggtagcggagtctgagttcagcgttaaagagtgtgctgaagtgccagaaatattcaagtccggcaaaacgagaaatttggttagattctgattttgtttctttgcaggaaattggccgacgatgcctttcaaatattgcctttgcccgacatcgacccgagcgtcacttcgactccggcggtcgtcaacaatttgatcgaggtttggcacttaagttcttggcacttactttcccgtctcttttaggcggtcgagtcgctcgactcgcggatgcctttggcgttccaagagcagcagcaaatcctgaaaatgcagagcgaaatgctgcaactcggcgtcagttgcaaggaacactacaagaagatacatgagcagtccgtgatgcgttacaatctcgaggtgaccggac

SEQ ID NO: 41174 - DNA, 1481 bp, Heterodera glycines
tgatcagcggcccaaataaccactaatgacatgtttcctcccagagtttttggtgaaaaaaattttccactcaaaaatcctcttcacccccctttggtcccgaatccaaaatcacttttatttttgtatctttttttaaaaatgtgataaaaatgccaaataaaatttatttggtagagcaaaaaattgcggatttttgtagtatgttatttttccaaaatgacttttcagaagggagttaagaatttttttctgaaaattcggatttttccagaaattctggaataactttttttcatttgaagatagaaattccaaataaatcccataaaattctcccgatttttttgctatttttaaagctttaattcacttaaattgaccagtcctccattgagttatgaattttcgaatattcgaccaaatttccaaggaccaaaaaaattaaaaatattttggaatttttaaaaaattccaaaaattctgaaacgtaaaacaaacatcatattcgtgctcagcacctcaaaataccccagaaaaatatttttgaccccctttttcaacccaaaaaaaatttttgaaaatttctagggggcctagctcgaaaaattttgaaaattttcgaacatgtagtacaccattcgatagcatttaaaaagctctacaattttgccctaaggagttttttcgataaaaccaacccctgacgagttatgggcccgggactcaaatgtcccgctgaggccaaaatttttttctatttccgggaaaaaatcgaaatttttccgaaaaaaataccagtcgatagagctcgaaaaactatgttttggaagtggtctccgtttctctgggaaaaatcgttaaaaaatcctaaaattcaaaaacccgaaaaccgttttttaggcctaactcgaaaaattttgaaaattttcgaaattttaaaatgtcaaaaaatcgagctttcaaatctctacaataagttcgctgaccaccccccgctcagatcaaaccctggcgcggtattcacctggtactgaagtgtactttttgagcacgcttcagttgccattttttgcaggccaggggtttgctcaaaaaaaattttaaaaaataccagcatttagaggacactttggcggagtgccctcacagcgggcactttttgattcgagttttacaaaaaaagttaggggccttcaaatgcaaacaaaagtgacaaatcagtccccggtactcagttggcgctcggatcaaaaaacctatagttttcccggattctcctcaaaaagttgtaagacccttccactactttcagacccgtcccattagccgttaagctcaaattagtttttgaaacgaaactccttgtcaatataacgtatatagtaactagcgggtgcgtgaaccgtcggctatttagctgggaaaaagcgcttcgcgctttgggagcttcgctacctaggctgtgaagcgattcaaat

SEQ ID NO: 41175 - DNA, 924 bp, Heterodera glycines
  unsure (1)..(924): unsure at all n locations
ctgaaagtcacgattaaatccctaccgtgaattggtccttctttttgtcttttgttgtagcgctgaataaagcactaatagtgtgtttgaaaacgcacgaaaaatagttcttgacaaaaaatggctatctctgaaagtcactattaaatccctaccgggaattggacaccaacttttgtcttctgttgtagcgctgaataaagcactaatagtgtgtttgaaaacgcacgaaaaatagttattgacaaaaaatggctatctctgaaagtcacgattaaatccctaccgggaattggacaccaacttttgtcttctgttgtagcgctgaataaagcactaatagtgtgtttgaaaacgcacgaaaaatagttattgacaaaaaatggctatctctgaaagtcacgattaaatccctaccgtgaattggtcaccaacttttgtcttttgttgtagcgctgaataaagcactaatagtgtgtttgaaaacgcacgaaaaatagttcttgacaaaaaatggctatctctgaaagtcactattaaatccctaccgggaattggacaccaacttttgtcttctgttgtagcgtgaataaagcactaatagtgtgtttgaaaacgcacgaaaaatagttattgaaaaaatggctatctctgaaagtcacgattaaatccctaccgggaattagacaccaacttttgtcttctgttgtagcgctgaataaagcactaatagtgtgtttgaaaacgcacgaaaaatagttattgacaaaaaatggctatctctgaaagtcacgattanatccctaccgggaattggacacaacttttgtcttctgttgtagcgctgaataaagcactaatagtgtgtttgaaaacgcacgaaaaatagttattgacaaaaaatggctatctctgnaagtcact

SEQ ID NO: 41176 - DNA, 616 bp, Heterodera glycines
  unsure (1)..(616): unsure at all n locations
agggcgcttctcacccgttttttaatattgttgggaacattcggccgcttagcagcctcaggacgggcgcttcgcgcccgtttttaattttttgggggacattcggccgcttcgcggcctcaagacgggcgctttgcgcccgtcttttaattttgttgaggacactgggccgcttcgcggcctcaggacgggcgcttcgcgcccgttttttaattttgtggggaacattcggccgcttcgcggcctcaggacgggcgcttcgcgcccgtttttaattttgttgggaacattcggccgcttcgcggcctcaggacgggcgcttcgcgcccgttttttaattttgtggggaacattcggccgcttcgcggcctcaggacgggcgcttcgcgcccgttttttaggggtacaacagtgattagaagaggtgcaacagtgattcattaaattaaaatgaaaatttttttaacaaatttaattaagaaaatacatgaaatactatcaattaaaaaaataattaatttaaacttttaaaatttattcatcaaaaaaaaattaatttgaatataattttttatttattaactcaacanaaatattttaatttaattaaaatcat

SEQ ID NO: 41177 - DNA, 1416 bp, Heterodera glycines
  unsure (1)..(1416): unsure at all n locations
tttgcacttacaaccgaaatttcatagacaatttcctgttcagttaaaacggaaaccgacggcggacgaacggcactttgccatctacggtttttcggaggaggcaattggctaattgctgcttgggaagagaaaacttgtacaaaaaaatctttttattacaataagacaacggcggaaatggcggagaaagtgactcatcgggcaaattcggtcgtaattgaacgggcgcaatttgttgtcgaaacggagaatttggaggagtaactgaagcagaaatgacttttgaagttcaaaagtgagttaacatttggtagcaattggcggtgcttcttggaatggcaattggtcgtattgttctgcttttacgggaagtgccattagtttgggggcttcgtccggcatttggagctggtgaagcgccgatgggtcaaactgccgtgggaactcattgggtagagtggctgatggactgccaaatgggcgagggaatcggtccgaatctgccggaaatgccttaaaagtgccaattaattggtcgttgaatcatgccgatgcacaattcgctctttgggtcccagaattgttggcgtggacagtgctgccgggtgtgacttggacattatcggcgtcgcctcctcctcttcgactacgtcatcaaaggtcaccggcacagaacgagcccgaagtacaaagtcctcgatcataatggcaccttcgtcgccctccaatccgaatgggtcgacgagtttcttcttccaaatgatcacgtcgacgaactcagcaagtaaactctttattttccccccttcggtggtctgcacggagtaatacccatcttggtagtcgccaaagtcctgcaaaagtcgccgaaaggcgacgcggtactgaaacagacagaaacagacaaacagacaatgttaaaagtggtcggaccggcggtccatctccgaatttgctccattggccaaagttttctgactaccttaatagcgcaaagtgggaacggttttggcacaaccaaccttagtcttcttgtccacactcatcacacagtctttgttgacgccgaaaagtctcgggatcagtccttaaccgatcgggggtttttggcacccngcccatttcccccgccctccccctgttaattaattatcgcatttgacccctttccttactgttcccctgcggttccttcacttcgaaaaatatcattccgtaagtcggcaaattcctgcaaatgtcacagtattttcgcttggccgcaaatgcatccgcaaatgagaagttacggtactgctgaagaaggaaaaaaacattgagcagaagcaaacggacggcggagggatggcacggccgacaagcgaaaattgccattcctctgacctcaattatgtttttctcgtgctcccgcga

SEQ ID NO: 41178 - DNA, 1936 bp, Heterodera glycines
  unsure (1)..(1936): unsure at all n locations
tttttttttaaatttttttttaaattttttaaatgcgcaaaatttttcattaaaaatttttcgccaaaaaaaatattttttaatttgacagaaatatgtattacatttatgtttaatgcaatttttgatttttatgggaataaattaaaataaatattttgataaagaaataaaatttgataatgaattgctcacaaaaagcaaaaataaaaattacaaaatgaatttacacataggggattcgaacttttgacccaaaaaaaattttgactaacaaattacctctacactaacaatttctttgaagaaaggaaatagttgttccttttctttaattataaaaaactaaaaactttggcacgtcataactcggcactcgtgctcatttggcagaaaataaaaccatttttcttaagaacccattggtgctctatccacctaaccaagtttcattttgaaatcccacaggacacttggagccctctccctctttttttttacagacacgtaaaagagtgatgaagaagctgatgataacgatgcaaattgaatgatttatctaatttaattttactttcgatgtttctttggaattttataaatatttcttttcttttttaggctaaatttcattataattataaatatagtttaaagacaaatcaatttagaatataatatttaatgtatttcgttgtcgaaagatctgttttaggttagtaggcaagatgttgagtaggcgaaatgtccagtaggaaaccgtccgattttgggttaataggcgaaattaaaaaatccaaaatattaaaaaaatcgtcaaaacaattttattagcataaatttggattaatatggtgattggaaaaaacattaataaggattaaaaatgaaaatagaacaatatcaggtgaaattccatttttgcaaagtaatcataaaaatcaaagtgattatagaaacttaattgagttattatttttaattgaattataataaaacatgatttacatttttatttagccagtaattggttattttctttttaaaatatgggactttttttgaatataaaaatatataatattcgattctttgtttaggttttttaattcattgttgtgtagtccaaattacggactgaattatgccgtcaataggtaccacttcataatatggatgcaattataactaaatatatatttgcctataattgcatgatgtattaaaggatatattaaaatttaagctataaataaattatattaaattttatttatgaaattgcatacatataaaaattaaatatcctgnnntaaagttgagtattcatattaattttcaagcttccaggctgcgaaggatttatttttagatttttttcttcttggactatcaagtatctaaaatcaaaattttgtcaaggaaagaaaagacatcaaaaatagggattctaaggtcggataggggcgttaaaacgaagaatttccgaacaataattttttccgtgcatttctcgtcgagttaaagccgcaaaaaaaaaataaataaaaccctaagaaacctcgccatattattaataaataaaattttaatattatgtataattatttactaaattctttatttatttttgataagaacacaaagtattaaatgttattttaaaatgaatagttttttaagcttttataacattaattcttttttatatttttggtattacgtgttttaaaacaccaggaaatttttcttttaatttattttttaaattttttttggctcttttccttggtttaatataattatataattccgctggtgtgaagtttttataaatacgtcagtccctatgaaattgttttttcgggttcaccatgttgacatgcgcttgtcattcgcccatttgacgaaacgcaaaaagactctagaggtcccc

SEQ ID NO: 41179 - DNA, 1277 bp, Heterodera glycines
  unsure (1)..(1277): unsure at all n locations
caaagcaatgaaagatgcgatgcgtaaataataagatttaatgaaaaaaataaattttctttttttntaatgtagtttaaacattattttgtttttttacaagtcggaaatgctgctacataaataattatcatttaaggccatttccgctatattttattataaaaaaaaattgattaattcatttacgtatgttgtatttcatcaatattaaaaattgtaaaaaaaaattattttattttcttaatatttttaattcgtttaaatttaagttaaaaatatgcaaagcttcaaaattattttgtattttacatttcttttcattaaaattgttttcgcaaatgcttctcctcatgactttgttgaagtttcctcttctgataagggttacataattaaaattctatataaataatattttttattttattttttcaatttaagagagtgttgttatgccaagcattgatgacatggaagttttaattgagcatgcaaaattttgggcacacaaaattggcttgataattcataccaaactttttgacaagtattatagattattcttcattaaaaaaaaaattatttttgaatattatttcaaattgttttaataattaataaggattaaaaattaagcaaaaaaaagtttcaaaataagcagataaatcgaaaaaaaaattaattaaaaaaactaacgggaagatttgaattattcaatttttaatgcaaaaataaatcagaaattatctttttaaataatacaataataatgcacaatatttttaaaattgcctaaattttttcttttcatttactcgggggtagacagaacaatatgttcttcaaattttccaattttttgatgaaaattggaaaattttgatttacttggggagtagaaagagttaataactgaaatttctgggccaaatagcgataattaataataaattaataaaatattttagaaaagatgnngnnaaatttttgtnatttanantgttnntgtnannaatnnngngnngaatttttangaaagnggttnatttanaaaaagtaattaaaaatttnaaaaaaataaataatttaaaaaaaataaaanttaggnattnaatgggntgtantttngngtttnnnaagaananaaatttntgattgaaaagntgaaanngnttgngnattnaaatggnngtgttcgngtttggnttaatattttggaggaagttnaatctgagtngattgttcggnagtcgattacattgnttttggnccga

SEQ ID NO: 41180 - DNA, 867 bp, Heterodera glycines
tcgtaaaagtcgaaaaaaacaaaaatttttctaaaaccttcctggcttagaaaattcatttaaaaacaattttatccgacttgaaaacaagtaatatattcaaaaacaaaaacaaaatgagcaaaaaattttttttaatttattttcagttagaaccccccaaaaattctcgttaatttttgatggcgccaatctatggcgcagtggtatgcgcaagattttcatgtgcgtcgaccggcggttcgactcccatcagaagggcacaaaaaaagtccaccaatttaaaaagcaaaattcgtcaattgaacataagcgaccaccacaccagcagcagcaagcaagcaaataagcaggaaggaaaatcatttgccaccgccgccgccggaaaagcgatgcttctcatttccctgtgccctccgggggcgaagggactcgacccccgcccccgggggcaaaccccgagcctcccgccccacccccggcttcttctctcgggggagtccaatttcaatgcttttgccacccgccccgcctccgtcgtgtcccatgccctcgggcgatttaaacaaagtccaaaaaattttttaagagagaaaattgtgtgtgagagagaagcggatttgtgaagggggggggtggaacagcagaagtaaaaaggaaaatttttgaattttttggaagggtgagaattttctttgtaaatttcgaaggaatagaaaaattttggaaattaaaatttcgggaaatttcggagcagaaactctgtatataaaagctaaaagtaaatcaaaaatttaaaatatcccaagaaacgaattcggatatcagaaaaacataaactaattttttcgaaatgacacgaaattt

SEQ ID NO: 41181 - DNA, 959 bp, Heterodera glycines
gggattctagggcttaacgatgtcaaacgtaaaatcttttcacgtattcatgatcagcggcccaaattacccctaatgacatgtttttggaagatttttgtgaaaaaattttttcaatcaaaaatcctgtccaccccctttggacccgaatcacaaaatcacttttatttttatatctttttttaaaaatgtgataaaaatttaaaataaaatttatattatagagaaaaaaattgcggatttttgtagtattttacttttctcaaatagcttttcagaaggcagttacgaattttttactgaaaaatctaaaatttccagaatttctggaataacttttttcatattgatgttagaaaacctaaataaatcccataaaattctcctgatttttctctatttttaaagctttatttgctcaaaattggtcaacccttttgctagatatgaattttccaatattagcccaaatttccaaggaccaaaaaattgccaaaaaataaagaatttttaaaatattccaaaaaatctgaaacttaaaataaacatcatatttgtgctcaggaccctaatttaccccagaaaaatatttttcaccctctttttcaacccaaaaaaaatttttgaaaatttctagggggcctagctcgaaaatttttgaaaatttcccttcatatagtacaccattcgatagcatttaaaatgctctacaaaaatgttctaaggcaatttttggctaaaaccgatccctgacgagttataggcccgggactcaaatgtcccgctcaggccaaaaattttttctatttccgggaaaaaatcgaaatttttccaaaaaaattaccaatcgatagagctcgaaaaactatgttttggaagtggtcttcgtttctctgggaaaaatcgttaaaaaatcctaaaattcaaaaacccgaaaaccgatttttaggcctaactcg

SEQ ID NO: 41182 - DNA, 1046 bp, Heterodera glycines
ttcaacgccgcatggattggatttttgttccgacatgccggggcactggattcagatgtccgcggccaaggacaatctgatcaacttcagatcagacgaattgactttaaaattgagcggcgacaacgggcagagctttacgaaattgaccatctcattgccccatgcggcgcatgcaaattccccggccaacaatttcatttgtggtaacagattttcttaaaaaaaaagaaagacaatcattgattgtatcgggtgagcagcaagggaaccgcccacttcggcgcggtcatttcggtgcggccacttcggctcgggtttttcggcgcgaggttttttcggcgcgggctttttcggcgcgggctttttcggcgcggccatttcggcgcccctgataaaatgacttttcggcgccctaattagaattcttacaaaaagtgatccgcgtttccaaatttatcttttcgataattttcaaaattaatttgtcgctaacaatacagattcagatgtttaaacaattttccctttattaaggatgacagaaattgcaactattagacaaaaggaaaagatgatgaacgatggattcctctacattttcgacaaatttaatgtagacatcagcatgaaattctggcgatgcgaatacaaggacgaatgtcgagggcgaatacacaccgatttgaacaacaattttgttaaaatagtcactgaacacacacacgaagcgaacattgccaacgtgaaagcaaaaaaaatcgtcacggggatcaagaggcgtgcggcggagtgcatggaattgccttcacaactccgcgcaaatgcaatggtcaacgtttcaacaccggtgcttgctcagttgccaagtgccaatggaattaagaaggtaacgaaaagcagacacatactattattttttgctttgtttttcaagcgcggtgaaggacctgaggaggagcaatatctactatctgactctggcgttttttcacttaatgccgacaattcccaacatcggtattaattaatgtgacatattttta

SEQ ID NO: 41183 - DNA, 1433 bp, Heterodera glycines
  unsure (1)..(1433): unsure at all n locations
aggaccgaccacttgaaaattttcaaggttagaacccgcctttccaagacgttttgacaaaagaatttaaattagtctttaagaattgacaaaaaatgaaaaaagccgaaaaatcgaattttctgtaagaaaaactctcttttttaatgctttttagtccccttaattggaattttccgcccctaaataaaaaaccgttttgaatgtaaatgcctaaatgccataattataatttttattcccaccgatgctgcggggtcaaagcaaaatctgacgccgctgggcttgagtttgccgacaaatccaagtaattcgaatatccgtacaacgattgttgctccctttcgctggcatttcttcgggaatttcgtctcgaatttgtcttgtcaacccatgccgcgagcatttgcctcatatttgtcactgttggacttgcgctgggcgacatattctgccatctcaacaaccctttcttcttgtccggaatgggtactgaatttataagctaatgagtctgagttttgagggtggacaaattttatgattaatacctattttacagaaaggcataaaaatgcaaaattttccctttggcggtgactatcacaagaatttttttgaaaaaagcgggcccccaaaaatgtacaaaaagaaagtatcaatattttttaaaatttttaaaccaattttgaggtaaaaaacaatgctatatttggacattattttttttttcaattgaaaataaatttaaaaaaagctttgcctttaatttaaaaaagcataaaaatagaatttaaaacaatcaaattataataaacccacaattgattaccgatttgtccgttttgtacatccttcccgttgccatttcgtcgtgaattttgtctcaaatctgttccttcactaaatgctttgagcttacgcctcatctgtgccacatctgtgcctgcgctgggtgacggcgtttgctcccattttggcaacagtttcttgtcatgttctacgatttggccatcatttggaataccaatcgccaaaatggcactacaacacaatgccaatggaagaagaaaattgaataatggcattttcttaattanaattgattcactgataattatgaattgtatgtcttcgtgattgccgcggcatatttatatttgtgaaggagatacttaatggacagttatatgtctacaagaatcggaaaaaataaattagggtaatctttggtaatacaaaacaggaaaaataaataaaagtctaattttaaatgaataataaaatgaatttttcgggaatttaatgggccttgcatatgaataaatatgaaaaaataaatgatttttttctcataatattcaatgacggaaaaagaattatttaaaataaaaaaaaattatggttgaagttttgcattgaaatttgaaaag

SEQ ID NO: 41184 - DNA, 1103 bp, Heterodera glycines
tttaaatcggaaaaaatccataaaaaatacataaaccctaaaatatccaaataaaagtcccgatttttatacgccaaccttaaaaaagaaaagtgttttcctactatttaaaccatggagaagccaggaaaaaaaaaagccatttgccatgttttttgcagccctgtttattttcaatataaattttggaaaaataataaaaaataaaagtgtccatcagcaacactgaactttttggcgccattcagctgcagaacctttaaaattttgacgacggtccaatttgaaaaatccgctgatccccgtcgattgcaacggtcggttcgaactgcgcggatgggcagggctcgagttgggtcacaaacgatgggtctgtttttaaaaaaagcataaattattttgaaaataagaatgcgacaggaatttttgaaaaagccgggcatagaagtgccgaaaaccaaaaaagtcggcattggcactccgatttttaaacataccctcaatttgctgtcgatattccatgttgtagcggagaatttccatcagactctggtcctgtcgatggcaagtcaagttcggaggagtgggcatataaacgcacttaatcgtctgtccaattggcaccatacagtcgggctcggcggcacaaagcaaagccatgcaattttaatttattttgtttagttgggttgagattttaaccaaataattcttataaaaaatgaagcttatgctatgataagactgcatacttttctattttgtcccccccccccccctccctggatatgaagccgtgttgggacatttcctaaattccgccaatttgtgcaataaataataaattagtccatatttatttactacacatcatatgcctgatggcggatttagggaaggtactagcaccttatgaagaagctacagcattttacgccaaaatgtcttttattgagtgaaaaaatttgatggttcgatttggttaggacattcaaacattacggagtcggaatcataattgtattgcatttctcagcagttcaaattacccctaaaaatctaaatgaaaaaaatccaaggcttgtgacaaaacagaaaagtac

SEQ ID NO: 41185 - DNA, 1012 bp, Heterodera glycines
  unsure (1)..(1012): unsure at all n locations
aaaatgactatctattttcacntattttatacgataatctaaaaatggaatatgccaaagccccatatatccacatgattagacttagctcgattttttaggctatgatgtctaaatttgactcttaattttctgttagcctcaaaaaatgactatctatttttcaactatttttatacgacaaatcgaatatggaatatgccaaagaccctatatccacatgattagacttagctcgattttttcggctacgatgtctaaatttgactcttaattttctgttatcctcaaaaaatgacaatctatttttctactatttttatacgacaaatcgaaaatggaatatgccaaagccccatatatccacatgattagacttagctcgattttttaggatacgatgtctaaatttgactctcaattttctgttagcctcaaaaaatgactatctatttttcaactatttttatacgacaaatcgaaaatggaatatgccaaagcccatatatccacatgattagacttagctcgattttttcggctatgatgtctaaatttgactctcaattttctgttagcctcaaaaaatgactatctatttttcaactatttttaatacgacaaatcgaatatggaatatgccaaagccccatatatccacatgattagacttagctcgattttttcggatacgatgtctaaatttgactctcaattttctgttagcctcaaaaaatgactatctatttttcaactattttaatatgataaatctaaaatggaatatgccaaagcccatatatccacatgattggacttagctcgattttttcggctatgatgtctaaatttgactctcaattttctgttggcctcaaaaaatgactatctatttttcaactatttttatatgataaatctaaaatggaatatgccaaagcccatatatccacatgattggacttagctcgattttttcggatacgatgtctaaatttgactcttaattttc

SEQ ID NO: 41186 - DNA, 1020 bp, Heterodera glycines
tttttccgttttgttgaatccattatcaaatgcttttttttatcagagcattaataaatttcgatttatcatttatataactaaaatatttttaatgattaaaataatattaatttatttatagattctgcacgcgaattaacaccatttttttcaataaaccaccttttcattatccattttctattaagatcacatgaacttcactatttccttaatttttatcgcgtaaatcttataaaagatttaaataatattaattttttaagattctacaccgcgtctgaaaccttcaaatctgtaagtaaaatattttccaaaaagtgctaatttttccgttttgttgaatccattatcaaatgctttttttatcagagcattaataaatttcgatttatcatttatataactaaaatatttttaatgattaaaataatattaatttatttatagattctgcacgcgaattaacaccatttttttcaataaaccacattttcattatccattttctattaagatcacatgaacttcactatttccttaatttttatcgcgtaaatcttataaaagatttaaataatattaatttttaaagattctacaccgcgtctgaaaccttcaaatctgtaagtaaaatattttccacaaagtgctaatttttccgtttctgttgaatccattatcaaatgctttttttatcagagcattaataaatttcgatttatcatttatataactaaaatatttttaatgattaaaataatattaatttatttatagattctgcacgcgaattaacaccatttttttcaataaaccacattttcattatccattttctatcaagatcacatgaactttactatttccttaatttgtatcgcgtaaatcttataaaagatttaaataatattaattttttaagattctacaccgcgtctgaaactttcaaatctgtaagtaaaatattttccaaaaagtgctaatttttccgtttctgttgaatccattatcaaa

SEQ ID NO: 41187 - DNA, 1539 bp, Heterodera glycines
  unsure (1)..(1539): unsure at all n locations
aaaacgggaggcaacgccggagattgggatatatattttttagaatcacnaatgaaatgtgggtatgcatgcccagttaattgcttaattatctatcttttntaaaggtttgccgtccgctgattcgatcaatcgtcgcacttttcgcgcactttttttcattatcactgtgaatgtcggcggttattggttcactactattatgttcttgcttttacttcccataatttcttctccaatcacgccattggttttgccatgtaattatctcaattcctatgaaccattggcgcagcgtcaatcggaccaattttatattttacaaggtctaaaatttattttaaaaatatttaacatttatttgcaattttagtacggattatcggcaggcattccaagcggaatttcccattcgttttcagacgaatttcaaatgtaactcaagttattccactgcagaatacacaatcatgagaatttctttgaaaaattaaatgaaatttaaatcttactgatattaatagccactttttaaaagtttgaaatgacatcagtttgtctaattgttgtcaataagtattaaaattacaactaattaatgaatttacatataactcttttgttgaaattatgaaaatttcactgaaaaatttttaaataatttttctttgtccatcattaatttatagataaaaggtaaatttataaattcgaaaataaaggaattaccgataaattttttaaatcctaaataaataaatttaacatttaatgaaaaccttgctaagaaaaagaaaatgttgttaaaatatgttgccaagcatttactgacggacggaacaatttatcgcaggcattttattattgacaaaatgtggcacgataatttctttaatgaactaaaaattattgcttactataattgtttgaacaatggggaatatgcgctcgacagactccgcgcattttaattgtcagaattcgtcccgaaaagtacacttacgtaaagggctttcaaataacttgacaaattgattagggtttttactttttaatttaagtttttgtttttgtgaattccaagaaaattaattaattgaatataaattccttcattttatttttaattaacttcttggtcaaatcatttgcattgggaattagtatgtaattaaagaaaatttagaattattcctgattaacctgaaaatcaattaatctttagcttttttaccatacaaattctatatgaccaataaattaaaattaattaattgtgaaataaatttggatttttatcatcaaaaaaagccgcagaaaaatggtattttttcataaattggagtatattttcgaaacgtcaaatacctactgagtaaaatttagatttttccaatgcttcgtcaattgcttcggtagcaggagtgccaagtgtcaactcattggcacaaaattcccaaaatcaaccagcagggtaattaaaaaaagaatcttttttttaatattaaattcattaacaatccattaattaggcaagag

SEQ ID NO: 41188 - DNA, 1235 bp, Heterodera glycines
  unsure (1)..(1235): unsure at all n locations
tttatctgcattaataatgaaaatgtaaatgcttttatataagctgagactcattaatccactcccgattgggatatcctataaatttaacaagcatctcggttgatccatcatctcttttcctctttctgaacaccttctcgatacggtagcttgtctctgcatcctttcttacgcgcgccagctcctgctcatagaagctttctttgaatttctcgccatgctcatccagtagtttgtaccgaattgggtgcaccgcttccagcacctcatcaatctccagtatttcatccccgtaattttgtaaatatcccttctctaattgccctttatctctgctcatgcgtacaaatttatctttatggaagcggggagtttttctgtcaaatgattgcggtcggtacattcgcttctacacctgagcatttgaaatattggacgcatcccgtgaacacgcgagggcgagctgttaattccgtccacaattttctgtactgtatccacccaattcagtgtctccttttccgcaaaatacctatacaatctctgcttcacattccggattgctcgctccgcaattgatgctttaactgtcgaatggacgggttcgtgcttctcaatttcccgctcctcaaaaaaatccttgagcaatctgttcttgaactcggtgcccttgtcggagaaaactcggtggggcgccatgggcatttgatcgatgagttgcttgaatgcctccaacatctcctcggctctcttgtttctcagcggtacaacaaacagacgtttggataggacatcaaccgcaacgacaggtaccgatgaccccgattgtggcgcgaaagagcttgaaaatctgccaaatccacttgaacatcggtcatgaatcccgctgcaatagttttggctcttgaaagcgtaccctgcggggacgcatcagagtgtaggtgcggtgcccatccaaataatgttgcacgtcctttttccgtaaatgcttaatcttttttcgcgcctctttccacagtgcgctaacacccgcgaacgctgctggggaagatggattattgtacaatttgtcaagagtggtgtttatcagctccatttttcgggcgaaattccttcttgattgcccgtgccgtccgggtggttttgctctgtgatggtctctttggtggagctgtccatgaatacaaaattgngtcctgtctaagtctctcctccaataggtccgctcctgg

SEQ ID NO: 41189 - DNA, 1765 bp, Heterodera glycines
  unsure (1)..(1765): unsure at all n locations
tgctcattttcaaggacgtccttgcatataaggacattttttattttcaagaaagagggcccatttcaaaaggacgtccttgccattcaaggacggataccatccctgtgttaatccgttattatcatttaactttatatttattaattagcatattatcaataaataattaaaatttataataattccatgaaactattcattgagacttttctaagaaagttaaatttagttattttttgaaagaattacaataataaaacatttcatacatgaaaattgtatcagcaaataacttgactgatttgcagccattgatagattttgttgaattttagtggtgattaaattttaaaaataaaatgaacattaaatgattaaattgctaaatattattaaaaatattttttaaaaattaattcttcctttttaatattataatctcgagtggcctatttaattattccaaagggattagccaccggtatacacttagctcacatttttttaatgtttttatttttttgatgtcattttttatgtcttagttttgctattttctaaattttttcaatatttctttttgaaaaaaataaattatcaaaataaatgcatattaaagtgagccacttttgttgcaaaatttgttttcaaataaacaaatttacaacatataggttcttttatattaatttattactattttaaagaaaataagaaaatccttcttttttaatatatcaatttatttcagattgtagaaaattttattcgtataatcgcagtttattttcatatatttaatttctagattataaagtttataaaaaatataacttttttctaatgcatctaaagcttagcatttgctataaaacatcttcataaaatggaattattcaaaatttaaatcattacnaaaaatagttttaaataggtagcaagtacaacaaattggttttatgttcaattttccaggcttttttatttatgcttagaattatattttttcgaattgtatttgacattcagtgattaaagcttataaagtttttttaataaaaaaaactattatttttaattttgcggtgtgcagctctaatatatttttcgcgctttataaatttaaattctattttttcaaatacgaatttaagttctattttcttgacttttcttttttataaatttcaattgtttaataaattgaatatttttattttatttatcgttttatataaataacatgaatacatcgctcctcttttttaaaattgtcaaattaattttttaggctttaataatcttttcagagaaatataattttacacttaatttttaacatttatttttcaaaagattttaattatcagatgttgatttcattctgatcaaaataaattattaatttaattttagttttagtttttttcgtatgaatttattttaaatgaattattacatttcaaattttcatgttgttcaattatagggagcaattaatcccatcatcagtttaaatgccatagttaaaatattattttaatatttatcataattgttcaaattgctgtttaaattttcagtttattttttttatttttaggttaataattaattaggtcttaaattagtacaatttttattacatatttttattagttcagcagttttttaatttaattataaaattaattttttttaatatttttatttataaatttagaaaatttttactatagatacattaattttctacatttag

SEQ ID NO: 41190 - DNA, 1472 bp, Heterodera glycines
gaaaaaagtgatctttgcgtgcctcaactcgttttgtgttgctgtttgaacttctgccacgtcgattcaattgtatttgtatgttgaccagtgacgggatccttgaattccattaatctaaaaacaattcagacaaaaaaaattgaaaaaatttgaacaaaaattgtggatacaaacgcaaggagtaccaaaaattctttattataacgtcaattcttcactatgaatcattattttggacttttctaaataactatggttaaataagtcacttttgaaacgaaatcctagacaagattctggatttttcaaataactaaatattttatgtttttttgtgatgaaaaagacaaaatttatgaaatcgtctaataaatggaccattgataaactttttttctgattgaacatttcctaaggcatgatagcaatgattaactgcttcacaataaacaaagtattgcatatgatgaaaacaattatattttttaattaatagggtccgatttttccaaggtaacaattgggaaaatcaaacattaaaatacaaaataatctgggtaaaattgcacatcatttatttatttgaatattcgataaatacaaagataattaagtgacaaatttgtcacaaataattaaatatgaaaattaaaatttttgaatcatcaaagaattgaaaaatcgaatttgaaattgggcccaaagttcgcctcgattctatcatcaaagctgaacaatgaaataaatggaaccaacggaagatcaaaaacagaagaggaagaagaagacgacgaagcaggaggaggaggaggaacgaacaatttggaagaagctaaaaaaagaaaaaaaaggaaaattaaaaaaaacattaatttaaatagtcattcagtcgtagcaaatgttaagaatcgcaataattcatacaaattgagaaatacagaattaaaaatttcaaaactatataaaatgttgtaatatgtctaattttatgtactttatatattcttaagcaaactaaatgtaaaatgctcgaaacactccttgaaaattgataattgaaaatggaaatacttattttccaccaacccaaaaggtgtccatttttggtgaagaaaatttgtcgaatggccaaattgacgccgcatccgacaatatcaccgacaccaaaagagtacttggcatttgattttctcgatgatccgctaatccaaagataaccgccgcttgcatattcgtaaatcgccgtgccgcaatgaattgtttcgtcaaacgaaatttggtgctgcttttcagccaacccgatgaaggcaatactaaaaataacacaatgaaatttaaagaaagattggcaaaatcaattgaaaaaaataataataatttttatgactcactgtttcatagatttgaccaaaacttcaaagtagaaaatgccagataaagctgattccggaaagagcgaatgtctagcg

SEQ ID NO: 41191 - DNA, 1782 bp, Heterodera glycines
  unsure (1)..(1782): unsure at all n locations
aaattattttaattcacttgttgcctttctgcacacttctcatgaataaataatataagaattattaaactaatttttccatttataaaaataactaatattgtatattttatcattattcactgatattttttgtgaagaatattttagaaaaaaaaaattcaaattttgaacaatttatatgattgaaaatattttaaaattatttctttttatgtatcatatattttttataaaattttttaaaaattcagttaccttttttaataaatttgtttcaaaataggcccaaacttaatttagggacgaaaattaaaaaatagggattttcaaggtcgaacacccaaaataggagaggtataggggtttatatgtaataccaaaatattaaaaaagtattttattgatttatatttattttttgaacgaaaaaattcaaaattatataaattattgtttttagccacttttacttttgtttttgatttttgtaaaattatgtgattccaatgatgattaagagtttttaattgttttttaaatgtatcgttaaattattatcaaaccaaattacatatttgtttaataggttaaaatgtttaaaatttcacattttatattggtattttattttttctatagtaaattttcatctaatcgaattatgccaagattactattgataaatttttaatattctattaagaatgaatgccttaacgtacgttgcttctttaagcattttgaagcataaaaaaagagaaaaatagacaggaatataaacaatgaaaaaataaattagaaaaaaatcaataatgattttttacaatcttctaaataaaaagaagcagatgataaaaaatgttatttaatatttttagataaatataaaactgagaattgcattttttaatattacagtaaataaattaaatttttttggtttggaaagaacaaagaataaatcattccttttagcacccataaaatatagtttaatttttcatttctttacatttttattaaaaaaaaatttataattataatttataaattggttatttgtaaagttacaattatgttcatacagcttaatttagagtaattaaacttaaaaatttgacatttaaataatgtaaatcattttgaatctcttgtaaagtggctgaattaaatcaaatatggaaaagtgatttattattattatttaattattatttagtcaaagctcaatttcatctatttattatttatttttgaatttttaattaaatcaaaagaataaaaatttaagaacttttaaaactattaataaattttcaaaaagcttttattagaaatttttggtttaaattaaaaaaatttatttactcttcaaaaacagcgttatttaatgaggcaattgttttgtgtccttcacttttaatacttaattaatgatttcattttcatggtttttgaatttatttttgataaaaaattaatttatatatttgttaatttttactttatcaactttttcaataaaaaatatcgtagcttatttttgaagtggataattgacagtatctttttgaatgtttatttgtaattcaagtggaaaaatttgaagtttttttcattttttaaacaggttttcaccaaaaaaatgtttaatttctggcgttttggaaaaattagcgaaatttttggaaaatatgggtgatggaggtctgtaccaccccgngaccgtccctagtcagtttagaactgtttaaggactgtctctaacttaattatttt

SEQ ID NO: 41192 - DNA, 1108 bp, Heterodera glycines
tttttcgtgggggggggggggggaactacctgctccgtgcaaaaaatttatgtaaaaatagcaatctgccaaaaaaaaatatcacaacttttaatctgtctcaaaaattcatggaatattttgtttaacgttataacttaaacggacatttgatgtacaaaatttagaacctgggttggaattgaagcaggcaattggatgaaaggaggaattgggttggacattagcggactcgtatttgcagtgacaacagccgaacttgtattgagatcctttgactttggaataaatggggcggcagcggggttcattttgaacttctctctgaaattagacgaaagtggaaggtgtgaaatgctaaatgctttacttttgttgctcgccattctcacttccctccttcacttttattttctcctcaataatcagtgccgtttcctccttctggttgttttcagtcccttctgatcctttctcacttttgacttcttttcccatgatttccggatcgggtggaatttgttgtggggtttgctgttcctccctgtgcaattggacttgctgagatgggcaaccgctgttcgctgcaacaactggttcagcgaatggttttgcgattggtcccgacggtgtagtcactctcggctcattggttacgtcggatttgtttctatcagagataaaatatgattgacttcactaatgtcgaattaaagtgcttacttcatgttatgggaagcattcgcttcgtagttcgaggctctactgccagtgtttttgtatggagtttggttgttgttgttgtattgattctgatatggtcgggactgttgatgttggctgtacccagatgacgaccgatgcggtttattgttgaagtgaccccgctggtggtggtgttgtgacgtttgagggtttggactcctccaattcgcggtcgattgttctgcgttcctttccccggagggctgtcctttgtcaatccaacgcttgccactgatcatgctggtgcttccactgaccctccgagaggccgtcccttccctcaccaccctttgctgtctttgctgctgttgaggctgttgcaatctttccgccggccgatggt

SEQ ID NO: 41193 - DNA, 887 bp, Heterodera glycines
  unsure (1)..(887): unsure at all n locations
tgtccgtttggggtactcaaacatttatggggagcaaaaatccacngcagaattanagtacagactatagggaagctattcccgaaggattcggtctccccataaatctgggcgcatcggttcagggggactgccccgaaaacccaaaaaaaattttttggataaaaattatttaaatgaactgactagataatatttaaaataggttatttctcttcctttcagtatccctgcaaagtttggtgcgcttctgatcagtttctgaaaaaaaagttaagcctaaactttttggcctgtttaaaaaggaattaaaaatttttaaaaattttattcatctccctttttgatagaaaaagcatcagagtgcctaaaagacgtgtaaataaaatttggtgcgtttcagaacccttctctgaaaaaatatttaagaattaattttgcaaaaaataaataaaaacgaaagactcagattttcgaaaatttttttgagccagctagctcggcgctcatttcagtgtaagttagtcctttaccggggagtatccctgcaaagtttggtacgcttctgctcaattagcaaaaaatatgagtgatcgaattttcactaaaaaagttaagcctacattttttggcatatttaaaaagcaattaaaaaatttttaaaatttaataattttcctgcaccgaaggtactcactcggcctcttcgctgcctcgtggtgggccttcgcccccccccccctcccacgcccttcagagcacgacaaatatttcaacaaaaattttgaaaaattgactagagcaatcgaacgctaacggacgacctactggaaaataaatccccgaaggagagaatttaattagatccattcctccgggggaccgtg

SEQ ID NO: 41194 - DNA, 1403 bp, Heterodera glycines
ctcatttaaaaatattattttttaaatttaattttgctttgataatgataaatctatgggatttggtttttttttagcaattttaaagtccatgaaacttggccaagaaattcgagacctcgctttcagctgcttccaacgcgacttaacgccggcgcaagcggccaatgaaatcaatgaaatgagaggggagggaagcgtgtcaaaacgcaccatgcaatattggtatcggaagcttgaaaggggagaagcggaggtgttcctgatggagaggccaaaacggcgaagccaccacaaaaggtgccaattttgggggaaaaaaattagggatggcaaaaaaagcgaccagcagagacgataattttgaaaaaaaggaacaaaattaattttttgggcgcaaatatctgttttttgttttcgggggcaaatgcccgaggcacaaaagtcagggcgaaagtgcccgaagcgcaaatgtccggggcgcaaaagtctgggcgcaagtacttgaggcgcaaaagtcttggcgcaattacccgaggcgcaaaagtcttggcgcaagtgcccgaagcgcaaatgtccggggcgcaaatgccagattttcgcttatggtgcaaatgtcgggtaatctaaaagccagtgggcccaactcatttgcattttaattatataattaatagcaataattgctcgagagtcttgccctcgagtgatctaatctcgggctcggatcatcagaaatttctcgagcattaatcctcatatttgtgggatttaattttagaaagaggactttgtccccttccgctgctctgtccggctgttctcaatcgttctcaaatgctctcgaaaatgaaaatggtggcaccacttttgtgccattgccgtcggatgaagcgccgcagcagtggcagcagcacaacatggcaccgaaacgaactaagatggagacaacaacgacaaaagcagcaactacagcagcaccggcagcaatggtgccatctttgcagacaaaaagtcggagtttcgttttatgtcggcttttcttctcggctgttcattaatttaccgaaaaatgccgcggaaattgtaactattccctccccccccccccacctcaacagcattcgacggtttgttctgtgtgtgcaactcgtttttctcatattttgggctgtgagaggaaattgggggaggcatttgataaggaaatgatagtacaaagcacagcgacaggaagagaactgctgacaatgaggaccaacatattagccttatattaaaactcttcatttttaatgaatattttttaaatttgaaaaataaaataaatttacgttttatgatcctctttctctgttagtttttatcaagtatttgaaaattttatgatataaaaaatattt

SEQ ID NO: 41195 - DNA, 1006 bp, Heterodera glycines
tgaattacactgctttggacgctggtacaatgagaacagtcaacaaattcgattcataagaaattacttccatcaattgtgttatgacgaggccaaaatgccttggtttttaatattttatcaagtgggctttttaaataataaacaaattgaaaataataattaaagcggattaatttcgtttttttaaattccaccttcaaattgaatgccatttaactgctggattaattttcacattatttaagactgaaattgtttccatcaaagggtgccgacaatatttaatccctttcaaaatgtgaaccccaaaataatttagccctattaataattcatttaccaaatttatatatttaattcgcgctccctcttctgagtttatccatctgtcatctgtgttttgcttgaagccaatcaaaaattgtctatttaaagagacaaaatttaagtaaatattcatttttatttataaattgcaaaaagaaattacaaagcattgaccgtatgatgctccgttcaatcataccgtacacccagaactgttcccaattatatgtccttttgccataaatgcaaccgctttttttgattttatatttaaaaaattattatttattccttaacacaaaaacccaattatttccaatatttttaaaattaaatatttacattaaactattaattaattaagccgaaataatttcaattgaatttgctaaacatttcgcagcagagatggaaaagcagcagcagccaaaaagtgatgatcaccagcaaagtgatcagaagcagcagcagcagaaaaaggccgtcgctgttgtggtgccgcgaatcgtgcggaaggaaaacggtgggaattttgtaattatgtacagtatcactcgggcattttctaagacataaaaaatataaataattcaaattaattgctaagggaattcaactgccaaatatttttttttactaaatagcatttaaaaaacaaaatgaaaagaaataattt

SEQ ID NO: 41196 - DNA, 1738 bp, Heterodera glycines
  unsure (1)..(1738): unsure at all n locations
aatgacnngncagcagggaaagtcattcagcactaattgaaagagatcatgaaatatgtggacactttgcctgaaggcacaaaatcggctgccaaaaacattttccattgaatttttcatggaaaaggaggagaggaaagaagtggaaaaagcagcatggattaatgaaagcaaggctaaacaatatttattaaatattttattttttggtaaaatatttccaatttttcatttccaataaatatttttgctttgttcttttcttccaatttacgcttaagcatgcacataaaaagtgaaaaatataaattgtgtctcaaaatatcttcaaattcgttaaatttaagctaaacatctcgaaaagctaattatgtatgaaaatcattttggaagaaaaaacaaattgaatcgaaaatttattaatttaagaaaaacccgaaatttccattttggactgatttttggcacatatttacaatgaaagttacagtttgattaattttatcgagaaaataaaaataattttgcacttaaaaaataattaaatcgcgaaaaatacaaaatatgcatgtggaacttggtcctagaagcttgaatcaagctaaaaaatatttttcatgcatttaagcctcaaacagtcgaggaaaaaatatacatataatttgccgccctaataatcacttttagaaagtgaggaaaattcacttcattagcaggtaggtcatttggaaattttatcagcctttttggaatttcacttaaaaaacgaatattgaaaaatatttttccatgaatttttcgtccgtttttattttcgtcgtcgcattcgatcattgcgcggttgtgcgacggagaatgagaaaagatgcagttcattagctaattcttgcgcactaacacagaatccttccaggcaaaacagcttgtccgggcagtgaatgtgccgtttgcattcggctgaaaagaaatattaattatttaaatagtaatttaatttacactcacttccatgaatgttttgcattgccaaaatggacgagtcacgaagcgcaacagaaaaaatacagaagaaaattgcaaaaatgattgagattctcataattttgctaaatcagtaaagcgaagagaacacagtcttttttatattaatgtcagatttgtaaagaattacatttttgagaaataaacaacttaaaaatgcaaatttaggctaaaaattgtgtaaagcttagaaaaatcttttgccaattaaaagacattgaatttttggaaaataaattgaattatgtattttctaattttcggttttcaattaatttagccccataaacacgcgaaatgctcatcaatttctatcgtgcgatgggttggaccacactgtccccccacccaatttgacgccgtcccagaatgaaaaagcactccgacgtcgtccgacttttaattttacaataataattatttttgtttatttacttattttttactcgcaaaaagtgtttaaagctgccgcattttgcttctggcgcaaaatgtgtgcatcattaattcgtaattagcggcagtaaaatgtttaaaatgggagcacaacattcattggtggtgatggcccagacgagcacaatttgaccggtttttgctcatcagcagcggggagaagggagggaacaaagccaaatacaaagtgaaattttaaacattgaatgcttacccctggggcgatgaaaaataggcaata

SEQ ID NO: 41197 - DNA, 899 bp, Heterodera glycines
ttctttctgggcgagtttgattgtgaaaattttggaaaaacgcctatctctttttctgctcaacactctagacaattccaaccccatttacggaataatagcgccaaccctaatttttccggaatttctttctgggcgagtttgattgtgaaaattttggaaaaacgcctatctctttttctgctcaacactctagacaattccaaccccatttacggaatgatagcgccaaccctaatttttccggaatttctttctgggcgagtttgattgtgaaaattttggaaaaacgcctatctctttttctgctcaacactctagacaattccaaccccatttacggaatgatagcgccaaccctaatttttccggaacgaatttctttctgggcgagtttgattttgaaaattttggaaaaacgcctatctctttttctgctcaacactctagacaattccaaccccatttacggaatgatagcgccaaccctaatttttccggaatttctttctgggcgagtttgattgtgaaaattttggaaaaacgcctatctctttttctgctcaacactctagacaattccaaccccatttacggaataatagcgccaaccctaatttttccggaatttctttctgggcgagtttgattgtgaaaattttggaaaaacgcctatctctttttctgctcaacactctagacaattccaaccccatttacggaataatagcgccaaccctaatttttccggaatttctttctgggcgagtttgattgtgaaaattttggaaaaacgcctatctctttttctgctcaacactctagacaattccaaccccatttacggaataatagcgccaaccctaatttttccggaatttctttctgggcgagtttga

SEQ ID NO: 41198 - DNA, 699 bp, Heterodera glycines
ttttgcagcatttgctgaattttttggtctcttgctgtgttctaataagcatttataacttgattttaggcttctaggtccaacctttttatgctgatttttgcttaaattggtattttcatgcttaatgctgatcatgtaatttttgtgcttaattgacattttttgtaaaattttgactaaaacaccgtctcaacaataaaaatgaagaatacacccctaaatccctaaaaaaaaaaatttttttttcttgacaaaatttgatttaaaaatgtcaattttgctaagaaaattttaaattgtcagtgcgaaataaaaaattgagaatttattgttactaataaaatttttgcctaaaaatcaccaatttttatgttttttcgatctttgtgcttattttgccattctcatgcttatttcgtgcttaatataacaatttttggtgctgttaatgcttaattatcattttttgttctgaaatatccggtcactaataatatcaaaacacagaaaaatataagatgcaaaaaaatggctgaaaatttgcctgtactctgtacacaggaaaaacacaggcatgtatataccggtaatagttcagtttgtcccccccttttttcgaaaaatttttttgttttcaaaagtcatgaaaacatgtttccaaggcttttcgggatcgctgatcacgaatccggcgcc

SEQ ID NO: 41199 - DNA, 923 bp, Heterodera glycines
  unsure (1)..(923): unsure at all n locations
attgatcaaaacattttaatattcattttttctctttgnaataaagtttntgatcaatcaaattctctcgtccatttataattntaattttattcctattgacgaataattttttggcaatttttctttcaactttatgccattcttttggtgaatatttatttcctaatttcttcattttttctctattttaagaaaattttccaaaattataaataacgaattatttaaaaatttcaccttttagaatgttctatttggtgccaattttttaggcccatatttcaattggctatagccttgtccaaaatttgttttatctttgtataaaattattttcattccttagcgaaagttttcctttttccacaaattcatttcttattttaaaatatttttcaacaaccctaggaattttttttccaaagttttcccaatttctgtgccattttaagtttttcagaccaccctgaaggagtgatctgattacttgatgcaagtgacttttttgatcagtacccaaagatattctttgctgaattttttcaattttttatgtagcgcagaaaaaaaatgcatgccttcaaattttgaatgttaatttttcaacgcttcgaaacatgttaagctttcgaatgataccaacaatcttagatttggatgccaaagaaaaaagttatagcgaaaaaaataaaaatttttgaaaatctgcccacagataacacacaagtacctaaaatttgtcaggaatcgaccgttttaaaaatccgccgaataagtcaggagttatgcctgaccatttttttgatgttgcaattggttatgacaaattgtagcttgttttacatacatacataatcatttcttctgataaaattgcgaaactcggaaataatgcttttcgactttatgagatctaaacc

SEQ ID NO: 41200 - DNA, 730 bp, Heterodera glycines
gaaacagccaattcctacgcggatagaccaggaagtactgggattttaccgtgatgttctgacatcaggcgggacttcgggcgcgaccaatttccaaatttgtgcccaacgcgatgaatggtcaaataaatttaaaattaaaatgaaatggaatttggaagagaataaattttaatcaaaaataaaatagaaattatttaattatcgttattccgacaaattttcttccattttttcgactttattaaaatttagccgaatttcgccgtcaaaaacaatttgagaaaacgaagcaaaagcatctgaaaaacagaaaataaacattcaaaaagtgagtggattttgtggtcaaaccgacgatcgcctcaataaaccgccgataaaacgaaaaacgaaggagaagcgaccgcttccgcaacagaacggaataggaaaacaaagcaaccgcgagcatggcgagcccaacggaggaagaggagaaactgcgcaataccgtaaccgaaaccaaagcgagacaaaacgccagaaaaaggagcggaaaaacgagtggaattcgaagggcctacgaattttttgaaggaaaacacaaattcagcggattgtccgttaaaaacctccgaatggacggacaaacggcgaagtcgaatgttcagaaggacggccatttgtgaaaaagcgttggagccacctgccaaatgaaagaatgagcaaagcatgggaacgcttttca

SEQ ID NO: 41201 - DNA, 1287 bp, Heterodera glycines
  unsure (1)..(1287): unsure at all n locations
aaaaagcatagaaaacaagagaagctaagtgattcgcgcagactggcgcaatttccaagtataaaaggatacggtatccatgatggaagtaataatggaggaaacagtattccaacaaaatctggtagttcgacacctatacacaaatcatcaggcaacaatagcncaaaaaaaagtcatagtccaaaccagcacagtccaagcaactcactaaaatacagtagcccaaaaaaggcggcctacagtacagtaaatttacctgtgaatccaccacacaaaaacaacacaaattataatagcctaacaagcgaacaaagaggtcgaaatcttcataacgcaaacaacggagggcatcatagtcataaaaatgaaggttatggtagcccagctggaagtacgaatatgaattcgctgtccaaaagtcgttctgccaacaatagtccaaaagaggcggcctacagtaaccctacatcaaatatacatatgaacaccagtcataaaagcccaaaaagcgagcaaaaaggccgaaatcttcataatccaaacaactcagggcacagtaatcacaacaatgaagggtacattagccctgctatgaaaaaaaatgttaatttaattccaaaatttttctttgccaacaatagccaagaaaaggcggataacagtaaacctgcagcaaatatacctgtaaactcaatgtccaaaagtttatcagcaaacaatagcccgaaaaaggcggcctacagtaaccctgcagcaaatatacctgtgaactcgaagtccaaaagtttatcagcaaacaatagcccgaaaaagacggcctacagtaaccctgcagaaaatatacctgtgaacttgaagtccaaaagtttatctgcaaacaatagcccgaaaaaggcggcctacagtaaccctgcagcaaatatacctgtgaacttgaagtccaaaagtttatcagcaaacaatagcccgaaaaaggcggcctacagtaaccctgcagcaaatatacctgtgaacttgaagtccaaaagtttatcagcaaacaatagcccgaaaaaggcggcctacagtaaccctgcagcaaatatacctgtgaacttgaagtccaaaagtttatctgcaaacaatagccagaaaaaaacggcctacagtaaccctgcagaaaatatacctgtgaactcaatgtccaaaagtttatcagcaaacaatagcccgaaaaaaatggcctacagtaaccctgcagaaaatatacctgtgaactcaatgtcgaaaagtttatctgcaaac

SEQ ID NO: 41202 - DNA, 900 bp, Heterodera glycines
  unsure (1)..(900): unsure at all n locations
ctaatggccgaggcctccgccttgtggggcattgtttctaagcaaattgactccacaaaagccgctctccaagtatcaccgatttcccactgccacacttccattgtttttgcaggtcgctgctgcttccactctgctcaacttggcgcgcattctcctgcaaaagtccaaggacggtgccgtcgttgaactcggccctcgcgaggacgccgtccacgcgatcatcgcctcgctgcgttcggtgcactctttcggcgaccattctccgctggctttggtccgtctccttcagactctcatcattctgttgggccaatttgcggtcacaaattgcttgactgtgggcgagattcaagcactgaatgatgcaacgcgtcgcatcaaagacgcggtgtcggatgacgacgtgaaggcattggttcgtgaattgtcgcagaagatcggagcaatttgagtgaagcgaacgatgaacctttcacgacttttctcatttaattgtccattcgtttgattttgacatatattcggatatactttgtgggttaaattcgcgttcgcggattttcgttttattcggtttaaattattataaaataataaatagctgatctgttttacaatgtgtaaagcaaatagggatgaatttcttccatctgctgaaggatcacattcctccacttccttggatttgctgcattcccatcggtaggaccttgaaaaaataaccaatgtatgtatacatgaatgaatttgcctgcagttgcgggtttggctgtttttgctgttggtgttggccctccagcaaagcgcgaatgcacggccaaatgcagcaggtgcgtcgctgctgctgntttggaaggggtccgcgacggactgttgccggcacaattcgccctgtcc

SEQ ID NO: 41203 - DNA, 1336 bp, Heterodera glycines
cccgacaaatttcgggataattaaacgaaaaaagtgactcttaaatggaaagaaaattaaagaagaaaaatttaaggcttcttcaattcaataaattcaatttcaatagaaatgggtggaaagataagttcaaataaaacgggaaaaaaggattttggaaatttaaatttaaaaagttttctccccgacaatctgttcaattgtaattttgccttttcttccacttccgcttaacttttttacaaaatgattatcccctcttccccccccccttcgcttttcccactttcgccgtccgtcccttctcaattttcaacgaattctttcccccaccctaaaaaaaactgggcgtgagaagcggctgatattatttcattagcaaacaaaaaaaagacttcctcgttgcgaaaaaagggaggattctcccccccccccccctcatttttcgtgtcacttttccctcggaaaatttcgaatgaatgaattaacaattaattgcttataaaaacagctcttttcacgcgcttcccccccccccaaccgttcaaataattttttttttttacaatttgagtaatttgaccaaacaaccgaccgaaaaaacaaaagaaaaagtattcctttgtgttgtgtttggtaaggggtacggtagtaaaacctttttgatacggtgcgatttgttaaaattcgatctcaaaaaaggataaatagcgaacataatacgccgtgggttccagcagtccccctttttcacagtggtattttccgtttttacatcttatgattttcctccccatttcctttctcacgcggaactaccgatcactgatcactaaatgattactaatcggtcacttccctcgagttttttatctgttattgtttttttgggtttttttattccttccttttttatgttcgcgaaaatttaagtgcagaaaaagcaaagcaaaaaaacaaaacaaaaaatattaaaaataaaatttacaataatagagagcaaaaagaaatatataaaacaaaaacggaattgggcagattaaaaccaaaaaccaaatacaaatttaatttcactaacttttttcccaaaatttgtttccgttttcgaatgcccttcagggaataatgccgattttacatgtgcttgtcatatttgcaaatcggcactctcctcgcatcgcatcgcatcatgtgccgtccccccccccccgttactatgggagtggaaattcacttcctcattcgttcgtctcctccccccccccgtcccatcactttccaccacgtaataccgccattcgaaagaaaaacttcagcagaatttgtaccatactac

SEQ ID NO: 41204 - DNA, 906 bp, Heterodera glycines
  unsure (1)..(906): unsure at all n locations
gcccgtataagcccaacaaaattaaaaaaacgggcgcgaagcgcccgttcgagtccgcgaagcggcctaaaagtcccagataatttttttaaaatccaaaatctccacaaccatagcttatctaggtagcgaagctcccaaagcgcgaagcgctttttcccagctaaatagccgacggttcacgcacccgctagttatatatatgttatatcgattaggcaactcatcttcaaaaacaaaatctcgggaacggctaagcgtacagggctgaaattttgcaccgaggggtagctcgagacggcgcatctgggaaaactataggttttttggtccgaggcccaactgagtaccagggacttttttcctatttttgcgtgcgtttgaacgcccataacttttttcctaaaacctgaaccaaaaaatgtctgctggtaggaacctaagttgaagtgttttctaaaaaacaaaaaaaaatccaggcctctacctataataggaaagcttgtagacttggctagaaattcagtaccaactttgtccacttcagtaccgggcgaataactcgccagggtttgaactgagcggggggtggccagcggacttattgtagagttttgtaagcccgattttttcaaattttaaaatttcgaaaattttctaaatttctcgagctaggccccctaagaggttttggggtttttgaattttatgattttttgccgatttttccggggaaaacggagaccactttcaaacaaccgtttttcgagctctatcgattggtgggatttttggaaanatttcggttttttttccggaaatagaaaatttttttggcctaagcgggacatttgagtcccgggccataactcgtcagggggtcggttttagcaaaaaattgcctta

SEQ ID NO: 41205 - DNA, 1378 bp, Heterodera glycines
cctaatgtccctccacaatttgttgcctttctcttcccctcgtaatatttcaaattgaacggcgacgcgtacaccgcccttcgcttcagcagcaaatcccaacgcgcgacttcggcggacactttgacaatgtcaaacttttcgccaaggtctatagtttaatacaaagttttcgtatatgtatttccgaaataccttttatatcctcaagaagaaaaagttcgaccggcggcggtggtttttcaaattcgggatccgccatgaaatcgtatttctaaaatcgcttctatagttggtgcaatttttaaaatgggtgaactattttcccagctggaaaaaatttttaaaactaaattttcgtttcccatttttttaatttcaagaaaaatttaaattttagaaaaattcacagtcggtatttatcggcaccgccggatgacttaattccgtagaatattaagtttttgataaaaaagccatttttgtagaaaacttacaaaaatgttagattttgggaaattaagcgacagcaaaggtaaaaaataaacagaaaaaagacaatttttaggtttcaattgtcaaatgccaccacagaagggaagtgattgttcgcccgtactcaccataaagtccgggtgttcggacggtttgcgctgcggctgtccgtccggcgtccgttccggcaaataaacatgggaaaacagaagcggaccgggctgaatggcatttacccagattaaggaaatagaaagcatttgataagtgaaccaaaaaccaccggaattgtcttcgcaaaagtcgtcctttggagagagagccatcgaattgaatcgacacaatgctttttggagacgaatctttttgctggtgtcagcggaagcattggtgaacaaaaaatagaaatggaatcagtcagcaaatttatttaagaaatcaaagaaaatcgccaaaatttcgatgaggacattgtatccaaaagcacaaacaattgtttttatcatttttaaagaacaaatcaaatcagtggcgcctaaaagtccgatcgaaaagtctgtccaattcgtcctcctctctaatatttccacaggtcggcatttgggtcccagcgtaagatttcttcacggcgttctctccacattttgctgtgtcccttcatcattccaatcttccattgaccatgtttatagtaggaatattctaaacatggccgtttttgaaacaaaagggggggggacccttttgttttgcaaaaattttttaagataaaaaaccatgataatttgttatccggggttttaaaggtcgctaatcacgaatctgacatgtattttgactaatttctaatgcctaacccgaactcgaataaaaatcgaaattt

SEQ ID NO: 41206 - DNA, 1054 bp, Heterodera glycines
tttatagaaaatttcaattcaaatttcctaaataaaacatttgtcaaattaaattttagcgcttacacatttccctctctctgctctctgttgttagcacaacacaattccaattcgtctagctttttctctaatcgacgagatgacttcttcaagatcggtgatcactttccctccccccctccattttcatgcgctttttcccggactcgatcagttgggccccggggcacgtttgggccctggactataactgttttcatgttcaatcaaatcaaacattgatggtatcatttgatagcgctaagtgtcgtctattagcctgcaaaattgcaaaaaatttcgttaagggacaaaaaagttatggccaaaaatgactgaaaacccctggtttctgatgtacctttttttggcgtcataagtttgttgaaaattgacgaagtttttttgcaattttgtaggctaatagagcacacttagggatatcgaatgataccaaacaattgttggatttggtagacagagaaagaaaattatagcccaaaaacatgctgggggcccaacttccgcttttgcggcgacgacgaatgccaccaacaatgcgacccatgggaatgcgaccagaagcccctcaagcagcgacagtgactgaatgacgtgacgcctggtcggatgtcaaatggtacaacaataacaacaacggcatggagaaaaatggcaaacgaaatggacgagaatttttgcagaggatactaattaaatcacggataattgtgcaatgaaattgatcccccgtcaaatccatccgatttgtttgtatatgtataatttcacccataatgccatcatgtgatgttaccaatgtctgaatatatgccatctgtgtattgttactgtactaatttatgtattccgttgtttcaatcgctgtaaggagagatttgatgaaccagtttaataaaattaggcacttatccccaaattaaaaaaaactgaaggggattagggattttattgtacagcagcaggataaggattcgaccgatggggaaaa

SEQ ID NO: 41207 - DNA, 1608 bp, Heterodera glycines
aaaatctaaaattttaaaaattctcaatttcgttagctctctagagaatgaattattttaattgttagaatagttttagtctaaatttttcatgttttattcatttaggaacaaaattgagattttttgaaaattttagattttcgactttttgttcgagttcgggtccgggattcgaaattggtcaaatgaatgtcagattcgtgttcagcgaccctgaaaacccttggaaaaatattttcagtgacttttaaagttaaaatatttttttcaaaaaggggtcctaccatcggtagtattaccaaaattttttcgcataatattaatgtaaataaatgcttttacttttgtttgtttgtacataagtgatcaaataatacgtaaatcaaaagttagaattttatcttttattggcattttttgcctttttatgcttttgtaagacaaaatgaaagaaagaggaaacagaaaagagaaacaaaaataggtaaattaatattcagtcgcatcggctggcgtcaaatgggcaaaaccaaagtggacgactgacgcgcacaaaaggccacttttgccattcggcccatccatttgaggccgttttccccacccgggacataggaaagaagaaacctaaaaaggggagaaagggaaggaatgggggagaaaaagttaggaataaaaccaattaaaacatggaaaatgcaataaaaaactgaccaaatgaggccaaaagtttgaagggcggcagtgattacggtgagaagggaactttgaagccacagagaagtgtaaagagtggccaaaacactgagcaaataaacggcggtgaccacgcgacggggctcggagaacagaaattgacaatacgccaaaggaccccacagaaagccaaaactaaaagggaaacaaacggatcaaaagggaggggaagggagagagagagtgtggagagataacgaaaaagatggatacagagggagaaaaggaacggggtgagagtggcggagagaaacggagaaatggagagggacggagggaaagagaggaaggaacgacgtgggagggggaaaagactaatgaatggggcgcaacgaacagaaatgtgacaaaaaggtatatttttttaggaaaaaaaataactggttctggtcttaaatttaaaaatgtaaattttcgaaaaacgtcggtataaatttttgtgaaaggagtgggtacaaacgccgatattaatgcctttttttgtttttcaaacccgtttttttgcgaagcgctttttcataaaacttttttggcaaatggggttccggcggttaccgataggcgccgctggggaaaattattttaggtttttaacgaattttatttagaaattagtctaatttttcagaaatttccctcttttcccttcgctacgaccccccccccccctttcatatggtgaccaatgatcaccgaatttgaaaaaccccgtattggtctcctaattttgaaaaaatggaaggacaaaatgcattttaaatgggttttgggagtttcgccttaccaacctgacaatgaaaaagaggggtcgcgagggtattcagagcagcgaatttgcgcgttggagga

SEQ ID NO: 41208 - DNA, 1689 bp, Heterodera glycines
aataaaataatggtttgaaactcacatcgcgaatgtactgttccaccaatttgtccagtcggaattgttcttcagcttcgaagagacaaatctaaaggacaatttaaaaaagtgccggtataattttaagcttataattttttgccaccgcactttccgacaataatttctttttaaataaaaatttcatttataataccccccagtccttcgttggtccccccccccaaattggcatccaactcggtcgttgacgccgcattcgtcgatttcgggcactctgctgattttgcgatggtaatacggcatcttgtgcttgtcgtgcagccgctccacaatgttctcacggaaccaagtgaccggccaatccaaaaaacggtttgtgtaataagagtatttgccgacgaatgaattctgagcaaaacagaaatgatcagtgaagaggacacagaagcaacgcctttcaattggtcccccaaactgaccaacctccacctccttccatcgaatattccaataggctgcccattcctttctgtcctgctcacgtcgtcctttaactgccgacataaactcgcgccccggctcttctttaaccgtttcagcggatgtcatagcacagaaagaaaatgtttttgctaaaatttgatgaacacgcagctaacataaaaaatggaatgaaaatgatgatggatcgttttagcattttgggtcattcactggcagacaaacattacgccaaattaaatttttatgaattcaaaataaacataaacaacacacaatagataccccggttgcaaactgtcgtaatttgctcggttgaaccgatatcaaatctttttaaatttattcaattcaaaaataaaaaaatgaacaaacaaaaacaaagactatttggtcatcattcgcggtgcgatagacatggacatgagttcctggaacaacagcttacacgcgtaaggaattcgaacagctgacacttgcgttttattttgacatgcctaaataaattcgtaattaaaaagcatgaatactcgattaggaaggcaaatgctgctcactttgcactcgaaagtgttcgtccgttgattgaaaatcaccaccaatccgcattgattgcacacataaactgtgtatggatcggacacctcaaaaagtctctcccgtaaaaattgagcagcgccgtgtgaaatttgacaatctctttccatttcaccaaatcgcagtccaccgtcacttaaggcattgaagtgttcatggttttgtttaacacttcttaccgtgccctgccttccattggctgtcggttcatcccctgaacaggccctcgggcgcgtgagtgaattttgtcctcgaccatgtgcttaagccgttggtagtaagttgggcccagaaacacctgttatcatgaggaaatggattaaccacagatcacaaacattcgcattgtttttctgggacctgtgtgctcaacttttgcccggtaaatccgttgtacattatttcattgccacgcaattggtagccgtagccctcaagcaaagcacttattttctgcacattgactgtgtcgttgaaaggggtggcgtcgccaatttcgcctttgtttgcagaaagctttaacaacaataataataatgcattcaaatggatttcaatatgtaatccgacctttccttggaggca

SEQ ID NO: 41209 - DNA, 1157 bp, Heterodera glycines
tgagccctacaaaatgtcgggttgaaaattgctgtctcagaagaatagatattctcagaaaaatggctatctctttttttctacaccgttgtacatgtgggttttccccaaaaacgcattactatctgcggttgagccctacaaaaggtcggtttgaaaattgctgtctcagaagaatagatattctcagaaaatggctatctctttttttctacaccgttgtacatgtggggtttccccaaaaacgcattactatctgcggttgagccctacaaaatgtcgggttgaaaattgctttctcagaagaatagatattctcagaaaaatggctatctctttttttctacaccgttgtacatgtggggtttccccaaaaacgcattactatctgcggttgagccctacaaaaggtcggtttgaaaattgctgtctcagaagaatagatattctcagaaaaatggctatctctttttttctacaccgttgtacatgtggggtttccccaaaaacgcattactatctgcggttgagccctacaaaaggtcggtttgaaaattgctgtctcagaagaatagatattctcagaaaaatggctatctctttttttctacaccgttgtacatgtgggttttccccaaaaacgcattactatctgcggttgagccctacaaaaggtcggtttgaaaattgctgtctcagaagaatagatattctcagaaaaatggctatctctttttttctacaccgttgtacatgtggggtttccccaaaaacgcattactatctgcggttgagccctacaaaaggtcggtttgaaaattgctgtctcagaagaatagatattctcagaaaatggctatctctttttttctacaccgttgtacatgtggggtttccccaaaaacgcattactatctgcggttgagccctacaaaaggtcggtttgaaaattgctgtctcagaagaatagatattctcagaaaatggctatctctttttttctacaccgttgtacatgtggggtttccccaaaaacgcattactatctgcggttgagccctacaaaaggtcggtttgaaaaatgctgtctcagaagatagatattctcagaaaatggctatctcttttttctacaccgtgtacatgtggggtttccc

SEQ ID NO: 41210 - DNA, 1124 bp, Heterodera glycines
  unsure (1)..(1124): unsure at all n locations
tgttgggtgctattgaccaggggactcaaagcagtcgtttctcatcttcgatcccaaaaatggcaatttggtcgccagccaccaagtaaataatatntaaccttccgatcacatacttttgctaaaatactaaattgacaccttccaacagttggaagtgcagcagcaattcccgaatcccggctttgtggagatgtgtcccgagcaaatatttaagacgacagtccgatgcatcaaaagcacttgcgaggaactgaacagacgcggcattgatccgaagaaagaaatcaaagccatcggcataaccaatcaaaggggtgaggcgagaaatataccgatggcaaaaagagtgaaaaacttatcaaaaccaatggcatggccaaataaatgaaaaaatgtgatcaaatggaccaaagctaaaggaatagccaaattggtgatcgtttccgtcttcagaaacaacaatcgtttgggaccgagagacggggtgccatctgagtaatgccatcgtttggttggactgccgaacgcatgagctttgtgacgaatacattcagaggacgtcgacacggtgaatcagtgaaaataactgaaataaattcggaaattttagggacaaaaaccatttcaaagcgaagaccggcctgccaattcacccgtacttttgtgccctcaaacttcgttggcttctcaacaatgtgccagaagtaaagaaatcgctacaaaatggtagaactttggatcattttgctgacgcatttaaattatttgaaaatttagggactttgatgttcggtacggtcgattcgtggcttatgtggaaattaattggggtaattaatggctaatctcccaaaatgcttctctccatccttctcaaacagatccatgccaccgacgtgaccaacgcgagtcgcactttgttgatggatttgcagaaccgcaaatggtctacagaaatgtgcaccttttttgacattccgatcaatgttctgccggaaattcgaagttccgcagagatttacgggtaccttcagaaaggtcgtgttggaatatttggtcaaattagctaatctttaggacctttggaaggcattcctttggccggctgtctcggagatcag

SEQ ID NO: 41211 - DNA, 1097 bp, Heterodera glycines
  unsure (1)..(1097): unsure at all n locations
attcagactncccttctgaaaagtcattctgtaaaagtaaaatactacaanaatccgcaattttttcctctataatataaattttattttacatttttatcaaatttttaaaataagatataaaaataaaagtgattttgggattcgggaccaaaggggggtgaccaggatttttgagtggaaaattttttttcacaaaattcttccaaaaatatgtctttaggggttatttgggccgctgatcacgaatacgtgatcagatttcaattattacatcgttaagccctcagaatccctgtgtgattggggattctgaggcatcattttgaggggggggggaagttcgaatccgggcggtgtacattatttttctttgtatttttgggttatttttaatgttttaattaatttcaagatttttataaattatttaattaatttatttaatttcattatttattttttgaatttataaaaaatgaatttcatttcaaaataaatattcaattattaattttcaaaattatatttaatgaatagaaagagtattttattataaaaaaatttaaattaaaatgcaatcgatttttataaaaacttttcattatttatttaattttaaaccatgttgtacctcttctaatcacttttgtacctcttctaatcacttttgtatcttttatcacttttgtacctcttttaatcacagttgtacctcttctaatcactgttcttcctcttttaatcactattgtacctcttttaatcacagttgtacctcttttaatcactgttgtacctcttctaatcactgttcttcctcttttaatcactgttgtacctcttctaatcacttttgtacctcttttaatcactgttgtacctcttttaatcacttttgtacctcttctaatcactgttgtacctcttttaatcactgttgtacctcttttaatcacttttgtacctcttttaatcacttttgtacctcttctaatcactgttgtacctcttttaatcactgttgtacctcttttaatcactgttgtacctcttaaaatcacttttgtacctcttctaatcactgttgtacctct

SEQ ID NO: 41212 - DNA, 1351 bp, Heterodera glycines
tttcagggatagagttacgaagtcataaaaaaattaaaatttcggttcaatccaaaaaaagacgaaattccgcgccatttctgattctttccccattgttttttcaaagtgaaaaggaaatgggactaaagaaagttgaaattcaaatttgtgtgctttagcacgctgagaatgcgctgaaccccttggctatggtcgggctcattgacttccgaaaatttgacgactttccatggcccgatttgcgtgcttcgaaatctctcgggaggaccgtggagaacgacctcacaccattcgaagtattccttgtccaatttgcactttatcaacgtgtacttcactataacaattggccatttgcacggcagcaacgaattcaaacgcttttccatccaacggactgtcaatggaccaaaaaaggccatttgaacaaacagaaatgaaatggcgacgatctccaatggatttactgcaaaattgccggacttttaaattgctattcatttgctcgttcttctgctgttttgctgtcgtctctcctctctaatcctcaactcgtccatctcagaatgtgttctgttctgtctgtctctgttttggatcattttattcattccaccaaatcattttgggtatactattgtcaacccccagaaaaaatgtcacaaatgatataccaatcgttaaaaacttaatgatagaattcggcacttttagcgtttttaaatgatcaaaaccttgacaaatttggtatcatttgaaagctctttttttgtcaattaaataaaattgcgattttttgtgttccaattggtcttttccttcacttcccatcccttttaatttaagcattcctctcaatttgcttgttttcccttttccgcacttttcctttctttggtccctttaagaaatttatggcgaattgaggcggaaattgccttcctttgcgcatcgctttgaattatgcgccccagcaaagagaaggatcattagcatttatgtgtttgttgttatttatatgtgcgccagtggtcaattgttccgttcgttctttgcttttcgcccccccccccccctcaaaaaaaacgtgggatttttgggccaaatgattgtctgatgggtgttcactgatcacccgtcgatttcttttgacccttcaaatcccctaaacggcggcggtattgtgccgttgcacaaaggccaaaaaaggggggggaatgagtgcccaaaagggaaaggcgatccgatttcatctcgtcataatatcctttcttggtttgtgcataaaaataaactgtgaaggaggatggtttatgctttgccaccgtatcaatttctttgtttgaac

SEQ ID NO: 41213 - DNA, 437 bp, Heterodera glycines
acgaattacgggaaattacgtggtttttggacccccatcattacggattacggaattccgtaactgagaaaataaccctaattacggattacggattccgtaattgaaaatccagctacgcccagccctgataccaacattttcattatacacaggttatcttataatcatttttaattagaaaaaaaatgcaaatctggcaatactctattacattgaaagtttttgtgacgaattacagtaaataaagtattaggtaccggaaaaaaaccctatgtgtggaaatttttcctgtctatgaaatagagggacaaaaaaagagcaaaatttgttatggaatgcaaaagatcccaacgtgtctttatgacttcttcccatataggtagtcgtaggtagaatattcgctattggcactttttttctctgtaccgggtttt

SEQ ID NO: 41214 - DNA, 923 bp, Heterodera glycines
tctaatctactcaaaccgggttcagaattcaataaatctttcattccggtgcgaaaaatggggtatgaaacgtttattggggaaaaaaagactttacaaaataatacccctgggagaagggagtgggaaacatgatttcaaaattttcaattttttctagtctaatctactcaaaacggctcagaattcaataaaaataacattcacggtgcgaaaaatggggtttgacaagtttattggggaaaaaagactttacaaaataatacccctgggagaagggagtgggaaacatgatttcaaaattttcaattttttctagtctaatctactcaaaccggttcagaattcaataaaaataacattcacggtgcgaaaaatggggtttgacaagtttattggggaaaaaagactttacaaaataatacccctgggagaagggagtgggaaacatgatttcaaaattttcaattttttatagtctaatctactcaaaacggttcagaattcaataaaaataacattcacggtgcgaaaaatggggtttgacaagtttattggggaaaaaaagactttacaaaataatacccctgggagaagggagtgggaaacatgatttcaaaattttcaattttttctagtctaatctactcaaaccggttcagaattcaataaaaataacattcacggtgcgaaaaatggggtttgaaaagtttattttgaaaaaaagactttacaaaataatacccctgggagaagggagtgggaaacatgatttcaaaattttcaattttttctagtctaatctactcaaaacggctcagaattcgataaaaataacattcacggtgcgaaaaatggggtttgaaaagtttattgtggaaaaaaaaattcaaaaataatacccctgggagaaggagtgggaa

SEQ ID NO: 41215 - DNA, 803 bp, Heterodera glycines
tgcaagcacataattccaacccatttccttatttctcctaatcggattgactctctgagcccatccatcgcggtaatccgcccaaccccccgccacaatccgtccattccttttcgggggtcgtcgccctcgccctatacccccccccccccggcttcgcccaacggttcattgtgtggcaatggcaaaaaatgaggcagcagaatcgaccgactcacacaactgacaacaccacgcgatggatgggttgggtggcggcctttgtgcaccaccgaagaatgaaaggacgccaagggaaagaagagaaaatggggggagaaaatggaggggggaaaggggggggcgatgacagcgacgacacaaattaatattcgtcacgggctgtgcgccagcggcgattgaaaatttacctccccatggaagagagagctgaatgtgatgggaaggcacgaaattaggggtgggcagaggatgaatgggtgaactgttccgttgtttgctggagggcgaaaactcccctcaacatttgacgagtggggcgaagtgtggaggagagagtggcgggggggagagacaaacagagaatgaattacggtattgccaggaatgaccgccgcccctcccccgccgttgccatcccacggagtgatggatggttgagcaactggtaaagccgaaaccgataagctaacccccggccttttcccgatgctctgctgattttgtccttcttcgccatttcccatgggagaggaaaaacggagagtcgtcgacctatcgcagcagaaatctctgctaagaaa

SEQ ID NO: 41216 - DNA, 983 bp, Heterodera glycines
  unsure (1)..(983): unsure at all n locations
tctagagtcaannattttttggaaaattctcaaatagacgagcatatactaaaaatatttcttaacacttttgtccatgatgacttgaggatttgtgtcataagtgcacaaaaaggtaataaattttgaaattcaaaaaagcaaacactttttatcaacgtaattttttgtgcttatttcattttgcatctgtccaaacaatccacttcattgctcatcatcactttcgcttaagtgagcaaacaaagtagtggaaaaatttggaaaatttaggcaattcactcaaaacgaagagaaatcatttatttgccaaaattttaaaatttcttcaaaagctgaaataacaaaaaaactatgtgatttagttgaatatgacagaatttatgggcaaaaaaaaatcatgaatagtttagcataaaatactaaacccatttcacactttgactcattaaagaaaaatttcgataaaaacacaattaactcataatttgtccataattgcatcataaataatcataatttataggctaacaattgaaatgcaatcgtttctccttctcgtaaatattttgctttgttcaattgtgttgctacatttattgtcaaatgaaaatggattggtcaatgccatgccggtaaatatttttataaatttgatgggatggattttttttgattaattcctcaatgaggaaaaaatacataaaaatagaaacaataaaataccgaaaaaatcggaaaagaatttgacataataaaagatcgttaatattatcaataatgccggtcttcttggtcaattctacggctatatttgtcgtttatttttctagcaatatttttttctcaaatcattttataaaacatagcctttttctttagctttaaatttaaaaatttaagatttttttttaatttagaataatttatttgcatttttttaaattttatatgcagtgaaaatttttattcatataattttt

SEQ ID NO: 41217 - DNA, 1033 bp, Heterodera glycines
ttttttttttttggttttccaaatttcggtaaagtttttttgatggggccaaccaagaaaagccacttttggttcccaatttgcgggtaaaaaaaagggaaaaaaggaatagacattttttgggcaagaatttttttgtttgcgtttcaaatatgtaaagattgtttgatagggccagccaaaagaaggcaactgttgttccaagtttgcggtaaaaaaaaggaaaaaaaaaataaccattttttggtcaaaaattttttttttttgcgtttcaaatatcgtaaggattgtttgatgggcccagacaagagaagccaccttgtggtcccatttttggggtaaaaaaatgaaaaaaaagaaatacccttttttggtcaagaattttttttgtttgcgtttcaaatatcgtaagattgtttgatagggccagacaagagaaggcaactgttggtaccaattttgcggtaaaaaaatgagaaaaaagagataaccatttttggtcaagaattttttttgtttgcgtttcaaatatcgtaagattgtttgatagggccagacaagagaaggcaactgttggtaccaagtttgcggtaaaaaaatgagaaaaaatagatagccattttttggtcaagaattttttttgtttgcgtttcaaatatcgtaagattgtttgatagggccagacaagagaaggcaactgttggtaccaagtttgcggtaaaaaaatgagaaaaaagagataaccattttttggtcaagaattttttttgtttgcgtttcaaatatcgtaagattgtttgatagggccagacaagagaaggcaactgttggtaccaagtttgcggtaaaaaaatgagaaaaaagagatagccattttttggtcaagaattttttttgtttgcgtttcaaatatcgtaagattgtttgatagggccagacaaaagaaggcaactgttggtaccaagtttgcggtaaaaaaatgagaaaaaagggagtattttttggtcaagagtttttttttgttgcgtttcaa

SEQ ID NO: 41218 - DNA, 943 bp, Heterodera glycines
tccacctcctccctctcctccttcctccgccagcgggcggtacccattcggttacctcgggcagtacgccccgctggcggcgttgctcaatcaattcgtccaacgctctttccacctcttcccattctcttgctgaaaattcgttttaaaaacattaaatggtttagtttttaatcttggtggaatagaagtaaaaaattgactggatgcaaaaaaagtcgattggactcataaactgtatttgagccaaagaatgtgctgattatgaatctgctgagtttttgtaaaatcattgattttgtcactgatttttcatcaagtatcactaaaaataaagcgcaaccaagcgggcttgaccaataacaataatttccttaaaactttggaaaatcatagacaaaaaaaaattggctctagtccagtttatgcgtcccatcaatttttatgcgttcaatcaattgttatcagctaagtgaaagctgactttttttctccgttcgttggcaaaaggaaatctgcaattaaaaacccgtacaggaatagaagttgttattattttgtggtaaaacctcgtcagattacagataaaagtcgggaacattggtcccataaaaaaggggcaaaaatgctcgttttgagcgattgtgccatacactcagggttttcggggtaactgatcacgaatctgacattcatttgggtacttttccgttttgaggcaaagtttgaatttttttttaaatcaactgcgggcgcgtagaattgctaaagctacgcgccaatcggaggcataaatgccacaatttgagctaatatctcttcggatgggtctgcgccaggggtgtagcgcgaccgcgatgtgcgaaccgcgattcgcggcgtttttttttgcgcgatccgcggccgcggcaaattgaatgcacgatgtgcgaccgcgggattt

SEQ ID NO: 41219 - DNA, 492 bp, Heterodera glycines
ccaaacagccagaaatctgaaaaattgacccgacactttgttctgaaaaataaaataaacgggttttttgaaccggtcggcccggccaattgtctaaagtccgagacaagaaggcccacccaacaacttcaaaattgtgaaatacgtacttctcttcatttccgtccggagactcttctttgttaacaagggcattcgttggaattgatgatgcatctcttttgtcgttgtcgttggacatttgaacacaaaattattaattctcaaattttaaagaaactgatacatacaataaattatggcgcaatctgaaattgttgtatttaacctgagcaaccaattccgaatccttacataaatttgaaaaccgaattaaaaaaatgaatttcgagtttttgttcgatatctattagctaaagaaaatgagtgtttaacccgtcatgttgtgatctgtgcaaagatatacgccatgtacgatatgccgatttttga

SEQ ID NO: 41220 - DNA, 373 bp, Heterodera glycines
tctcaatttaagcgtaaaaattgagaaactcttctgaattttatattttttattaggtttataaatgccgaaaattcaaaaagttaggcttggatttctggaaatatttatttttttattaaaatggacatagctccctcaccaatacatgcgtatagcctttggctcatgtattcctagaacgggctgtcggtctccctacaccggtgaccgactgacatctgcggaaaagaaaattttaattgaaatgtgaaaatgacaactttggccacgccttcgtcccatcctttgatcacttcgcccttcccaatcttaaaataagattcggtagaataataatcttagaaattacagtgaattcaaatggttttcc

SEQ ID NO: 41221 - DNA, 949 bp, Heterodera glycines
  unsure (1)..(949): unsure at all n locations
tttaggaatgacnttggaggaagaaaaaatctttctgtggccgaatgaaattgatttaaatggccgttaatttttataaaatgcaaggattaaaaggtgaaaataaattttcataagagggaatcgaaccttcgagggcaaaaagggaaggccggagcacaacctccgcaccaccaagcagcacaaaacaatgcaaatatttatttaatttattgcgataaaaaaagtttttcacgtcatatctcggcactcagactcatttcgcagaaaataaaaacacttcttaagaacccatgggtgctctatccacccaccaaatttcattcggaaatcccacggacacccggggaccttcctttgtaaatcccttccggtggattttcggcatatctgctcacgaatattggcactttcatttgtgagcaatgggagagaggggtgcaccacccccccccccaaaattttttttttaattttcgatttttttttggaaatttctttgatcaacgatatgggggaaacggcggggcggggtggggatgaatgagctgctccctgggagagagacttggaaaaatcggtatcttacaacggtttaacatgaagcgttcgacatttgacaccagtggtggaatttttaggtcatcgagaaacgtgacccgaccgaactcgtcggccatgtttgcagccaacgaaaagctccatccttaatcagtgtcagcttctcatttgtcacttcgttcatcaattcaaatggcgcaattggcattggtttcacacgaaaaataattcgaacagtgtaactgccgaagaggtggcacggagaaatgtctaaacaaaattgggaaaaacaaaaacaatttgagaaaaatggcgagacacctcctttgaaattgttgctccaatcaattnttnggtggatcccaataatcactgncaacaatctctt

SEQ ID NO: 41222 - DNA, 996 bp, Heterodera glycines
  unsure (1)..(996): unsure at all n locations
tttccncatatggcagcaaaatggctgcacacccctctgatgccgtagcaagcactttgtaggtgtatggggcctttcgcaagcgcctaataatttggccaaacaggaatgtctttcctgtgcctccatcgccgtatatgaagaaacggcgggggacagtcgaatccctagggttcgactgtattgccaacaaaacagcatcaaagaccttctgttggtcgctgttaagtggcggaggggtatttggctgtggacgaggatttggttgccctggaggcaaattcaaatcatcatcgccaaagaaaaactcttcaattgccgcgtcagtatttttggcaattgaagttggcgggtctggcaggctaaaatgcacacagcttaagttaaagcagctgtgcagccgccaatcaatgtcggctagggcttcaagctctgctactttatgctgtgccagagtaataatgccttgcggattgtacatttggtctttgtacttgttccacaattctatggcattactcggctggccatagaccaggatgctcacaaaaagccatctcatctgatctggccagcgcgacagagctgcctccgccagagttttgtcccaaattttgtcgtcttcaagaagaccatgcattattgcagcctcagtgaatgaggtacaaagcaacccattaaccatcttaagatggtctgggtctccaggaaagtgacgcataagtgaatatagcgcgaacctttccgggtccgatgggggtacaggaacaattcggccgataggtggccttttaatttgctgccttttgtacaggacccatttgtcctttgcccatcggaaccgctctgggactttttcgaaaagaatgtccttaaactttggatcattcttccactcattttgccattgtttccataggctgaacactgcgtttctggcagttcgccttgctggatttgttgagctttgctcaccagctggaatgccctatatac

SEQ ID NO: 41223 - DNA, 676 bp, Heterodera glycines
  unsure (1)..(676): unsure at all n locations
gagagagagagtgagcgaaagaaagaaaggagatacttttgagagagggcagagaaaagaagacataaatggacgaactaaagngatttacaccttaacctttttgccttaaataagtgtatggcaaaaaactctgtgccctattttgtgaaaacgtaatttcaaaaatttcccagctgcgcctccggatcatttgtggtcccgaaattcatggcccaaattttttttaaattaaagcattgtccactgcgtttggcgaactgttttgcatgaaatgtgacgactttgtatacgaccggcgcattgagaaggtgcgcgaggagcagcagaacgcgcgccgtcgcaaactcgggctgagcctgaagcaccggtggaacccgtgccgaacagaggtcggcacggggtcaatgagcaattaaagcgccacatttttacaggtaaagctgtgccggcgcagttcattgtacgtgctgcaaatgaacgctgggcaaaacccactcgggctgcgcggcctggtcaacctgggcaacacgtgcttcatgaattgtaaaaattcccatatatatatatatatacatgcatacatattttgtttgcttttttaaaatcatttcgaatcacattgtaataccgtatcccgggggatcaatgtggataccatacattttttaggggg

SEQ ID NO: 41224 - DNA, 1012 bp, Heterodera glycines
  unsure (1)..(1012): unsure at all n locations
aaaacttctgattaacataattaataaattgttaattccatattagttattaattagcgtcactaatatccctaattaattaattgtttctaattaataaactaccatgtgtcgcctggggaatgatcagcggcatgccagctgtgatgatcatcggcggtgacggcgtgtcgtcgtccagcagcaactgttcgcgcgacgactgttgatggtgccagtgcggtacggtgcgcagtgcgcgtgcactgtgcgctggcctacgttgcgggtgtgctgcagcagtgcctcctgcatgttgctgcaattgttgttgaaattgcacgccaagcccgctgcttgttgcactgccaatgctgctggcttaaaaattttgattaaatgatttcttttttgtaattaacctagagctctgaattctgagctttgtcctcattttgtggcatttatttttggtcgaagagaatttttttttaaataagaatttacggatttttgtttttacagaactttaagagaaattttgaccaaatccttaaaattggtataagttggataaaattctgttttaataaaaagcgcataaaacgctaatttttagggctcgctcaaggaaaaaaccaaattttttttttctttataatcctaaaaattttcgccagtgaattttccaaaaatctaagcgacgctggagaaatatagcaagcattaagaatacttctaattttgagtatttagagcagagttcccaagtgtccttatttctaagatttgtccttatttggaggggccggatcttagaaaatgaaaatgtccttatttctaagatttatcttatttttgactcgacgtgcatatttcgttcttattttggatttgcaaataggggatctacaaaattgaataactttacttatttttttattgaagcgaatatttttaattnaattcgatttttcaataaattatatttttacttcgttttctttgagtgtgaatgccccaagatgccccc

SEQ ID NO: 41225 - DNA, 1040 bp, Heterodera glycines
agatgtccggggctgcacgcgcgctacactggcaaaatcagcgtgcttgtcctccccgaaaaggggttgtaaaccggtgaaaattgccgtgatgggatcggacattgcaattattgtccgtgaacgaggaattccttgtaggggcgagtcatcaactcgctctgaatacgtccctgccctttgtacacaccgcccgtcgctgcccgggactgagccatttcgagaaattcggggacggttagtgttccggcttcggtcggtatgcagactggaaccgatttaatcgcagtggcttgaaccgggcaaaagtcgtaacaaggtagctgtaggtgaacctgctgctggatcattacccaagtgattcctattcaccacctacctgctgtcctgttgggctagcgttggcaccaccaaatgcccccgtccgctgatgggcacaggtcgttcgagatgacttgtggacgctgcccaacattacggggcagctgcctcacgagccatgcttttggggtgcttccatacgttggagctgtggtataccgctcagtgctgcacgtgtgaaagcctgtgtatggctgctgcgtggcaatgtgtcggtggcgggccgcctcgcttggctggttcgctgcgccaatgtgggatgcacgctcgtggggcgacctaacggctgtgctggcgtctgtgcgtcgttgagcggttgttgtggcaggcacataacacactgactggggatggtggtttcgttcccggtcttacgtgccgtaactagcggtgtgtttgtgcttgctgctacgtccgtggccgtgatgagacgacgcggtagtgcccgtgcttggcctagcacgtggcttaagactcaatgagtgtcagctcgggcaccgccagctttttctttttttttcattatttttttttacacttctgttgaagaatgaattctagtcttatcggtggatcactcggctcgtggatcgatgaagaacgcagccaactgcgataattagtgcgaactgcagaaaccttgaacacaaaacattcga

SEQ ID NO: 41226 - DNA, 1043 bp, Heterodera glycines
  unsure (1)..(1043): unsure at all n locations
ggggattgacgtgttcaaatgctaatttataagtgatntatttcactttgcgttttcttagtattttttggcattttgactctaatcctattttgagcgttggactgtagagtcccggcagcaattggacactccagacccggatntcgtcaccttcgggacggagtccatcgcctgcagttcncaacggaacagcgggtcgtccgagtcgggcgccagactgagttggacggcgcacgacacgtgggcaccggcctgctgcacgtaggcggaaccctgtggggacatgaggacttatgcatacaaaacgggagcagctcatttccttcccccgccccccgtatcaagctgactgtcgccaaactcaaaatttgtgccaaaaagttctgaatcggacaaaatacgctggaaatatgtgttgtgggctcctgcgttttaccgcgctgaaaagacttcggcacgggaaaaagtcccggcagaatttggccacttcattccggcacttatccgagtgaaaaagacgacaaatggacgacgattacgctcattgcattggaccgctcattaaagctttagcttgtgattttctgtattaaagaggaatttccgctggagccgaaaagaaaacgcgaattcccgctccaaaaagtgccaatggaagggtcggcatggaattaatgggtcacgcgcctgatggcccccggtggccccgccgcattggatgatggtcggccggtgtttggcaatgtcgcgcccgtccgggtagcagccctcgaccagaaattgctcgtagaattgggcgggctcgagccgcttcagcaacgcaatgttgtcagctgtgctgctgatggtggcactcattttgcgagtgtacaattaaaatttgagcgattctctaattgtcttaaattggtaaacaaaattagaggagagagtgcttaatgcaataactaagcaaaaatgtcgcaatcaagacgaaaatanaattaaaatgttgtattaaatggcggttttagctaccatcttacaataatttatcattt

SEQ ID NO: 41227 - DNA, 944 bp, Heterodera glycines
  unsure (1)..(944): unsure at all n locations
cttatgggcttatcgacaacactaccgggacgagccatctcccggcagcgggctcgaattggcgccacccgtgtggcacttagggactttcgcgacctgccgactgcacaggctccctggaagtttcgaaccaaccacacgtgcgcgtcggtagttagccgacgaggcatttggctaccttaagagagtcatagttactcccgccgtttacccgcgcttaatcaagtttccttggcttaacattcagagcactgggcagaaatcagacacggtcaacgtccacaaggaccatccgtctcctctgttttaattagacagtcggattccccgagttcgtgccagttctaaactggtcgttcagcgccaaccgaagtgcataccctgacgagcatacacgcagctgaagcgctccacaagcagctctcaccactagtccacgcaccatccccgaaagaacagcacgcagccacgggcaaaagccgcctgtttcacgcaacagcccggctgacccgacctttagagccaattcttttcccgaagttacgaatctaatttgccgacttcccttacctacattattctatcgactagaggctgttcaccttggagacctgctgcggatatcggtacgatcaggcaggagattcaaatagcttccctcgcattttcaagggccgtgtggagcgcacgagacaccacaggaaccgcggtgctttacgggcgcaacatccctatctcaggctgagccacttccaggcacgcacaccctaaaccagaaaagagaactctggctcggactccacacgacgtctgcgagttcatttgcgttaccgcgcaaaacagctcttgcgaaccgtcatttccctagcctggcgtggngatggtaacccactttcctttcggncaccggatggaccaactgcgncagcacagaaaagtcgtca

SEQ ID NO: 41228 - DNA, 1000 bp, Heterodera glycines
  unsure (1)..(1000): unsure at all n locations
cattcttagcattgctcggaagcacttaaaaactctattaacctgaaatttttaaaatttatattccatgtacaaaaaaaaccagggaaaacaaaaactcgaaaaatttgagttacttccggtcatctttttttgaatttaacgaaatttttttgtaaaagaataataacaaacgcatagagaatattgaacaaaaccaacaatgcttaatttgattgagaagaacataattatggtccaaaaaccttcaggcgacattttggggcgcactcgcctcaggactcatacagtctctgctctcagttcaccatgattagttagttatttcaaatttatttaaaacgcttagaaatcgaataaaatggttagttttattaaaaaaaattatggatgaagaataaactatgaccttggagatacattacgaacaaatagtcgtacaaaattcgtgcatattcaccgaatttttgacattgcctcaattcgtcgttcctctccttcaaaaaagcgacgggtgaccgcctcagtgagggacagtgccatttccatcgcagcacatagacaatgccaagaaaaaaaaaaatttcccagcgcctatcggcaccaccggaccccctgctgctttccccaaaagtttttttggaaaaagcgctgcaaaaagaaaaaaagggggtattaaattatggctggcttcttttttattatacttttctgtttaaaaagccaattagcaagcaaacctcagatgttaattttttcttgacttccgccgttaatatttgtttgcctttcatttccaaataaaaatgctcatttgctgagagagtttggacaaatgcaagaaattttccatcagaagcattgtcttgagcacactaattgacaattgacaaaaaaaaggggagccgagtattgtgagnatatattatttnttagatattaaaatattaataanttttagaaataaaataattcgaatatatttttacgaaaaaacaag

SEQ ID NO: 41229 - DNA, 1487 bp, Heterodera glycines
tgtaagaatatagtggaaaaaatcatacgataaaaaaccttacaagtttaaaagaattatgctcagaaaatgagtttatttattatttaaaaaaatatctttttgctggaaacttggttttttatacttattttatggtttaaaaaagtagtgtaattattaaaaattaaccaaatttttttgattcacattttctcttatattattgtcaatatttaaacgtcaaaatcaattaaaatgagaaaaataaatgttttcgtcaaaatttaatggaaaataattaagaaaaatgccaatttttaatgactagccatccaagcagcccactgtctgtcgtcgtcgtcatttttaacactcgtcattgttgttgtactgctcgccgtcgtcgttttggtctttttgttgttgaacttcttgaagttgttgttcctccgctttttctttgacgatgatggttgtcatcttcgtcttcgtcagtgctgagctcagcgccggtgacccatccacccctcccttttttctggggttggcaattggtaaacgggaggggtggatgaccagtacatgactttcttgaagccttgaagccgtgcattttgcgccattttgtgaaggactcgggtacacaaattttaaaaatatttcaaaaacatttttgaaactttttctgcaattttttcaatatttttgcacccttgggttagtgtcaaccctactctatagtgacaaattaaagtagaaattagtctaaaatcgaacacaattttatttgacttatttcgagtggtaaaagcaattagttttaaaataccttctgctctttttgtggctgttgattagggctgtgcgagaagtgatttttaccggcaaccgaaccgaaaaatgaccccgggaaacgatacgagaaccgagaaatgaccccgagaaacgatacgagaaccgagaaatgaccccgggaaacgatacgaaaaccgagaaatgaccccgggaaacgatacgaaaaccgagaaatgaccccgggaaacgatacgaaaaccgagaaatgaccccgggaaacgatacgaaaaccgagaaatgaccccgggaaacgatacgaaaaccgagaaatgaccccgggaaacgatacgagaaccgaaaaatgaccccgggaaacgatacgaaaaccgagaaatgaccccgggaaacgatacgagaaccgaaaaatgaccccgggaaacgatacgagaaccgagaaatgaccccgagaaacgatacgagaaccgagaaatgaccccgggaaacgatacgagaaccgggaaatgaccccgagaaacgatacgagaaccgagaaatgacccgggaaacgatacgagaaccgagaaatgaccccgggaaacgaaacgagaaccgagaaatgacccgggaaacgatacgagaaccgagaaatgaccccgggaaacgatacgagaaccgggaaatgaccccgagaaacgatacgagaaccgaga

SEQ ID NO: 41230 - DNA, 399 bp, Heterodera glycines
tagggttccaatttttaggcaaaagcctattttttcctgagctgcccgtggcctgaaacgcacgaaaaacatgtttattttggctgttgttaagctacttttcgagttatttgtgcctgttttctaggcttttatttttagagcgtaaaaagcctaaaaaattttgaaagagactatttttgcctatttttgctttttgcccaaaatttgttaacagaaatgcaataaaaacgaaaaatacacccctaagaatcgattttttgggaattttaaaaatacacccctaagaatcgacccaaaaatttctaaaaataaaccccctaagaaatgaaaaattttccaaaaattcatctccaaaatgtatttattttcttgacaagaatttatcctttaaaaaat

SEQ ID NO: 41231 - DNA, 1233 bp, Heterodera glycines
  unsure (1)..(1233): unsure at all n locations
tccaccaaatagtatcacttagtcatccctgttcacatttagcaccggtttctaaaggacgatgagtccccgcattgtgaatcagtaaattcccgacccatcttttgtttgtaccactctcgagacacgaaagtgtaagcgatccctcacatctttccccattaactcactctcgactgcaaaattcccgagagagtctcgacaaagagactgatcctcccgatttcattgggctgcttacaccggggcttttctattttagctccattaaatccttttttgctttgctaacttataaatttttttcttgttttgatcactgtcaaaacatctttcgagaatcgctctccgccaattttcgagagtctgatcaataatcaatgtattaattgccttaacccattaattttttatttttcgctataataaaattcctttctgcctatgcttcatcctccattaatctgtttgctccgttttgccctttttttctcttcgctttcaccgatcgatgctttctcttcccttccgttctttcgttcgttcgttccctctccaaaaagcacaagcggatgattgtattatgtaagcgatccccgtccaccggtcggtctcgaggcatctccgttttgtcttgagaaattaacagttggggacggatcccccccccccaaaaatgccaccgctttctctagagaatgactctctcgcgactcactctcgactgaatgaatcgagaatttccaagggatgtatttccggaattaatcgccaagtgattaacaaaaaataatcgactattgtaaaagagcacataaatccacattttcctttcatcttgctgagttcttctccnaaattagacatcggaaaattggaaaaaaaatgtcttaagataaaaaatatataatatatattttttttggcactttctcaggaaattgattgctacaaaaaactagtcattttaataagccacacattttgatcataattttgaaatttttttttcgaatattcatctctcgaaaaaggccaaaggtttgccctggcatttgtaaattatgaatttttcggtaatggtgagggtcaactgggccttgggccaggttttggggtataactccgtccataattgaccgacaaaaaattttcaggcaaaatttaaacatagggcactcgaatgatatcaaattcatttaattcggacatcaatcatttggttggggctca

SEQ ID NO: 41232 - DNA, 596 bp, Heterodera glycines
attcatttcatttcaattaattcattcatttgtttcctttctcctctgctgctaatttgagcttcaccgggtaattctctaattaattatgaccaattaaactctcctttttttgttttagaacattcctctggaaataattggtaaaactttgtaatgaaaagagagggcgggcaatttgaagaagaagatcaattcacttcacttcgattccattcacattaatccatcattcttaactatgtacgtataattttgcttgttattgttattgaccattcgtttttatcaaaacgattaattcccccgggggcgtaaataattttatttgacacccaaaacaaaagtgtccgtccgtccgtcccttttccctttgcttttgcccttttgcactttttgttttcctccgattgtttgccctttcccttcgctttttctgtttctgtttttgtttcactttcattttcactgtttttgccattcattcgttcgttcctttcatttcatttccattcacattttttcactcttttttctcatttctctctttctttcgtccgttctttcgttcgtttgttacactctctccccccccc

SEQ ID NO: 41233 - DNA, 827 bp, Heterodera glycines
tgttttggaagtggtctccgtttctctgggaaaaatcgttaaaaaatcctaaaattcaaaaacccgaaaacctacttttaggcctagctcgaaaagtttcgaaaattttcgaaattttaaaatttggaaaaatcgagctcattaaactctacaataagttcgctggcaccccctccctcagaccaaaccctgacgtggtattcacctggtactgaagtgggaaaaaaaattaactgagtctccgtgtctgtacgggtccgggatttggtctgatcaaaaaataaaaaatactggattatagaggacacttctgcggagtgccctcacagcgggaattttttgatccgagtttcagaaaaaaagttatgggccgtcaaacgcacgaaaaaatgagaaatccgtccctgggactcagtcgtccgcgctgattttttctctatagttttcccggatgcgcctcaaaaagttgtaagacccttccactactttcagggcgctcccggccttcggccgggagattttgtttttgcagacgaaactccttgtcaatataacatatatagtaactagcgggtgcgtgaaccgtcggctatttcgctggataaagcgcttcgcgcttcttgagcttcgctacctagattagctctggttgtggagatttggattttttaaaaaattatctgggacttttaggccgcttcgcggcctcgaacgggcgcttcgcacccgtttttttaaattttgttgggctaatacgtgcgcttcgcgcccgttttttaaattttgttgggcttatacggacgcttcgcgcccgttttttaaatttt

SEQ ID NO: 41234 - DNA, 1015 bp, Heterodera glycines
  unsure (1)..(1015): unsure at all n locations
ccattgggacttaaaaggggttacggtgtacaatcaacatttttcggtctcccagaggaaaattatttattgacctttatgcacaattttaatcataaattaggatttaattgtacctcattactaggacgctaaggttctaaaaccaacaaaatcacttttctagtgtcgaattgccacaaatgccggcgaaatatttcgaaatgtttgcgtaaggctagaaaaacaaatctatttgattctttagtggttaaaatattgcgagtttttactccaagacgttagagggcaatttgaataacgaactcataatctaattgcgaatgctatctaattaaaggtagcgattagcagcagaaaaggttcgtaaatactgataggctaattttgccaaggattatcgtcctattttggccattggacttaaaagggttacggtgtacaatcaaaaaatttcggtctcccacatgaaaattatttattgaactttatgcacaattttaatcataaattaggatttaattgtacctcattactcggacgctaaggttctaaaaccaacaaaatcacttttctagtgtcgaattgccacaaatgccggcgaaatatttcgaaatgtttgcgtaaggctagaaaaacaaatctatttgattctttagtggttaaaatattgcgagtttttactccaagacgttagagggcaatttgaataacgaactcataatctaattgcgaatgctatctaattaaaggtagcgattagcagcagaaaaggttcgtanatactgataggctaattttgccaaggattatcgtcctattttggccattggacttaaagggttacggtgtacaatcaaaaaaattcggtctcccagagggaaaatatttattgacctttatgcgcaattttaatcataaattaggatttaattgtacctcattactangacgctaaaggtctaaaaccacaaaatcacttttctagtgtcgaattgccacaaatgccggcgaa

SEQ ID NO: 41235 - DNA, 626 bp, Heterodera glycines
ccccgcccctcctccttcatcacccatatataaatgcgctctgccgccaagaccagcatcagaccccattcttccctccgctcactccccgcccaatccacacattttccaaccttccacatttgcgcccatctcatccgatctcatacacaaaattctgttaatataaaagagttggtacattttataaatagatttaaatattagcttggagttgataaagacattcttcgaattcatcaaaagagaaaagtaattattaatattttacagaaatatcccgtccagaaaatatttattcgattggggggaaaaagaggggggggggggaatccaaaaggtttcattatcatcagcagaactcgttaaaggatggaagaagagagggaaaaggcgaacaacgaaaatggcgaggggggggggagagcccggccacccaacaccacccaatattcatttccttgccaagaaagctcgtcaagaccacccggacgggaagcggcgctaggcgatggccaacaagcggacgcgcgttgggccaaagtaacaacacacctcccctccccaccccaccgccccccaccaacgccaacatcccatgtcttttgctccttcaacatcactta

SEQ ID NO: 41236 - DNA, 1348 bp, Heterodera glycines
caaaaataattcaaaaacccacttcgggtttcgactaccaaaaaaaatggtcaatttccccttgggttactgtaattttcggaaatcggtcctccattgaaggaagccgtagacacttgggattgtttgaatttttgtaggaatattgtataactctttctgtccgtcattttttctgcaaaaaaaattttccagcatttctacgaattctaaaaaatagttaaattcaagatcgattagacgagaagaatatgagaaatggcaaaatttggtcgtcattaatttattaatcccaaaaactacagtgttctaagggaaaattgaccatttttggtggtagtcggataaaattatcacttaattttaaaatgatattgccaaaaatggcgttttatagcaaaaaaaaaaattaaatttaaaaattaaatttggatttttgtctgagacggagttggcccattatatacgaagacggagttggcgagacgaaattggctcattttcagatgaaattaacccagacgcagttgatccctacgaaattgtatgtcaataaaaaaaatcgttgcaaaaaaaaaattttaaaaaatttctgacataatttttaaatttaattatcattaattttaaatttaccggcgtaattgtgcccgaatccctggtcagggggcaccaccctgtagaacaggggcccatattgtgccaacaccgatgccgcggccagcgcccaccaattcccgatgctgccctgccgaacatccccagcgatgggcccttggttgatgaactgcggatgttcagcaagttcaccaggccggcgccatcggaccgccactggctctccagtgaagtacaattgaatggactccaccggaaactccgggtcttcaaagagaccatctctctacaatattaacaaaataattatttattacttattttaaattttatcaatttttattgcctggagccaatagtctctaagcagctcaaatgattgggacggtgtctcacccgacaccgggatgaacccctcaacctaatgaaggaataaaatattaaatttcaaattatcattttttgcaattcacggtacatctctttcaaactcattattttggatgcgttccaaaatttcttcgccaacaacgtcaaggacattttccatatttaaaaattaattctaaatttagtttatcgccatatacataggattgcattttaattggaaatgaaaaataacaaattaaaaggcaataaaataatataaataatgcattaaatttttgtgagattagtgagaataggcatactgtacatcacaaaatacggtagggatagggaaaaa

SEQ ID NO: 41237 - DNA, 939 bp, Heterodera glycines
aatggctatctctttttaggaaattttctatctcccattccgatgctaatccgttccggagagcctcttcaaaattttttccattaccctaagagctgcagaaattgtgaattaattctcagaaaaatggctatctctttttaggacaattttctatctcgtaaccccgatgctaatccgttccggagagcctcttcaaaattttttccattaccgtaagagctgcggaaattgtgaattaattctcagaaaaatggctatctctttttaagacaattttctatctcgtaaccccgatgctaatccgttccggagagcctcttcaaaattttttccattaccctaagagctgcagaaattgtgaattaattctcagaaaaatggctatctctttttaggacaattttctatctcgtaaccccgatgctaatccgttccggagagcctcttcaaaattttttccattaccctaagagctgcagaaattgtgaattaattctcagaaaaatggctatctctttttaggacaattttctatctcgtaaccccgatgctaatccgttccggagagcctcttcaaaattttttccattaccgtaagagctgcggaaattgtgaattaattctcagaaaaatggctatctctttttaagacaattttctatctcgtaaccccgatgctaatccgttccggagagcctcttcaaaattttttccattaccctaagagctgcggaaattgtgaattaattctcagaaaaatggctatctctttttaggacaattttctatctcgtaaccccgatgctaattcgttccggagagcctcttcaaaattttttccattaccctaagagctgcagaaattgtgaattaattctcagaaaaatggctatctctttttaggacaattttctatctcgtaaccccgatgctaat

SEQ ID NO: 41238 - DNA, 777 bp, Heterodera glycines
aaagcttaaatgggaatcattttaaaaagcagaatctttcattaataatctaaattattggaaaagttcgccatttagctattttttcgacaaatatggcataatttgcttaaatgcaacaaaaaattttacattgttcgatagccaaaaatttttctctattaggcctgcaaaatttcaataaaagattattgtatttaatataagttatggctaatagtacgtattttcatcgactttttcgaaaattgccaaattgaaattttgcagactaatagagaaaaatatggtctatcgtaccataccaagaatgcaaaatttgactgcttttgagaaatgttattccatattttgtcgaaaaaaatgcctaaactggcagatttacgaaacaatccagcacgaaatcgttctaattatacatatttaaaattatttttaattaagtattttaattgtaaatccattttttaagcacctgagtgaataataacgggaatagcagtgcgccaaattcaaccgagatcagtaggccaacaagtgtagaaaactgctcgttttttctgcctccaaataaaatttttcattgaattttgtaacaacaaaatgccaaaaaattgcctgtcattttgtcatgaaaattgcaccattgtaccaacactgtgggccaaaacagtgccaatgatgcgccaaataatgtgacagcaacggtacgcaaggacggcacattcagcgcgcaaaaggcaagtccggagccgaactaattggaattttaatttt

SEQ ID NO: 41239 - DNA, 850 bp, Heterodera glycines
attaaacggtctatcatttttttgatatgtccctccgccctcccattgccttccatccaaacaccccccccccccgagcccaatactccgattttgagcggataaataatgaaaggggaaaagaaaaataatcaaaaaagaggggaaaagggtaaaaattattctaaaggccaaaagggagagaaagaagcagctgatgccggaaaagcaaagcagcaaaaaaaaaacaattgttgttttgtgaccattacgattattggtgtttaaacgattattttggacactgttacaaaaacattcgctacacaaaaggacggagaaaatggggggggggggaggaaataaataacggacggatgggaaatcaaagggcgagccgactttggaaaatagtacaaaggataaagagagggggaaagaaatgagaggaaggagagagagaagggtgggagagaaaaagagcataaattaaaaccaaaagcaacggaaggggaaaaagggggggaaagggcgacgaatgcgcggcgtttcaaatacctattgttaaatggtgggcccattctgtgcaaccgcagtaacccactcagaaatcactttaacacattacaaaaagatctccaaaaggaaaaaatgggaggaagagcgaataaccttctattatgctatcggtatatataataaaaatgctctagcccagaaaaaagcgactctcttttgacgctcaatgttctactgatccgacagctcactgccatgataggaagaggaattgctgcacatagacctcttagctgtcagggaattttgacttctacactctattccacaaaaatgtatatctcttattctg

SEQ ID NO: 41240 - DNA, 706 bp, Heterodera glycines
gcttcatcgaacgaggcattctcgaaagcggccgtcttgtcgatgatgcgctccattgaattcgcgacgagggccacatgaccactacgacgtctgctgttcgaccactcccgccgccctccagcccctacctcgtggcgctgacggggctgttcgcgctgttcaactcagtgcgggtactggcctacctgcctaccctacacgcgatcttcactagcggcgacagcagccagcattcgttgttgacctggctgacctgggtgggagcgaatgcaacgatggccgcctggctctacgagcagaacgggcgaagtatgaaccgcgccattgtcgtcaatgcctgcaactcgctcatgtgccttgcgacgtcgatcctcatcgtggcctaccgcttatgaggctctgcgctagtagcagatgcggtgatgctgaagtgtcgccaggcgcttgccaacaacgactatttcagcagcgtcgacgactggaatggtttgatctgaagcggtcgcgcggctgcaaagccgtcactggctttgcgcgcgcacacgccgcaccgaacgccccggtccagggctgaagctgccggccagcgtgcaacagcttgaatgaccgctcttggaaatagctgccactgaatcccaaacggcgaacgaccgagatcagcctgaagctgacgtccgcatgcgaacgtcgactttgcgcggat

SEQ ID NO: 41241 - DNA, 612 bp, Heterodera glycines
tcaaaaaatacactcctaagactgacctaaaattaaaaaaaaacttaaaaattggggcaatggtaaagttttgtggtttcttcgaaaaattatttaaaaatttaagactggaaaatgtgctgatcacgaatctaagctcgaattttgcaaaataattgattttatctatgattttttatcaagtactagattttttccaaaattttttagtcgggcgtaaaaaaacgcacaggatgttgtagagctcaaaaagtgctttcgaatgagctatagaatgtatggagaagtcatgtttttagttatttacgattttttgaaatttaattactagcccttaagggtcatatgagacgggggtctggggttcgagcccgcttggctgtgtttattaaatttttaaacttatttttcgaagaaaccacaaaacttattgccaaaattggtaaatttctcaaaaattcatcctcaaattttttttcttaacaaaattatgtcactattcgtcattattttggacttttcgccattattttggcattttttagcatttttactatgtttttcgaaaaaaatggtttgaaaaaatccagacgggggggattatttttcaaa

SEQ ID NO: 41242 - DNA, 1130 bp, Heterodera glycines
tctaatctactcaaaacggttcagaattcaataaaaacattattcacggtgcgaaaaatggggtatgaaaagtttattgggggaaaaaaagactttacaaaataatacccctgggagaagggagtgggaaacatgatttcaaaattttcaattttttctagtctaatctactcaaaacggttcagaattcaataaaaataacattcacggtgcgaaaaatggggtttgacaagtttattggggaaaaaaagactttacaaaataatacccctgggagaagggagtgggaaacatgatttcaaaattttcaattttttctagtctaatctactcaaaacggttcagaattcaataaaaataacattcacggtgcgaaaaatggggtttgacaagtttattggggaaaaaaagactttacaaaataatacccctgggagaagggagtgggaaacatgatttcaaaattttcaattttttctagtctaatctactcaaaacggttcagaattcaataaaaataacattcacggtgcgaaaaatggggtatgaaaagtttattggggaaaaaaagactttacaaaataatacccctgggagaagggagtgggaaacatgatttcaaaattttcaattttttctagtctaatctactcaaaacggctcagaattcaataaaaataacattcacggtgcgaaaaatggggtttgacaagtttattggggaaaaaaagactttacaaaataatacccctgggagaagggagtgggaaacatgatttcaaaattttcaattttttctagtctaatctactcaaaacggttcagaattcaataaaaataacattcacggtgcgaaaaatggggtttgacaagtttattgggggaaaaaaagactttacaaaataatacccccggggaaaagggagtgggaaacatgatttcaaaatttttaatttttttctagtctaatctactcaaaacggttcaaaattcaaaaaaaaaacattcccggggcgaaaaagggggtttaaaaaagtttattggggaaaaaaagacttttaacaaaaaaatacccccgggggggaaaggggggggggaaaaattgaatttcaaaaattttcaattttttt

SEQ ID NO: 41243 - DNA, 1528 bp, Heterodera glycines
  unsure (1)..(1528): unsure at all n locations
ttttccccccccccccccccccccccccttttttttttttttttttttttttttttttttttttttttctttttttttccccccccacctttttttttgtgcctttttccaaaaagctccccccaaatttttgccgggggaaacttggtggggaacccctcacaaaatttttttttaattttttttttaaaattttttttccctggggggaaccaccgttttttcacccctttccccccccagcccttattttttttttaattttttttttccattttttccccccacgtttctgggctgatccgaaggccccccaatttttgcagggaactgctggagaccccttcaaatgcttataattttttttagattttttgcctggaggacccagttcttcacactacccccccagcattatttttttaatttattttttcattttatcacacaacgttctagactgatcagaagctcaccaaatttagcagggaaactncttaaaaccctacaaatncttataaattttcttanaattttttncctnaannaacacacttcttcacacttaccacaccaccattatttttttttaattatttttttcattttatcacccaactttctanactnatcanaanctcaccaaattttccananaaactnctaanaacccttcaaatncttataaattttcttanaattttttncctnaanaaacacatttcttcacacttaccacgccancgttatttttttttaattatttttttcattttatcacccaactttctaaactaatcataacctcaccaaattttccaaaaaaactcctaaaaaccctacaaattcttataaattttcttaaaatttttttcctaaaataacacatttcttcacacttaccacaccaacattatttttttttaattattttttccatttcatcacccaactttctaaactaatcacaatctcaccaaattttccaaacaaacttctaacaacccttcaaatccttataaattttcttaaaattttttccctcaacaaacacatttcttcacacttaccacacaaccttaaaatttttnccctntttaaaaactaattaaaaatttttttaaatttattcatctccctttttaatanaaaaatcatcacaatcctaaaattaanttntaaataaaattttatactctttagaaaactttctcaaaaaaatatttatgaaacaaaaaaatccattttttcaagtgtccgtttggggtactcaaacaattatnnnnaccaaaaatccaacccanaattaaantacannctatannnaanctattcccnaannattcnntctccccataaatctnnncccatcnnttcnnnnnnactnccccnaaaacaaaaataaatcnattttttcaantntccntttnnnntactcaaacaattatnnnnancaaaaatccaacncanaattaaantacannctatannnaaactattcccnaannattcnntctccccataaatc

SEQ ID NO: 41244 - DNA, 1288 bp, Heterodera glycines
cgctaactgtgcaggcactttccccgtccggactttcctttgacaaatgcgcacattttgagccgtttgctcatttccaattgcactcacccttaagcacgtccaccaccaaactgtcactggaacagtcgctgccttcgccccccgtctgaatccctcgcgccccgaaagtcggcccgttcccattcagtcccatcagtcccgagctggtcgtggtggcgtcggtcgacttcgtccacaggtcaattcgcagtgccgtgccctcctcgtcctcctcctcccgctcgccccctccgtcttcgctctcttcctccgctttcatcgcgccttccgccgctgcgttcagtcgcccgacctttcgaattgtctcttccaccgctgtcgaggccatcttcatccgcgctcgcttgtggccccgttcgaaagtgttttgcagacgctggttggactcttcgatggtcagaggcgagcagaagtgatcggacgcgtcggggaagtcggggtcattgatcagcaggtcgtttttgaccgcgatgcacggcacctgcagctttacaggggaacggaaatggtcagagtgttcaattgagcagtcggactaattattgataaaacccaattaagataccaattgattgcccacaataaataaatgttttagagcgaattcctttgactgattgataaatttttgaaataaaaaaaattaattctcaccgctggcagtttgtccttcggaaacacacgttggagctgaaatcgcaattatgtaagagaagagttcgcattcccattttacccggtgtctgagggcacggcacgccatgcaccggtaataaacggtggtaagccccggattgggttggtgaaacgcgtcttgtaggcgaactcgcgtctgcgtccggggtgtgagcgcgagtcgtagaccaaaatctgtcggccatggccactgggcgcgtagctgggcttaatcggtgtaaaaggaagctgccttcgctggtagacgccgggcggagcaagcgaagcggcagagatcggcttcatgtcgactatggaagcggcggagtgcggaggcgaagggctcgctgtatgggctccgtttgtgcttaccggactttcaatctgacaaaatcacaaataaagcctcgcttccgtttcttgctgggctttctaaccgaatttggtgatgtcgccgtggaactggtcaaaggcattgccaaagtcgccgtcgaagtccgcaacatgtcaccgttgtggcaacaggcgccacagcagcagcggacgaagc

SEQ ID NO: 41245 - DNA, 983 bp, Heterodera glycines
  unsure (1)..(983): unsure at all n locations
ttcatccataatggggccaaaaatcataggttaagaccaatagagggattttagtttcagccggaatttctataaaaatgttcgtgtgtaacctatctttgtctattcggataagtatgaaattgaaatattcgtattacttttcctcccttaaagctttataatgaaagcgtcgttgtatatttaggatttgccgtcgcaattctgtaattccactttggaatccaaaggaatttgattcgcttttacaaaatagacagtgccgaaatttgtagatcggctaaaccttaactgaaacataccatatcagcgagacgccatgctgatttgttgtaatcataataaaaaggcccctattgttcaattctgcctttcctataagcacaatgtgtttgatgggctctacaaaatattgcttgtgcaaagcaattattttcttggaggctgtaattttctgtagtcatttgatatgcatctgctatttttctagtcacaaacaccaatatttttcggcccgaattttataggcgtgaaaagtactgatttccaacttctttctattcggatacacccaaaatttgaaaagcatctgtaattcagcctcttttaaatcttaattttctgaaacccgaatttagaaagtatgaatgtatttctgcgacgccttctatacttaattcatccataatgggccaaaaatcataggttaagaccaaaagagggattttagtttcagccggaatttctataaaaatgttcgtgtgtaacctatctttgtctattcggataagtaagaaattgaaatattcgtattacttttcctcccttanagctttataatgaaagcgtcgttgtctatttaggatttgccgtcgcaattctgtaattccactttggatccaaaggaatttgattcgcttttacaaaatagacagtgccgaaatttgtagatcggctaaacctaaactgaacataccatagca

SEQ ID NO: 41246 - DNA, 926 bp, Heterodera glycines
ccctcataaacaggaaaacacgtttttacctccattagtttctccgttatcaatcgggccgataaaaagggatttcccaagaaaaacctcgctaataacgatggattagctatcgacaaagttaaggcttggtctgccattatttgcatgcttgtgcaaattttacgaattgtctccgtaaacagccgctgagaccggtacggcaaatgcttggtccgacacaattaattcgcctggctcgggatagcatacgggctgactatgagacgaagtgttttcaaaactcaatgcaaaagtcaccactttccgtcgtccatatcagacttgcatattcaccagaccattttgacaaccaaacaaaagagcaaagttgggtcttgtcgggggtccaaatcagactaatttttacgcattggcatttgcctgatttataaaagcaattagagcactctccgattggtgtattcaacccctccattccatgacgtgtaaaaacaattgtcttatacacataacaattatcaatttcttccgttctccaaaacaaatttgatggccattttccccacccaatttctagggaattatttgttgccattagcttttcgtcattaacgtataattcgcctgctggagagtccttatcaactgccattttcctgcaaattgcagtaggcaactaccaaatgaaaggcacttatttcttcatatgttccaccaaaaaatcctctcctccttgaaatgcgcgttaaaatgcagctgcaggctgtagcttcggttttttatttgtacagtgtttggtcgatatatatttaatgcaaaaggaaacggggacctgcgttggaacccaattagggaaaatagggtcgacaggcaatgaccaaatactggtgggaagatcccggaaggatatcatgggctttgcc

SEQ ID NO: 41247 - DNA, 68 bp, Heterodera glycines
agagatcgtaaattgtgtgcgcgaatggaagggaatggtgagagacgggggggggggagacaaaatcc

SEQ ID NO: 41248 - DNA, 954 bp, Heterodera glycines
tagatttcgattttcagcgatgaaattttggatttctcatcgattaaattttggattttgagtgaaaaattttggtttttcagagattaacttttgaatttttagcgattaaattttgaattttgagcgatatatttaggatttacaacgattaaatttttattagcgattaagttttggatttttagtttaaatttattaaaccattttttccatagatttaaatttattttttatgtgtaaaaaacatgagtgtcaaaaatacgccacgctcaagaccatgaaattttggcatttgaaaaaaatcgcttttatataaaaatttatttgtaaaaaaatttataatataaattccgccgcttcaaatatttcataacaaaataacggaaagtggaaaaaattgttaagattttaaatttattcttatttttttgtgaaaatggagcaaaataagggtcagcttcttcgtgtgccatcattttgtgctggaagaggttggccaacagaagcttcccgggaaggcgcataattttgcatttgtcgatttgaattttggaccaattcgtcggccactgaattgaaattttaaatatgttcaaaattttattactatttgctatttgctaattttaatttaaaaatattttattcaattttaattgccaatgatatttttctttaaagacagacatttccgacctaaaaataaatcggcttcttattgatttgtttatttaaattaaaatgatcaaattgaaattaaaataaataagcgatttttacattgttcttcgcgctccaattccttgaccaattcgctcatattttcggtgatcgcatcagccgcctatttaatgttcaaattaattaaattaaatctatttaaattaaaatttatttatttaaaataatttattgagtccccaaaaaatgcctgcaaaaggtcgccctgca

SEQ ID NO: 41249 - DNA, 1093 bp, Heterodera glycines
  unsure (1)..(1093): unsure at all n locations
gtttgagtaccccaaacggacacttgaaaaaatccatttttttgtttcataaatatttttttcagaaagtgctctaaagcgcaccaaattttatttacaacttaattttagaactctgatgctttttctatcaaaaagggagatgaataaatttaaaaaaatttttaattcctttttaaacaggccaaaaattttaagcttgtgtggtaagtgtgaagaactgtgttcctccaggcaaaaaattctaagaaaatttataagcatttgaagggttctcagcagtttccctgcaaaatttggtgagcttctgatcagtctagaacgttgggtgatcaaatgcaaaaaataattaaaaaaaaataatgctggtgtggtaagtgtgaagaactgtgttcctccaggcaaaaaattctaagaaaatttataagcatttgtagggttctcagcagtttccctgcaaaatttggtgagcttctgatcagtctagaacgttgggtgataaaatgaaaaaaataattaaaaaaaaataatgctggtgtggtaagtgtgaagaactgtgttcctccaggcaaaaaattctaagaaaatttataagcatttgaagggttctcagcagtttccctgcaaaatttggtgagcttctgatcagtccagaacgttgggtgataaaatgaaaaaaataattaaaaaaaaataatgctggtgtggtaagtgtgaagaactgtgttcctccaggcaaaaaattctaagaaaatttataagcatttgtagggttctcagcagtttccctgcaaaatttggtgagcttctgatcagtctagaacgttgggtgataaaatgaaaaaaataatttaaaaaaaataatgctggtgtggtaagtgtgaagaactgtngtcctccattgaaaaatcgattttttatttcataaatattttttcagaaatgctctgaacgcaccaaattttatttacatgntagtttaggcactctgatgcttttctatcgaaaagggagatgaataaatttttaaaaatttttatttccttttttaaacaggccaaaaagtttaggccttaactttttttttcaaaaa

SEQ ID NO: 41250 - DNA, 1009 bp, Heterodera glycines
atagcgtagaaaacagcttcgatatcaagaaaccaacgttaagtccagaaaggaatattttataacgatttcgttttgttttggcattatgataccgaataactttcggaaattatggaaacaaaattggagaaattcgaataattttttgactgcaaatttttttccttttttgaattgggttcataaaaattttaagagaatttttgattattaatttgaagtcttgaatttatttgacaaatccaagacttaaaactgggagaagcaaggggctgtggctgggggcctaaaatttgggccacattggagaattaattctgatttctgaaaaagtcccagaaataactattttttctttccataccttcttgtagagctcgagctgctctttccaatggtcttatcccggtctcgatccgtgccgaactcacaaagttatggagtgaaatgtgaaatattgttttcaccacaaggcattttttctgaaaaccggattcaaaaatctggggtttggtataaccgttttagaaatagcgtagaaaacagcttcgatatcaagaaaccaagtcaagtccagaaaggaatattttaaaacgatttcgttttgttttggcattatgataccgaataactttcggaaattatggaaacaaaattggagaaattcgaataattttttgactgcaaatttttttccttttttgaattgggttcaaaaaaattttaagagaatttttgattattaatttgaagtcttgaatttatttgacaaatccaagacttaaaactgggagaagcaaggggctgtggctgggggcctaaaatttgggccacattggagaattaattctgatttctgaaaaagtcccagaaataactattttttctttccataccttcttgtagagctcgagctgctctttccaatggtcttatcccggtctcgatccgtgccgaactcacaaaaatgtggagtgaaatgtgaaatattgttttcaccacaagg

SEQ ID NO: 41251 - DNA, 1001 bp, Heterodera glycines
  unsure (1)..(1001): unsure at all n locations
aaattatttttttcatttgatcacccaacattatagactgatcgaatgctcaccaaattttgcagggaaaacgccgagaaccctacaaacgcttataaattttcatagaatttttcgcccggagggaacacagttattcacacttaccacacaagtattattttttcgataattatttttttcatttatcacccaacgttctagactgatcagaagctcaccaaattttgcagggaaactgctgagaaccctacaaatgcttataaattttcttagaattttttgcctggaggaacacagttcttcacacttaccacaccagcattattttttttaaattattttttttattttatcacccaacgttctagactgatcagaagctcaccaaattttgcagggaaactgctgagaacccttcaaatgcttataaattttcttagaattttttgcctggaggaacacagttcttcacacttaccaaacaagcattatttttcgaaaattatttttttcattttatcacccaacgttctagactgatcagaagctcaccaaattttgcagggaaactgctgagaaccctacaaatgcttataaattttcttagaattttttgcctggaggaacacagttcttcacacttaccaaaccagcattatttttttaaaattatttttttcattttatcacccaacgttctagactgatcagaagctcaccaaattttgcagggaaactgctgagaaccctacaaatgcttataaattttcttagaattttttgcctggaggaacacagttcttcacacttaccacaccagcattattttttgtaaattatttttttcattttatcacccaacattctagactgatcggaagctcaccaaattttgcagggaaactgctgagaacccttcaatgctttataaatttcttaaaattttttgctgnaggaacacagttcttcacacttacccacaccagcattattttttt

SEQ ID NO: 41252 - DNA, 908 bp, Heterodera glycines
gcaacgaatgactgagagaatgaatgaatggtgcgtttaagcctcccccggggggggggggaattttgatggggacaggggacacttttgactgcatggatatgggggaggatgagaataagcttcctctcctgcctctggcgctgcgggcactttgacgacgtctctgtgccgccgtcgccgtaagaaaatgggcgtggcacaaacacaaaagccgcggcgccggcggggaggcaaaagccatgcttttttgtgcggtggctttaagcgggcggcggcggaaggcaaacggcttttccttttccccatcccacaattagagaagctttgccccagcttctcactcctttccctttttaccctttcggcagagcaattctaattgtttctgctttttgtgcactctctcttttcctcctcctctctttcttttcctacgtatctttttttctcttcctcattttcgtttcttcattattccttctttagattcatcttccttttgtctttcacaacttttcttctttctgtcccttgttttctctcttctatctttactggactctctctcctttttctccaccttcccctctctctgtccatcctctctctctctctccccctttttctctgcctcctttctctctcctcttcttcattcactcccattatccctcattactttccctctttttctttcactttattttttatatccatccttctcttttatctgccctctttcttcatcacttttttcttttctcctttatctctcttccattccattcttctctttatttttcttctccatttccatctctaactttctcatttcttttcctttcttttccgccttcctcttctcttccttccattctttgctctttccatttttgctcttcttt

SEQ ID NO: 41253 - DNA, 293 bp, Heterodera glycines
gagcaaaagagaggagacgaaagtgaactgaaaatatatttttatactttgtgggatcagttccaaatgcacaaaaatttggtttctaaattcaaaaaaaaactgaacaaatgtttcagctgtgacctcgagcgttaccaatggacgcagacactcggcgaattggaagtgcgcgttcccttcccttcgcttggctttccgctcaaagtataaatgctgcccaatcggaggacagagaaaattattatttgaaaactttcactttttgacaaatggtcatttatcgaacagaa

SEQ ID NO: 41254 - DNA, 1100 bp, Heterodera glycines
aaaatcgtcaccgattacgagtgggtgcccaaaacatttggcattaaaaacagtcgaaaatcgtcaccgattacgagtgggtgcccaaaataaatggcattaaaaacagtcgaaaatcgtcaccgattacgagtgggtgcccaacaaaatggcattaaaaacagtcgaaaatcgtcaccgattacgagtgggtggccaaaaatggcattaaaaacagtcgaaaatcgtcaccgattacgagtgggtgcccaacaaaatggcattaaaaacagtcgaaaatcgtcaccgattacgagtgggtgcccaaaataaatggcattaaaaacagtcgaaaatcgtcaccgattacgagtgggtgcccaaaataaatggcattaaaaacagtcgaaaatcgtcaccgattacgagtgggtgcccaaaataaatggcattaaaaacagtcgaaaatcgtcaccgattacgagtgggtgcccaaaataaatggcattaaaaacagtcgaaaatcgtcaccgattacgagtgggtgcccaaaataaatggcattaaaaacagtcgaaaatcgtcaccgattacgagtgggtgcccaacaaaatggcattaaaaacagtcgaaaatcgtcaccgattacgagtgggtggccaaaaatggcattaaaaacagtcgaaaatcgtcaccgattacgagtgggtgcccaacaaaatggcattaaaaacagtcgaaaatcgtcaccgattacgagtgggtgcccaacaaaatggcattaaaaacagtcgaaaatcgtcaccgattacgagtgggtggccaaaaatggcattaaaaacagtcgaaaatcgtcaccgattacgagtgggtggccaaaaatggcattaaaaacagtcgaaaatcgtcaccgattacgagtgggtggccaaaaatggcattaaaaacagtcgaaaatcgtcaccgattacgagtgggtgcccaacaaaatggcattcttcatttttcagcaatttcagaccacagaacacagccaaaaaatcaatgttttctcccgaaaaacaatgaaattcacaaattttcagtctgacaaaccaaaaaaaaggggggttttttttttt

SEQ ID NO: 41255 - DNA, 853 bp, Heterodera glycines
ataagtataatattttattagtgtttttcttctcgaactatactatatgattacctctttttggttgggtgaatttttccttttctttctgtgtaatctactcttgatcgcatttacttccatatttttaacattcttttctcatgactggagtgttgacaattttatcttcatattttaaattattttttataatacccctgttataaagaatggatgattatgatttcgaaattctcttttttttctaatcgtaatctactctgaatccgccataattcatccgcaaccgcattcatttttctgaccaacgcctatgagaattgttatttttgcattttgacttaaaattttttttttcctgggcgacagaaatggcacacaagattgatattctatgattattttactaggttacctactcaatcatagtaaaattacttttatgctttaattttttgttatcctaatgcttgaaaatttcgttcttgaacactgcttaattatacaaaatgaatgccttccgactcgccatttccaacagtttataacattgtaccttctttactatgataatcgacactcttgaatttataactttatcgtatttgttattggtaagaagagttatgattaattaaaaactcattttaataaatagatatttacgttacctactacctggtgcccttaaatacaattactctatctaattatgcacttttatgaagtgacaaacattcgttatatcccatgatattcctaaattacattaacgaccgcaaagcatgaaaataaactgaagtatctgtcttcttgactctatgtactagtgcgccaagctcatgccgac

SEQ ID NO: 41256 - DNA, 871 bp, Heterodera glycines
tattttttagttggtctgtcgcccgccacaaccgaaccttggccgtttaatggtttttgtgaaaagaaatgaagaattttttataaaaatctcattataatttattggaatattattttcattttacctatggacgattttaaaaaaccttacaacttcagaggataaacatatttaaaagctcaaggaatggcatcggcaaattgtgcagttttcttttggaaaccaaatgataactgagaaagtttaatttttctttcactggagaaaatttgaaggaattcagctgcagatagagattaaattatcaggatatcatggtataaggtcggcaattttatttatttaattcgaaatgaataccaaacggccaagttataaaaaaatccgtattctgattggcatttgatatttatatttacgtaaaatcttaataaatttatttttaattaaattcttatttcatttttactttataaaattaaatttgtcttccattccttcattttctggggcgatctttggttattattattaaattgtttttatcccctatagtatccaatttttgggcggtttccatttttctcgtatccaatgtatgctatataatataaatttttgcagttattacattacttttttatataattttattcaatatttacttttttctataatttctgcattgttcaatttttatattcatttgggtgaatcaattttatccatagccatggatatggcaaaaatatatttccatcgctcatggattaggggctataagagggataagaataaaaaatataggtattaaacaaattttgtagaatcctcagtctttaacattaacgccccccccccccccttc

SEQ ID NO: 41257 - DNA, 963 bp, Heterodera glycines
aattgaataactttgtttaacgatatgcaaaatttcatttcggatttataacagagagagagagagagagaagaaattgcacgccaatatgagagatgtatttttctctgtactctcaatttattggttcatctctcgatttttgggtggtggtacagacagctcacatatatccttcaattggaagcgcaggctagtagccaggggccggggaattctaccccccccccatccggaaatgaaaaattgttccaagaaaaaattgccacttttttaaaaattttaattaatcttaataaaaggtattaaaattaaaaaaaaaatttcggcgtgcttagcaggataagaagaccccccccccccattttaaaaatgaaccttatgctgtcgctgaaaggtcactaataacaattgatattaatgagggggcaaaaaataattcacggcaaaacgatgacccaacaaaatggaaaagaacagaaacattttttgaatttttttttattaccatttttatttgagcaaaaagctgacacagacaaaaaaaagagaaagaaggataaaagagaaattagagaaaacagaattttaatttcggcggttaaatctctttgaaattccaccgccacctgaaatctctccttcaaatgtccgatttgtccattatttcccatccaccggaaataatgccctttagcgatgatttatttggcttttcatttttccattaaattatttgccaacgcttttcccagataattaaaataaaataaatttcagtttttattagtgttaatttgtgatgatttacgcccctctgttcaactgcttttcccattttccgcttgtccataaatcggcaaccgaaaaaccaccaaaatcattcattttacatagatcaatcagtacttttatttttttgtgaaaaacatatcaatttgtttctcgtttcatttttgcttg

SEQ ID NO: 41258 - DNA, 1162 bp, Heterodera glycines
  unsure (1)..(1162): unsure at all n locations
cgcatcgttcggggggactgccccgaaaacaaaaaaatcgattttcaaagtgtccgtttgggtactcaaacaattatgaggagcaaaaatccacngcagaattaaagtacaggctatagggaagctattccggaaggattcggtctccccataaatctgggcgcatcggctcggggggactgcnccgaaaacaaaaaaatcgattttttcaagtgtccgtttggggtactcaaacaattatggggagcaaaaatccaacgcagaattaaagtacaggctatagggaagctattccggaaggattcggtctccccataaatctgggcgcatcggctcggggggactgccccgaaaacaaaaaaatcgattttttcaagtgtccgtttggggtactcaaacaattatggggagcaaaaatccaacgcagaattaaagtacaggctatagggaagctattcccgaaggattcggtctccccataaatctgggcgcatcggttcggggggactgccccgaaaacaaaaaaatcgattttttcaagtgtccgtttggggtactcaaacaattatggggagcaaaaatccaacgcagaattaaagtacaggctatagggaagctattcccgaaggattcggtctccccataaatctgggcgcatcggttcggggggactgccccgaaaacaaaaataaatcgattttttcaagtgtccgtttggggtactcaaacaattatggggagcaaaaatccaacgcagaattaaagtacaggctatagtgaagctattccggaaggattcggtctccccataaatctgggcgcatcggttcagggggactgccccgaaaacccaaaaaaaaattttttggataaaaattatttaaatgaactgactagataatatttaaaataggttatttctcttcctttcagtatccctgcaaagtttggtgcgcttctgatcagtttctgaaaaaaaagttaagcctaaactttttggcctgtttaaaaaggaattaaaaatttttaaaaattttattcatctccctttttgatagaaaaagcatcagagtgcctaaactaacatgtaaataaaatttggtgcgtttcagaaccctttctgaaaaaatatttaagaattaattttgcaaaaaacaaataa

SEQ ID NO: 41259 - DNA, 991 bp, Heterodera glycines
  unsure (1)..(991): unsure at all n locations
tgcttctgtcccctcccatgttgtgaagtgaaaaaacttttccaatcaaccgactcgggatcgaaaaatacgtgtgtcatttttaaaatatacttttcttaaaatgtaatgtaagaatacaacttccccagtgaaatttaacgaattcaccaaatggtgtgtgaatttcaattgtaatttctgaaattcgtttcgactgtagacgatgaaaatactcggtgctatatataacttcactaattgatcctgggtcatcgacgacgttaactattcttaagagtggggccatctggttgccgataattgtgttttcgattaaatttggtgcataaatgtatagctgccttacacctcccgtcaaatccggcatataagtcgcctcttccgcgtgaaatagccttgtattcttaaaccccagaacatatgcgaggtgttttgacaaatctatatgggtgacggcagaggaaagatagacaataaatttttgatcaatgctgtcatattgaaattgaacatcctcattggctagtctttctcttttttgtagtcctttctcagcttcagatacttgtctattttcaatatctttacgtttaatatgctcacccaaagcctcattaagcctattcactatcccgctaaaacccttttccgatttatcattatatccctcgagagttgatgtatatttggtctttgcctgtctggcgattccctttgcgacgtcggctgatttctttgcttttttcaagtcattcttttccacatgctccaatgttatgtttttggctttatctacttcttcttgaaaagacttaagttcatttcgggatgtttgaatttcggttcccatctcaaccattttgtcaaaccaaatttttatatcaggctcttctaaaatgtgaggatttgtttctcgtagtgtgtttagttgggtttggatggaatcgagatattngtgatctgattaaatgtctttctacgtctctcc

SEQ ID NO: 41260 - DNA, 996 bp, Heterodera glycines
aggcacataaaacttggcaagcgtacgccttgcagaaaaaaagtgtcaaataattaattgaatttttggtaattatggaggtggcttttcctttgattattccatagttctaggcgtttacgattatataagaaagatttcaacatttggagaaaactgtgagcaaaaaatttccttggcacttttctagtcagaaaatttaattgacgttggcaaaaaaaattgaacactttttgtaaaataggagaaaccaggcatataaaactcggcaagcatatgaagcagaaaaatgtgccaaaaatgaattgaatttttgcttattatggcggcggcttttcctttgattattccatagttctaagggtttactattatatctgcaaaatttcaataaccccaaaaaattaaggccagaagaactcataaaagctgattttttaaataatttttttggttttacaaaaatttccagcttttctctcccagcgggcaggaaaattatttcaaatattctgttaatccatacagtttaatatcgctacagtgagacacttcaaaaccgtggcaacgaagataatcagcaaactgagtgatcactaaatggctaattttgtattttggcacagtttttgatcgaattattggcgaaagcgaatgaagcaaatatttttcgaacattgaatttgttcttgattaaacgatggattcttcagaatttcttctaaaattaaattcatgacaaagtttcttgggtgccgaaatgatttaatccaattgcccactatctcaaattctctgacccagtatattgaataatttatgagttaatgaaaatttttcaattttttttttgtcaaaaaccaccaaattaaattttttttttaaactcttaaaatatacaaattttctcatttgtaattatatattcttctacctatttacaaccaaaatgtatatatcatagacttaagagctttagtcttttcaataataaaa

SEQ ID NO: 41261 - DNA, 862 bp, Heterodera glycines
  unsure (1)..(862): unsure at all n locations
ttatattttatttccttttttcttcgcccattttcccattgcttttccaatttgagtcagtataacaagttcttcattaaacaaatggagctcatttgccagtacattaggcctttctaacacttttttcccctgccgttccgtgcactaattaatgactttgtcaatttgctgcttttccctaattgcgtgtccattcaaaaaatacgtttttcatgaaattgtattttgattaaaagtgcctaattgccatcatttgatttatttttcatgaagagtttcgggtttgggcttggcaaaatcacccaagtaaaatgccgtggtttcgaattacggaaaaacaaattgaaaaagaggactgactaatgatgaaaattcttttaagctttattggacctattaggactaccttcacctattttatcgcaaatttctgtctttcaatgcaatttgtggagattagtgctgctcgagacgaaaaacccgagacttttctcgagtcgagtctgagactcttgagtgcgactttttgcgccgtcggcactacgacggcactcaacttttgaattttgcatttttgggttgcaaaaaggcttaaatattaaaaaaaataaattaattaatattatttcattgttggctgggaccatcaatgctttgaaaaattctattcttttcttcaattaacactttttctgtctcccgtcattcgcctgagtttttcccacccgtccgtctgctggcggcactgaattgtcccacgcttaggccgcttcatcgcggcaaatttgccaccaccgccgttctggncccggtgcgtgtggccccgtccgaattttgctgtgccattgtcccccccccc

SEQ ID NO: 41262 - DNA, 748 bp, Heterodera glycines
  unsure (1)..(748): unsure at all n locations
tacncagcttaaaaaagtttgtgtctttcaaaatataacctttatttcaaaatttttaaaaatttatggttaattaattcattaatattcttaattttatgtaaagaagcagtaagccccgctcattctgcttctgttttttaactttttacccatcatttgtcaaatttcgaaagtcattttacacttttctcacttttcccattattttctttaaatttttttcttttttttattttcccatttttttcatttatagtaatatttttatttttgtttttgtgctgttttgattctcatctttggcgggggaaaggccaaagattttttgtgttctctttttttttctcggccatcggcgcaaaaaatggtcggccgattttcgtcgactgatttcaatcggagggccaaattgaaggccatttgcgcttttacgttcgcaatgttcacgcacaaatggtccgaccaaaattggggggggggggaattaattaattatatttaattaaaataatacaattaaaagtcttttaaagggcgtaattaattaaattgccaatttaaatatttgaagatggttctgaaaaatataaattttgaaaattctaagaaatttcgggttttattttacttcataaaattgttttcgtcaaaaatatttcctttttgcgccgaggctttttttgtatccttatgcgtattgtttagcgctttttgagagtgcgacccgataaagactgcgcttttt

SEQ ID NO: 41263 - DNA, 971 bp, Heterodera glycines
  unsure (1)..(971): unsure at all n locations
ttcgtccttcaaaatcaaaattttacattgtatcgtcatgtcatgtcatcttcgtgaatttggtatatccccccnatatatcaaccagaactttttttaattttcatatacatatatttccagggtccggatttatacattttttatttttcacaaaatttgaaaatggatttttctattcatttcgtagttgtaagaatgacttgaatattgcaggaaaataccttgatatgaggactttctatatgtaaaatttaaaaaatttgttaatatacaaatttaaaaaatatatttataaaacttgataatcaaattcagacactgccttgaagagttttatctaacgaaacgaacagaaaaatcgcatttcaaatttggtaaaaaaaaacgaatccgggccctgttaatttccatttttatttttcctggcgtaatttaattaaaaattagtttattttttcttttaataaaatccattaactcctgctgaaagcaaatgcaaataaatatccgagttttgatccatcaattactttaatagtaataatctcttttgactggttctatttttcagttgcgtcccccccccccccctattttatttttccattgtttcgctttatttcgtcactcttttgtccattttattgcatttatctttaaaaatatgaatattttatttcattttcaattcaatttaattttttaattaattaattaatttccttttaaaattgttaagcaaatgttattgaggctgttgtgactgactgttttttgttaacaaaagtgcaatttactacacactttagccacatttatttcttgttatgatggccatggaagctcagcaacaattagcaattaatggtgccattttgggaatgccgaaaaatgaagcgagttttaaaaataatattgtaaagtaaattaaagttgaaatattgtcaaaccaaccaaactttttagca

SEQ ID NO: 41264 - DNA, 1015 bp, Heterodera glycines
tgactttcgttcttgattaatgaagacattcttgcccaatgctttcgctgtagtccgtcttgctacggtccaagaatttcaccttttcacgtagcaatacgaatggccccgtttgtctctgttaaccattatctcggtcagcaaaacccaataaaatcggaccgaaatccttcttctattattccatgcacgaacattcaagcgaaacgcctgtttgaagcactctgatttgttcaaagtaaactcgccagcccaccgacgccgaccggtaaaggccaacgccggggaaagaccggcagaaaagccaaccaaaccagtaacacacaaagtgtgcaccggacggctagcacagatccaactacgagctttttaaccgcagcaataattctatgcattttgagagctggaattaccgcggctgctggcaccagacttgccctctcatagatactcgttaaagggtttaaattgtacccattccgatgaccggcctcataagagatcggtctcgttatttctcgtcactacctcctcgcgttgagagtgggtaatttgcgcgcctgctgccatccttagacgtagtggccatttctcaggccccttctccggagtcgaacccttatcctccgttacccgtcatcaccatggtagtcagatacactaccatcgaaagttgataaggcagacacttgaaagacacgtcgccggtacaagaccgtgcgatcagcttagttgttctgagtcaacactggacgcccggagggcgcttggttttgtggcgaacaaatgcgctccgctctggggagattggagctttggtgcatgtattagctctagaattaccacagttatccaagtaagaagtcaaggtcaagtaaattatagctggtgtaatgagccgtacgcagttcaaccagatagctgctagcgagcgttgccaagcgccgctattacagccgtcttgtaaagacggatagtttcagcagaaacaactccgttcagcgcaagcgtgcgc

SEQ ID NO: 41265 - DNA, 1915 bp, Heterodera glycines
  unsure (1)..(1915): unsure at all n locations
tttttaaaattgtataaagttcctatttttgtctttgactttgcttttttttnccattattttcaatcggctagtgctntnaaggttttgtctttgactttgcttttttttccatttatttcaatcggctagtgctttaaggttttgtctttgactttgcttttttgtccatttatttcaatcggctagtgctntaaggttttgtgttttgactttgcttttttttccatttatttcaatcggctagtgctttaaggttttgtctttgactttgcttcggctagtgctttaaggttttgtctttgactttgcttttttttccatttatttcaatcggctagtgctttaaggttttgtctttgactttgcttcggctagtgctttaaggttttgtctttgactttgctttttttccatttatttcaatcggctagtgctttaaggttttgtctttgactttgcttttttgtccatttatttcaatcggctagtgctttaaggttttgtctttgactttgcttttttttccatttatttcaatcggctagtgctttaaggttttgtgttttgactttgcttttttttccatttattccaatcgaccacgttaattcattctctatacatttagtgtcttatttcatgaaattatattaatttaattttaaataaagaggcaaatttttacagaaaataaatagacgctgactaattagctaacatttataaagaaagtagaaatttgattaaatgcatatacaaaatattacttttttaaatttgtataaagttcctagtcgtatgtgctttgcgttggttaattggcgtgggtgagtgtggtggttgggccgtttttgcgatattgtggctggaaaaaagaagcgatttcgctgtggggagcgcggccgtgtgggtttaagtgcttgcttgcgcttgtgctcggcattaaagggtgatggctgctgctggggtgccaccttgnnccgtggcctcagtttctccagcgattggcagctgtcgaaatgaataaaaattcgaaaaaacacgagacataagcgcncgaaggcctctggcctgaggaagtgtcctaaccgggaaatccggaatgctcgtgtgagtgcctgtgcactgccctcggagctgtgtccagcggcgagatggttcttcccaagtccgggaagctcggatgcctggccagcgctgtgtcattaccacttgctcggtcgccttcgccgcccatgcgcacgcttgcgctgaacggagttgtttctgctgaaactatccgtctttacaagacggctgtaatagcggcgcttggcaacgctcgctagcagctatctggttgatcctgcctgaactgatgtgttcatttcaaagattaagccatgcatgtgtaagtttaacctgccagacagggaaactgcgtacggctcattacaccagctataatttacttgaccttgacttcttacttggataactgtggtaattctagagctaatacatgaaccaaagctccaatctccccagagcggagcgcatttgttcgccacaaaaccaagcgccctccgggcgtccagtgttgactcagaacaactaagctgatcgcacggtcttgtaccggcgacgtgtctttcaagtgtctgccttatcaactttcgatggtagtgtatctgactaccatggtgatgacgggtaacggaggataagggttcgactccggagaaggggcctgagaaatggccactacgtctaaggatggcagcaggcgcgcaaattacccactctcaacgcgaggaggtagtgacgagaaataacgagacggatctcttatgaggccggtcatcggaatgggtacaatttaaaccctttaacaaggatctatgagagggcaagtctggtgccagcagccgcg

SEQ ID NO: 41266 - DNA, 760 bp, Heterodera glycines
  unsure (1)..(760): unsure at all n locations
acagatgaggctaaaactaagattcggaccccaaaaataagattttttctaaaactgatagtagcgcgaaggaaacgcaataaaaacatgaaaaaacgacttaaaacaactttttattagcataaaaacgaaggcctgtcaactgaaaattttgtaaatcagcattttgaaaaattttattcaaaatttaaaaattaataatgtttttgcggcgtgctttttccaaaaaacgtgccaaaataaggacaaatcttacaaataaggacacttggccgccctgttaaaacactattttggcgttttgtcactattttttcactatttcgacattttttggaaaattccttaacaaaaatgcaataagaacaactaaatatcgcaataattgttttttattcttaaatttagacttaaaatatgccaaaaattaaatcaaaatcggccagctttcgggaatggattcgaaggatcggaggaactgacttttattcaacaactggcaaaataatttattgtcaattatgtgaacaacaggtaactgcgacaatccgtcgaacaacaacaactaccaatacaaaattcacagattccttgcacgcaattcgcgtatctcaaacaacacaacgaaacggtaaagcacaaggcaaaattggaacggaacaatggaggacacagcagcaatttttgacaacactanacaatattccaaaccnanttcaccnttgattgtgtgaagcctttgtctcagctaacattcctt

SEQ ID NO: 41267 - DNA, 898 bp, Heterodera glycines
  unsure (1)..(898): unsure at all n locations
ggctgaacatgccgaaatcttgttttttgaacaaactaattccaaaaattcaattttattaattttttaaattattatcttttcaattaaataaaaactatacattcaatcatttaattagacaatttttaatatttaaataaaaactgcaaaaatgcttaaattttgaactctaaacattgatatagatagatcaaggaaaatagtttcaagatttgtggacttttctttaaaaaaaaacattttcaaagtcttatcaaataaatgttatgtaatgctaaaattccaaaaccttctaattaaaaaatacaaaaaaaagttcatacaattggacgaaaaaatttaatttcttcctttttcccatcatgaaaagataaatgattagggcaaattttcaaaaaattgtttgaaaattggcaagagggggggggggtcccggcacggaactacgccatttacaacttccgttctttatttatttattcattacatcatatttttgatatagttttatgtaacttttaaattttaaaagaattttctgctcatctaattttatttaatcaatgccatcaaatatgcaattggctggcttacgttgccggtcacagccacacccattttttgcgtggcatttgaaaaacatatgaattcatccctcttagccaatatttattaaaaaaaataatattgtgacattattgatgcatttatttataagaaaataaattaattaaatattattttatttattttaattttacacttatttgtacactcacagaactccatccatgcctattactgtgtctgtaatactccaatttggtttcctaattttcctcgccaattatttggaattntgttcccgctgtggacgacattcgcccaaaagtcg

SEQ ID NO: 41268 - DNA, 1069 bp, Heterodera glycines
catcgttcgggggggactgccccgaaaacaaaaaaatcgatttttcaagtgtccgttggggtactcaaccaattatggggagcaaaatccaacgcagaattaaagtacaggctatagggaagctattccggaaggattcggtctccccataaatctgggcgcatcggttcggggggactgccccgaaaacaaaaaaatcgattttttcaagtgtccgtttggggtactcaaacaattatggggagcaaaaatccaacgcagaattaaagtacaggctatagggaagctattccggaaggattcggtctccccataaatctgggcgcatcggctcggggggactgccccgaaaacaaaaaaatcgattttttcaagtgtccgtttggggtactcaaacaattatggggagcaaaaatccaacgcagaattaaagtacaggctatagggaagctattcccgaaggattcggtctccccataaatctgggcgcatcggttcggggggactgccccgaaaacaaaaaaatcgattttttcaagtgtccgtttggggtactcaaacaattatggggagcaaaaatccaacgcagaattaaagtacaggctatagggaagctattcccgaaggattcggtctccccataaatctgggcgcatcggttcggggggactgccccgaaaacaaaaataaatcgattttttcaagtgtccgtttggggtactcaaacaattatggggagcaaaaatccaacgcagaattaaagtacaggctatagtgaagctattccggaaggattcggtctccccataaatctgggcgcatcggttcagggggactgccccgaaaacccaaaaaaaaattttttggataaaaattatttaaatgaactgactagataatatttaaaataggttatttctcttcctttcagtatccctgcaaagtttggtgcgcttctgatcagtttctgaaaaaaaagttaagcctaaactttttggcctgtttaaaaaggaattaaaaatttttaaaaattttattcatctccctttttgatagaaaaagcatcaga

SEQ ID NO: 41269 - DNA, 1514 bp, Heterodera glycines
  unsure (1)..(1514): unsure at all n locations
ttcattacttatttatttttgcaaaatnnaattcataagtatttttcagaaaagtgctctgaaccacacaaaactttatntacaggtaattaaggctctctgatgcttttctatcaaaggggagatgaataaatattntaaaattntaaatcctttttaaacaggccaaanagtntaggcttatattntaaaaagtttcatcgaacctagcgcactaaaatcgatataatctctccaaattttgcaggccttctccattgtaaaggactaacttaacctgaaaaaatgccaacgcttgttgtttttaaaatttttcgaaattctgactttttcattaattatttattattttgcaaaattaattcataaatattttttagaacgtgctctgaaacgcaccaaatgttaattaaaagttaaataaggctctctgatgctttcactatcaaaaagggagatgaataaaaaatctaaaaatttttaattgctttttaaatttgcgaaaaattttaggcttaactttttttttataaactgatcagaagcgaaccagattttgcgagggcatcaaaaagacaaggaaaagcactgctatgatgctaactccagtaattctgaatttaaaattttttattaatttttaaagcttcactattttatttttttagcaaaattaattcataaatattttttcacaaactgctctgaaacgcaccaaattttatttacaagttattttaggcactcagatgctttcactatcaaaaagggagatgaataaaaaatctaaaaatttttaattgctttttaaatatgcgaaaaattttaggcttaactttttttttataaactgatcagaagcgaaccagattttgcgagagcatcaaaaagacaaggaaaagcactgctatgatgctaactccagtaattctgaatttaaaattttttattaatttttaaagcttcactattttatttttttagcaaaatcaattcataaatattttttcagaaactgctctgaaacgcaccaaatgttaattaaaagttaaataaggctctctgatgctttttctatcaaaagggagatgaataaaatttttaaaaatttttaattcctttttaaacaggccaaaaagtttaggcttatattttaaaaagtttcatcgaacctagcgcactaaaatcgatataatctctccaaattttgcaggccttctccattgtaaaggactaacttaacctgaaaaaatgccaacgcttgttgtttttaaaatttttcgaaattctgactttttcattacttatttattttttgcaaaattaattcataagtattttttcagaaagtgctctgaaacacacaaaactttatttacaggttaattaaggctctctgatgttttttctatcaaaagggagatgaataaatatgttaaaaatttttaattcctttttaaacaggccacacgggggaggcttatattttaaaaagtttcatcgaacctagcgca

SEQ ID NO: 41270 - DNA, 985 bp, Heterodera glycines
  unsure (1)..(985): unsure at all n locations
aggaaagctcccaaaaagtgccaccaaagcagcagatttgagttggtatgtgaacatataaatatgtgtgtgtgcttcatcacgtaagcgtgatgcaattcgcagcccctaattaactaattaattaattaatgaacattttgacaaaaatgattgccccgcgttcactcattagcagcagcatcatcattatgtatatctaactaactaactggtttcaatttctcttttttttctctgttatcgagcgattcgccgggggcgtggggaaagtgatcgaaatcgcttcccgcccccccgagcgtcgtccatttgggagaaacttttttgcaaaaaaagtccaaaaatggcaaaaaaataattttaaaatatacaccagagatgctttaaatttttaaaattctgttttttattttgtttttgttaaatcgtattatttaaaacgaaatttttgaaattaattaacgctaattaattaattatcgtcgtgagaacagaacacagaggagtcatcatcactctccgaagcattgaatttgaattaatttatgaaacgaaaaacgccgccggggtttgaatttttaaattaattaattaacatcaattaattaaattaggtaattggaagagaacatagcaaaaattcatttttgttgtatttcgaattaagcaaatccaagaaaataacggtaaaattatgaaaagcccccgggcgatgtttgaagttttggtttattatttattattctgcaactgtaagcccaatgtgtccgtccatgatgacctcgccaaccggcagaactcacgtgtgtcaacaaaatatcatcatcatccatttaatttccacgtgggtttaagtgaataaatggnggcgggcgaaggaatgggaaattttatcanaattgaaaaaataataatccgcggtcatcaaattaatattacatatgatgatgatatttgtataacattaaatttgtgtgatttt

SEQ ID NO: 41271 - DNA, 954 bp, Heterodera glycines
  unsure (1)..(954): unsure at all n locations
cgctgctgttgttgaacagtttgttgatgcttttactcttaccaatctcttcaccaatgagcttcatcctccctctctatctctcactccatttgtgtgcctttcctgtaatgtttcttttgtctatttctctgcctttacaaactttctctctctttctcgccctctttctctcccacctagttgttgtgtctgcctgtctgatcaagtcactgatcattcaaggctaaaccaatgaaacagtaatcagtatctgattcttcttttcttgtttatgtcttctccgcccactctcttaaaaacgtgtactccttcgccgttcatgatttctctaacttatgttttctctctccctcttcccttcgttactcatttcgccactttcgatctctccgtttttgtaatcgttgtattttcacaatttttaatgcaaataaatttttaaaaatttactttaatttttgggggttatttaatttggcgactccctttaacttacacagacaaataatttctggttgagaccgttttatccatttaacccatacttttttatcataaattagaaggaatttgccaggcgttttctgatttgaagtttaaatttaaatttaaatgcactgaaaagcaatgaaagtgatcagctaaatcaaccaatcggtggtaatacaattttataagtgatcacgaaaattagttgatcagctagggaagtgctgctgatcagcagcaccgaatccatcctccgcccatgcgccacgacttttgcggatttccatgcgcttaatggngagaggaaagccttccaaaaatagcaccagccgccatatccctccgccggcgaatgatcgatgggatgattatttgtgggcgatcgcggnatggaagtgatcggacggagaggagcagaagcagcagactgatcacataaaaagcaatagcccaaattagcag

SEQ ID NO: 41272 - DNA, 486 bp, Heterodera glycines
tggcctatttcgcgattttttaattacaagccctagcttctattttactaattaacccattaagaattaacaagtttcggtcgaagcatctttttggcaccatttgactccgagccaaaaatagtcaatttttagagaatttagttactcttattaaaacaacctttttgcatctgttttcctaatgttggtgcttctccttagtcttgaccgttctcgacttttgcgctctctctacttcttccaattctcgtctgaatgggctctccgtctttcagcggtatttttttcaattcgcccaaacttctttgttccaaaggtcatcaacatgttgcccggtaaattccccagcgcacttcagccgaggttttttgatctgtgcgaacaattgaccaagcaaattgtgcccactttggagccattcttgcgggaactaattgcagttgatcagaggtgtgcaaaatggaaagtgggggggggggggag

SEQ ID NO: 41273 - DNA, 1183 bp, Heterodera glycines
cctaaaatcctaattgtaagtaatacatttcatttccattcttagaattgtcaccgctttgcccgtcccttcccaacatttgttggcccttttgtttggcacttttcgcgtcatcaccgactcggcacaaacattcggcactcgaatgacgccggacgccatcggcatttcggttgcgccttcgccgttccacacgtgcattcacgatggacaacgggtaaaacttgtgggaaaatgaattaatttcaacccatgagtttctgaaaattcaaataattttcgataaaaataaattttggttaaaaatgcgattgaatccctcattttttggttctttggcatctttaactcatcatcatatttttatttacaaatatctgcccaaatctgtaatctcgttagaatgctttttccaagcaatatattagtcttctaaaagcatgatcattttttagcatggaatttttggcgaatcgtctcatagacaaaaattgagccgaaatgttttcttaatttttttaaattatgctttttctgctacgtatgcttcaattccttctgtaaaaaatcatcctctcttttacgaaagttttccaaaaacaaatttttgtttcggctttaattgattttgtattcaggccaagcttgaggacataatgcgcttcaaattggcctcccaagtgatctccaaaatcatccaatcgttcggtgctgtgcgactgtttccctttgaatgttacgaattctatgcccggatcaccggcaaaacgttgcggagggacgaaaaccattggcacatttccttccatttgccgtcgagtgagttttattttttaaatttaccattccattatgaaatggtacagtgtctaatggtagcccatggtttaagcctcgggattctcttgaaatgacaccattcattattaatttaggttaaatgccaataaatttaaaaaaaaaaaaatcgtggttttccatttttgtccattccattgtgcctccttttttgtttgtttgttttgctgtgtgctttttttacgttttatttgctttgcccattttttggctttttgtttacccccaattaaatccaaatggtccgtcccatgtgctttttaattacgtaattaatatcaaaaatatttttgtttgtttttttttgttgtccgtcggtttgggt

SEQ ID NO: 41274 - DNA, 1077 bp, Heterodera glycines
  unsure (1)..(1077): unsure at all n locations
ttaaaatttatagaattcgtgcacaaaaaaagcaaaatcttagggccaaatgttcgtgacgcacnggcagaaaaattggggcctagggttcgcaagaccnntnaagcagggaaaatacgaggtgcaggccattttggccacgacaacgtacaaaaaggatcggcaattacgacggatcttctatgttcagtggttaggtaaattaatttttaacaattttatacaattgttaataaaatgtattcaggctatagtcaaaaagactatagttgggtcttgagttaaaaatcatcattttcatcttctctctcattttatttgtgtgtttggtaagcctactttcttagaattgtgggccccaaattcaccgtctttaggggaccaatagagtaaaccgcacagtctcgaattgtgtggcctctattgttcttctatttcttttttaattcctactataatatttgtttttaaccttggaaaattattgaaaaaattttttttcaggctgcggagaggctgaaggaattcttaaaaaaagaaaaaatcgtgatggatgcataaaaatttaaaaaaaaatgaaaccaaaaatattaataattaaaacccaaaaaaatctttaaaattaaaaaatcaaaaaaaatttttaaactaaaattcaaaaattttaaatattaaaatccaaaaaaactttaatactaaaaaattccacacacattgttcttcgtataataaaatgttttgccgataagttgtcctattcataattttttggcaaagaaagattggttcttagatcaaatgtgagataaacatttggcaacgggcggcacttaaagcaatgaatggaaattttcattgatcattctcactctaatcatctccaaacattagttgcttttctagaaattcgtccacaatttttattcgtttttaagccatggaatatccatcaaacttttcctggattcaactttccgactgtgcttgtgatttcagtacttgcattacgccatcgtcctacaaaaacccacataatttttgttcccaaatacatgggttgaaatttttcctccctcc

SEQ ID NO: 41275 - DNA, 1387 bp, Heterodera glycines
ccgatgattttacgaaattgttttttggactctcaacgcatttggcccatctctgagctcatgttctcccactcctccctctttttcagatttgtcgtctcttgggcgctttgtacagcgaaatgattttccgccgcggctacgtccacagcgacccgcaccccggcaatgttttggtcagacgaagtgccaacaccgggcgggaggaaattgtgctgttggaccacggcctttactgtgtaaaaagtccgtttggaaatgccaatgtcaaaacgagcgccaattgtcagactcttcccgacgaattgcgcattgattacgcgaaactgtggctggcgctgatgaagccggaccaggacgaaattcggagggtttgcgaacggatgaacatcggacagaactacggactgttcgcctgcattgtcacaatgcgctcttggaagtcagtcactgcgggcattgcgcggacagaaattgacgacagagaggtggggaaacggagacagggttttgaaaagggttcaaattttcaaaaaaataatccaaaattattatttatttttttggggggctctgtctttgcatctccctcaaatttgagtacttttgaagcgatcgcacatcaaagagtacgccaccggtcttatccctcaaatttccgtggtcctcgattccatcccacgccaaatgttgctgattctgaagacaaacgatctgctccgaagcattgcattcaaattaaaaacggaacaccgactggacagtttttcagaggtgaattcggccggaaatgtcttctctttcctcgttaattaatttttgttccgtcagatgaccaaacattgcactcgcgccgtttaccaccactcaatcgccgccacccaatctttgctgagcaaattgcgactttacttggccatgtacgtccttttggtcaaaataaacatcttcgaggtctttctgattgtgaatggactgctcacagcgaggcaaaggcatttgacactttaacaaatgcttttccttttgcatttgacttcccttttgttagcccactttctaatcattgcttgtcaaatacacaaatttcgcaattaagtcatatttctttaggaataaatctctgttacactaacaaatttagtcatcggcgtaaatgcccttttaattcaagtggttgaaatagaagaaacacttttgcaaatgcatttgtcaatatgagtaattattgaaaaaatgtgttgctacaaacagcctgcatttttattcattaaatttgcgttatattaaattgtgtctgtctgtctctctattgctgtcattctttgtttactctcttgctctctcctccaattcgctctcttcctcctcctttgtctctctctct

SEQ ID NO: 41276 - DNA, 945 bp, Heterodera glycines
  unsure (1)..(945): unsure at all n locations
agtagattttatactgtttcatttcctcgtaataatataatttacccttaaacagcgatttaaaatatatattttttattactttttaatgttgatttatttttaaaaagacgttccttatcatttcattatgtacaaagtcgatcaaaataaatattttatgaattttttttataaaaaaaataagtttagaacatttatttgagtctttccgcttttataagatattatttaagattatgaatatatttaaaatttaaatttaactgaaaatttttttaagtattgaattgtagtgttaacaaaataatatattaatttttagcaattaaattttcattttttaacatttttaatagtctttacaagtcttgggttcgttattgcaccaacattccaataaccgggacctaacctcacctgattcttcggtatcgcaaccaccgagactcaattctcctgcattccaatcactgtgactcaaatctccggcattccaatcactgggacctaacctcacctggtccttcggcatcgcaatcatcgggactcaattctgtgacattccaatcactgggactcaacttaccagcattccaatcacttggactcaattctccattattccaattcccgggactcaatctcaccagcattccaatcactgggactcaatccctcacttttcacgcattcttcggtatcgcaatcactgggactcaattctccggcattccaatcactgtgactcaaatctccggcattccaatcactgggacctaacctcacctggtccttcggcatcgcaatcatcgggactcaattctgtgacattccaatcactgngactcaacttaccagcattccaatcacttggactcaattctccatcattccaattctctggactcaatctcaccagctttccaatcattgngactcaat

SEQ ID NO: 41277 - DNA, 890 bp, Heterodera glycines
  unsure (1)..(890): unsure at all n locations
ttcgcgttttattttccgatttggcccatccctgggtgcaaacccaataatgacaaaatatttgcataatttttaaaacttacttaaaaaaattttaaaaaaatttagtaccctctaagattttttcgagaggaaacgctatcgggggcaactcaatttcttttaaaatttctgagatacgattgaagagatttatggaggacaagacaccaattaaaacgctaaacgtaattatgggacaatccaatagaaaaaactctaaaagaaatttaagtaataaaaaatttcattatttaaaaaaaatttttcagaaggaaaaatattggatggggnggggggttggagaaacgtaattttttttaaataaaaattcttggtaaaaaaatttcctaaccctatcccaccctgttgttgttgtagttgctcccagcttctggccgtccatgtcgtaatccatcgtccgcaacccgtacagtgtccaattggaaatggttgttattgcgattcggcgctgttcctcccggtggcggtggtgatggtggcccatccgtctccaattggtagtcattgttgctgccgccggccgtgttcggtggcaccagcgtgtacttgccgagcagacgacgcttggagcggaactgtgtgggcacctcacgtcgatggaacacttcggcgatgaaaattgcctagaaaattgtaaaattaaaaaaaaacacaaatagaaaatttttttataaaaaaagttcatgaaaaaaaccgatttcaagggaacatacccaactgtgagtattcaaatcactttaaaaccatttttatcatgtatagcatagttgattttctattgtaaattttcagcttttttggctccggcgccaaaaatgatcagaaaa

SEQ ID NO: 41278 - DNA, 1074 bp, Heterodera glycines
  unsure (1)..(1074): unsure at all n locations
cgaaaggacgancggcggaggaagcgacatcctccgggaggattggttgtgggccattcccctcaaggagttcggcgagggtcgcgagacggtgcttgtccttcaggacaagggtcagttggcacggcactttcacatgttacaatattagcaattggctccggcgctgtacattttaggaactttaagtggaatcagttccccttaatttactcgtaatgtttctgtttgaattaagacattttggaggatggagcggacgaagtattgatcaacccaaacatgttagagaacgaacggcataaattgaacgtggaacggcgcaaaaagaaggaccactacaacccgtatgaggaggaggtggacgagttcggacaggtgggagaagggggatggggagttggaagtccaatatatacattaattgactaattaatgtgttgtcaggtcaaaaaacagcaaatgctttccaaatacgacgaaggcattgacggggagaaggaacgcgacacattccgacttggtaacacatttaaacaggcatttgtttcgaaatatacaaatatttgacacaccgaaattccttttatttgggcttaaaatggagccaggatttggtttgaaacccaacggaacgcttggcatatttagatgagagtggacagtacgacttggacgcggagaccgccgagctggaaacacggcgtcggctgatgatgctcaacaaaaagtttgagtcgttagaaagcaccaaatacacattggccaacgaatttcacaccgaggcaagccaaacacatcttcataatacgaaggctcattacaaaaggggaaattgccctgaaaaataaaaaattagaaatttgtttcacattttggcataatctaccaacaaatgttccaatttattggataaattcaggaagaaatgatcgcatttcgtcgtccgaagaanaaggggagggaaaagcacgcggaanagaaaggcattgaaagccgacgatttggagacggaaacgacggaagaaacggagggagaaaaaaggatacggtcagtctcatttcaatatgaat

SEQ ID NO: 41279 - DNA, 366 bp, Heterodera glycines
aaaaaaatgatagagtgtttataattattttaaaatgatcaacaaacaattccctatcaaatggcaccacacaaaaaatttaaacaactgcataaaaatatgctaggtggattattttttgaaaaaatttcaaaataattcaccatctgtcgggcggatccgaacccacgacaatgggcaactacatgtaagagaaaaaaaatctattttttttgctggcactgtcatttgatcacttttttctgattttttttggcgtcggggccaaaaaagccgaaaatttacaatagtaaatcgactatgctctacatgatagaaattgttttaaagtgatctgggtgtttacagttcgaaatgttcccttgt

SEQ ID NO: 41280 - DNA, 810 bp, Heterodera glycines
tgaaattaagatttctcttaacagggtaggcgaaaagggctgcaatttgttaaaaatattaatacagtttagttccccgtttttagcatagtcgtttagatgtgatcccagtgcaattaagaaagtaggtattaatgcttgggaaaattttgttgtttaaaacagagcaaatagagcggtgtgcgaggaaatgcttatcgtttaaagtgggtattgaagaaaaatcgacaaaaaatttaatgcgctccaattgcatgggcgcctgtaaattcgaaaccagcacaaaaaataagcctcatggcaaaattccagcgcaattggtcgggctataagccatggaattaccacaaatttcgacgacattcaagactgctttttgttaaaatatgaacacatatttaaccggaaataatgaaaggtgtgtgcttgatcagaagttatcttctctatttgttacactatcgattgcttatagaaaattgcataagattttttacaattaataaaattacaaaaaaaaaattgtttatttaattgaccttttccaaaacataatgaaaataaacaagcctatgattttttaaatgctttgcaatcatagaaaaatgtttgattattattgtatacttaataaagtacatagaaattgaaaaactcaccatagaagagttaatctgttatagaaaaaaattgagaaattattagtgaaattaagatttctcttaacagggtaggcgaaaaggactgcaatttgttaaaaatattaatacagtttagttccccgtttttagcatagtcgtttagatgtga

SEQ ID NO: 41281 - DNA, 1104 bp, Heterodera glycines
cccccccccccccctttttcccggcctttcatttggtgcaaatttcggccccttcttgcccttcgtcctctcccccctcctcgtccatctttgtcactgtgtacccggcacaacacatccatcgacatggctccatccgcgttctctccgtgcggcagcggaggcccttcagaagagagagaatcccctcgcagggcgcctcttcgctgaatgaacgggcacagagtgaggcgcagggccgacgggcacagacttcggtttgcgagagttcagttctaaaacaaagaggggggtaatggagataaagcagagagagaaaggcatggaaagataaagcaaaacagagaaagagacaaaggggagagaggaaaagcaaagagaaaaagccgaagggataatcaaacagagagagagagaaagcaaaaaagccaaagggataatgccatggataaaaagagaagaagcgagtgccacggttagcataattagcattgggaagtgaagccaatcgaaaacgtaaaggaacacaaaaccaagctgaagagaacaaagtgatcgacaaaaaaaacagaaccttcgaccgcaaaacaacagcaacggataagcaaaaaaaaagagaacacactgacaggcacaccgcgtccccgcggggcgcgcactcgcgcaccctccgacgcacaccgcacgcaccgcaagaggcactgcactcactccactcactccaagcgcccagcggcgcgtcagttgtcgcgactgcccgggcacgcgcttgaaagccctttccgccgcggtaaaaggagcggaacagcacctgcggggaggggggggggaatccattgccatcttcgctggagggcattctgtgccgttgcactgcccactcaccagcatgtcacgcgtatccgacacaatgggcgattcgggagtgccgaagcagcaatatcttaggggaggagaagaattattggaaaatgagggcactttctgcacagtcacctcattcccgtgttggcaaagtcggtggaattgcgaatctgagaagggaatgaaatggcatcactcggctgatgaatcgttcgttcgttcgttggccaattccatccc

SEQ ID NO: 41282 - DNA, 1039 bp, Heterodera glycines
  unsure (1)..(1039): unsure at all n locations
caaagatgaattgatgatttatgtttatggctgatcatgagcanaaaacaccccacaaaaaaagacagtgatcaatttaattttgaattaacgaaaatatactttttttggcgttttgaatttctaacaccggacggagtgtgccgatcccacaaattttattcttcgacgggatcccgttccgcttggttttgtgttctaccccatggctggatcccaagcagaacaaaccctactttattgttttattcggtgtttttttttattttaatgttttcgttaatagaagctttaaaaattttcatttgacattcaaaaacataattttgtcaaataaaaaaaacaggtattcaaagtcattatggcggatgtttggcctaagacggttccaaaagagcagcaccctttttacatcctccaccccgagcctattcgaatctctccgctgctccgatttgctcgttggtcggccctcggcctaggcattgtgtgagtaaaaaacaatggagagaaaggtgctgaatgggctccaaaatccctttaggtatggtttcgtccgtcttcgtatggtcagcaaataccacgcggacatccgcgaatgggaagtgcaaaagaccatccacaagaaggatgcggataagaaggagtcactgagagtgctgcgtgagcaaaacgaatggattatgaaggtttgaagggcaaatgtccacaagaatggcaagatactccgtaaataatatttatgatatcattcggttttcggggtcatgagcatagatttggcattcaccctttacaacccacggacccgaacatagactcggcattttgtttgtataccatacgggtattcttgacgttttaggttcaacagaacctacagctttactcattttattttgagccctagcgacgacctttttttgttgctcttcggcaccttattttttcaccaattttctaaaactttttgactggtagggtgaggccaccagaatggaattttgggcccggcgataccgatattgagatttttgat

SEQ ID NO: 41283 - DNA, 1582 bp, Heterodera glycines
tataaattaattagctgtgctagaatatatttctatcatttgtcagatgcgtgccgtcaccgtcggtgccatgtgctgatcggcgtattactctgctgcctgatcatctgcttagtgaccatggtcgcctcgctgacattcagttgctggtggacacttggtaagacgaactattcataaagtttatatctgcaaaattcaaaaaatcagaggtgtgcgaattcaaatttttaataccctaggaattttttagccctttttcaaattttgttcaaaaatgacaattttcacgattttttagtcaatttttttacaaactattgagttttggagtctgtatgatgcccatagacgctgttgtgagtagcaacggcgccgaactggtcgattcccgcttaaaaagctgcctaaaaatgaaataaaggaactaaaattttgagattaactttaaaaaaatgtaaagcattttatggcagtaaaatttactaatgaaatttccattttcaatgcttttcttatgaaaggttccttcttcaaaattggccccaccggcgtcgttcagaagcagcacagcttcttctcctccaggcaaaaattgttacgccacaaaagcagcgtaaatggcacaaatgcaaaatgccaactaaaaaaattgtcttcggcaccaatttgggtgcatccgccgccgcccgcttctcagccgtccacgccggcacagcaaaatcaacaaaatggacggccgccatcaacagcaaaaactcaacgggtgcttctaaacaacgaattggaggccgtgacggccattgtttgactgataattgataatgattgcatctttaggcgagcaattagcggtgattaatgaatcacgagtcaaatttaaacaaaaaataggtgccaaggaaaagaaagacaaattaattaaatctatttttattatttttttatttcattttcataagaaaaattattaattttctactgaagcaaccagaaaccattgatatttaccgttaatcatattattttgcttttccaccttctttttacatgaatttatttaaattcgctctatcattaaaaaaatttttgtgagtttataaaatcgctatttaaacaagacagtttaacaagaatatattaattgttttcaagattttaaattaatgcattgtttttgataaaattataattttgaaaattgaaaatctctcgaaataaaaattatgaaaaatacaattgaatggtgtactataggttgggaaaatgattgaaaaaggcagccaaaaaacgtgtgtttgctctttgattctaaaaaacccaaagattagttttagcgatttggtgcctttttggcgtttttttcgaaaaattccattaaaaattcaataaaatcgggaaaatgcacccataggaaatgatataaaaaatttcagaaaatacacccccaagaaatgatataaaaaatttcagaaaatagaagacccctaagttttgtgccttttcatgcctttttttaattttttggtgcctattttaatgcctttttcacgctttttggtgccttttttgcgagctctag

SEQ ID NO: 41284 - DNA, 962 bp, Heterodera glycines
  unsure (1)..(962): unsure at all n locations
cagcttgctgcctgaggtcgccctatccttcctcatttccaatttggtcttcggatgtgccgagcgttacagcttatccgccgttcttggcaagccccgaaatgcataccgatgatgtaaaatattggcaccgccgttgtcctacccctcagatcccttctgccgttgcgataagaccaaagcaaacattgactccaaccgggcaaagttacaccatcgcctcaccctttgcccctttccccaacaaaaagtgccgccgctcgagaaatcctccccccccccctcgttttttggcgttttttctcgccgcaaatccgttcacccaacaacattatctgcctttttgatctttttatgtaaaatgatgtgaggaaaaaaatatgtttagcgtatttcatatcatagcaaatggagcacatcggaggccattttaaacacttcgacgcgattcgaaatgtactcgaggataaacagagttccattttgctggtctacaccaaaatgagtccaaatccaaagtgaggcgctgcccacggccccgtcacaatggtggagacgagcaatcggagcattcgaatcctaaagaaaagaaaggcatttggcattggccagagaaatgccctgctgactgatcagtgatcacaatcacaccttatcgaccaaataaagaattctctgggctctgttaagaattaaaagcctcccggattgactgacaaaaagtgccgaataattgacaccctccggtgccgtaaaacattgcaacacattaccctgaaacataaaaagtaatttggcagtgaatcatcaaattgaattttaccttttttgacattttaacgactgaccgcccacatgagacaagcaaagcgccgaagccatcgctggaaatgaaattgcaattgngctggtacgtgtcgttggaactgctgctggtgccgttgttttcctctgtcactggt

SEQ ID NO: 41285 - DNA, 879 bp, Heterodera glycines
ttttaaagtgtttaaattatcattaatctatgcattttgatgaaaatttttggaatttttcgaattttttcaaaaaaattttctcttgggaaaattcccgttggttccggcttttctcgcggtcccggtaccagactaaaatcgaggtcccggtcccgacttttctggtcccggtaagtcccggtcccgaccagctctaatagaaatcacgagaatttttttgtaatttatttcccgagaacttgtgatttcaaattttattacttttttgcatccgcctcactttcagcgtgccgtgctggccgatattcattacaaagtgccacatgaaacgggcggtaccgctggcggcacatcggacgaggacgcggcaccgatgggacagcttcggctgagcgcactgtcacgcaaagggacggcggaggaaaagcgggaggaaaaggtggccaaactgtcgcccgaactgcgcgagcgcgtcaacaagaagaagcgacagttggagctggtcaggcggtccaaactttcggatcaataataatgacattacaatttgggctcagttttgttcccacatagggtgccagttaccgagctcttttttgccaattaatgacgggcggcttcggacccgtcttagtttagccgggtttactgattcgctcaaatttagggaaatttctttcaacgttacatttgttttgaaacaggagaaaagtgatgttaaatatgcgttcatgctatgcatatattaaaacataaaaaattgttggcgtaatttgaatagctgaattttaaatgaaataaaatttgtctcgctaaaattgtttcaatttaaaaaagaaattgatcgagttatttttatcctggtcatgtgattgc

SEQ ID NO: 41286 - DNA, 1051 bp, Heterodera glycines
  unsure (1)..(1051): unsure at all n locations
ggggagtaatgttttgatcgcnatcatctcacccctttctgacatgccggtgggcccatgatggaggagagcactcgggcgagggcaattaactcactaattgggtggggggagtgatccacaaagtgagtgaggcgctaattactggcaaaggtaacttttgcgatcacctggtgaacagcgcaacatttgtggccgattcgatcactttgtctcctcgcgagtcaatggataatgccggaaggctttttgcccttaaaatgaaaatgggttaagggagaagaagcaactcactggactacgaggttggccgttccgttggccacttgctgaatggcctggttcatctcttcgtaaaagcggtgctcttcctccgcttcttccgtgtcgtttagcgcgttcaaaagagcgaatgcgttttcgccgatgagactggccgaggaaagaaaggacgaccgtttctcacatttttcgggatttaattttgctgaaagtgtttgaagtgaatttggcattgacttagaaaaatgaactcatcaagtcgataaaagccgtgcaaattgagtgaacgagtgggcccatttccattgcgtccgttcggagggcgcaaaactcgcggaaacactgcgccaattcgcacaaattgtccgctgcttccaccacagcaatttgagccgcgccaaattggggatgcaattggaggtccgaagtccattcgacgaccggcaaaagggaaggttcggctaattaactaattaatggccattcggaggggcgggtccaaaaatccctctgctgatcgcttctgttccgcccacctgtgctgtgtaggccaagaacagcaccgccctgtgtcggattgtgtcctcgcccaactgaacggccatcagtcgttgctcctccgtcagtgccaaattggcaatttgctgctgccctttggccaagtggccgctgctttcgctcactcttcgcgcggactgtccaatggcggcattcaatccttgcnaatttcgattttgcgaataaaactgttcgaaggagcgatgagctt

SEQ ID NO: 41287 - DNA, 971 bp, Heterodera glycines
  unsure (1)..(971): unsure at all n locations
ataatttacatttatttttctattgaaatacanttttgccaaaaaatcctcatgaaactcaaaattttcgtcattaggagtatttttccatttcattaaacggacccatagggcgggttagtcgcataaattattttttacttttttaattctgacctttttttgggcaaactaagctaaaaagcggcattttcaacttttttgctttttgataccattttactagtttttaagaatatattccaaaaaaatacgcgatatgaatttctaaaaagatttttttggaaattttccggtttttagaagttaataaggccaatttatctggtggtggccgttcgaaaagaggttttttaggaaaaaaaatgtgaacaaatcatgtgtctgaagaatccaacaggaaacaatatggttattctttgaagtcctattcattagtatttgatgcataacataaatttaaaaaataatttttaaataaaaaaaataatttctattattattattattattaaaaatagctcctattctctatctttttgaaatttggctgccccaattgtttttttttcacttataaattttaactcttaacaaatggacaaaagaatggcgacaggatttaactttataataaatttttttatttttataataaatttatttttttttgattctctgttattttgttttgaattatgtcttaattaatatattatagacattatgtggaaacaaatttgcaattgaaaaatcagtgcaacagtgccatttattattattcaaatatttagacggaaattgtaattggaaaattatttaacaaattgattatattgcttttcgtatttttatagcaatattattataaaattttcattataaaacatttaatattatttcncatttttatttttaaataatttattataaatatttcattaaagactntagaaaaacagctaacatga

SEQ ID NO: 41288 - DNA, 939 bp, Heterodera glycines
  unsure (1)..(939): unsure at all n locations
cccggttcgaattancaatttattagagattaaaatttcattgataaaaataacaaatattaattaaaattgaaaatgactaaataacatattaaattatttaatgaaaaatttataattttaaattgaataataaaaacaaaaagaaattttatattatgggtattttttacaaaaaatttaacatttttgaaaagttaaatttttgcaaatattctcaaaaaattcgaattttctaaccatgcttgaacatgtttttgttcgtacaataggtaatgtttcttgttttagttgagttcgggatttaatcgaaatctaaatgattaaattaaattaatggtattaaattttagtctatattaaaattataggtttaaatattattttatcatcaatttctaataggcacaaaatcgaaaatgccaagctcggacggcgtttccaattgaatgccacttgccaaacgttggataaacaaatgaaagatgtgccaatgaatcaaattgacttactcggcaatgagtattccgacggggaagtagacgggccgaaatttttgatagaatttgtcccataggaacgatcaaaaaaaggtacaccgtctaaggcttccaaggccatcaaggcaattttatacaatatgaacaagaaacaatcaaaaaacagttcttataacaatgtcaagtcaatgccgaattaaacctttagactgacaaaaaaaaatcatggaaaattatccattgtatattatacacatatatatgtgtatatatatatatatatatttttttttttggctattattactgagagtcttgttcatatacatataataattatgtttttaattgattatacaaatgtaaccaaaacaaatttattcaaaacgaaatgaccactcgccgnatattattattntttgataattaactatccatc

SEQ ID NO: 41289 - DNA, 1360 bp, Heterodera glycines
gtatatatattattataagtgttggttgaatttgcttacatatttccattttattgcggcatggtcctctagcttccaagatttggcgcttcataggtgtaaaaatttcacttaaataatagtattttatattatttatataattcaattattttttaagacaaaattaagttaaattaaatttataattatactaaataattttattgaagaatttatttaaactcaattcaatatttataaataagagaactgacattagctaaaattgagggaaaatgatttcgacgagataataagcattggtttattttcaagctttaatcccaggttttgttttaaaaaatttgtattacatcgttggttttatttagatttttcataaagcattaagaatattttattaaatttagaaatttgtttttaaaattatttttgcaattaatggttagtagttagagcacaccatttgtccggattacggtagccccccccccccccacacctatgggaggggtgcatggccaactgagcgccagccatttgagcgccaaaatttttcagtactgaagcaaaaccttttgcgcgacttttcttgcaaacccaaacctattgtaagggggtgcgcggcttttttcttactgcgcgacttttttgctgcgcgactttatttaaattattttaattaattttaaattcaatttaaacatctaaaggtcaaaatatcttaacgtgttgaatttaaatgcattaaaatttatcaaaaattccccgcactgagcggatccgaaccacggagggggtagccagactgacgtactaaccattcggccacattggcaatgggtgataaacattaatttgctctcataaagggaaaaattgacgtcaccagcggggggaggggggcgagagcgtgtggcaagaagggcgggggtgttgaaaaggtgccaaataaacaaatcaattaaataatttccaatttacgtttttaaagacaaaatgaagcgagggactatataataaaaataatattattaaaataattataaaaatgtttaaataactaataattatttcaaaaaaaaatattttaagtgaaaattaacaataattttaactttatttatttctcattaatttttagagtttaattattttaaaattacacatttaaaattaattgttttattgtttagggaattcgtgaagtcaggcctgtgggcccggggcggtcgggttgtctctatgcctatgcaaaattgttatcgaccatttgtgggcaagggaattgttggtccaaacttcaaagttttgaattttggtcacactttgtaacaattttaattctgataaagca

SEQ ID NO: 41290 - DNA, 642 bp, Heterodera glycines
aaaatgtctccctaattattgaataaaataattaattattcgcattttatttatgtcataaaaaaattatttgtccaaattaatgcgacgatcaattctttttccatctttcatttcttggttaagctccgttttgttccgacctcagcagttattgcagcggcagcagcacatgaaaatctgagaaaaatttaattgaaatttaatttaaaaataaaaatctgaataccaaatacacatatttatatgaggatatatcctcattttttggcaaaaatatcaaaactggcaattttgcaaaaaatctgttaaaatcaaatcaaactgaataaaaaattttcccgatactgcttgtcaagccccttggagcaccaacaaattttgaaaaaatgattcaaaaaaaatgcacttgaattcgaagaaatttattctgaacacaaatttatgtgcatacctattatcaatataattatcgtaattagcctctaatagagtccacaggggctttaatttttgaacccttctgagggggaagggtgctttaatagagaaaatatgatacggtttttacaattgcccgacagcgacagcgcgatgaacaacggcatgggcaaaagcaacaactgctggcccacccgcaca

SEQ ID NO: 41291 - DNA, 1107 bp, Heterodera glycines
  unsure (1)..(1107): unsure at all n locations
ggggtttgacaagtttattgggggaaaaaagactacaaaataatacccctgggagaagggagtgggaaacatgatttcaaaattttcaattttttctagtctaatctactcaaaacggttcagaattcaataaaaataacattcacggtgcgaaaaatggggtttgaaaagtttattggggaaaaaaagactttacaaaataatacccctgggagaagggagtgggaaacatgatttcaaaattttcaattttttctagtctaatctactcaaaacggttcagaattcaataaaaataacattcacggtgcgaaaaatggggtttgacaagtttattggggaaaaaaagactttacaaaataatacccctgggagaagggagtgggaaacatgatttcaaaattttcaattttttctagtctaatctactcaaaacggttcagaattcaataaaaataacattcacggtgcgaaaaatggggtatgaaaagtttattggggaaaaaaagactttacaaaataatacccctgggagaagggagtgggaaacatgatttcaaaattttcaattttttctagtctaatctactcaaaacggttcagaattcaataaaaataacattcacggtgcgaaaaatggggtttgaaaagtttattggggaaaaaaagactttacaaaataatacccttgggagaagggagtgggaaacatgatttcaaaattttcaattttttctagtctaatctactcaaaacggttcagaattcaataaaaataacattcacggtgcgaaaaatggggtttgaaaagtttattttgaaaaaaagacttacaaaataatacccctgggagaagggagtgggaaacatgatttcaaaattttcaattttttctagtctaatctactcaaaacggttcagaattcaataaaaataacattcacggtgcgaaaaatgaggtttgacaagtttattgtggaaaaaaagactacaaaataatacccctgcgagaagggagtgggaaacatgatttcaaaatttttcattattctagtctatctactcacnaacggtcagaattcataaaataacattcacgtgcgaaaa

SEQ ID NO: 41292 - DNA, 851 bp, Heterodera glycines
cccccgcccagtgtgctcatggggctgttcaactgctttgttccattcgaagtttggtggttccgcgaatggtgagctgttgagggagtgctcggctgagagaaaaaattcggcggccgttcaaagggatttactgaaaagtgagtgacttaaaaatgccactaattgttcacttacccccaaaagacgggcccaaattcatataatttggcgagttccgtacgactaaagccgcggcggtggcgaagtgctgtgcggccattgccgtggcaactttttgaaatgcgggaccgtacacgggggagagagaagcggcggcaaggatctggctgaaaaggaagttgctgccaggcgaaggccacggaagtgggccggacaacggattggccatcggattgaacgattggcctgaaattgacgacaattcgatcgtttttcccgcataattccctcgccctttctttgactcgccaatgttcgattgcatttcgatatccgcttccatggccaattcctgcttatccgcgtccaaatccgccgacgacccggccatatcggttgggtcgtcttcggcgttgttcgagcggaacactttcacttcgtccgccgtctcttcgtcgacgacggaaggccccgcggcgcctccacttgaagaagacatttggtggaaataaaatgaaatggcttaaattcaatgaacaataaaacatatgtaaatgttatggacattttgaaagaaaaaaacgaaattttgaattaaaaaaataaaaagaaaatcaattgttagagaccgaacttgtaaacataaaaataggagaacggcggaacagataggcaccgctaaaaatttt

SEQ ID NO: 41293 - DNA, 1218 bp, Heterodera glycines
  unsure (1)..(1218): unsure at all n locations
caattaattataatgagtttatcaattatattatatntaaaaaataaaggcatggaataaagattaatttaatattggcaagaaatttataaaattctgtagaattgtcatgacaaaattagtttaatctctgaaaagtaaagaaaaggccaattttgaatcaaaaggtcatattttatgaaaatgattcaatggattaatagtaatatttttaaaattgtattaaaattaaaagaaattatagctttcattattcggctgtgccgaaagcgccttaaacattaatttgtgtggattcaaaagaaatgaatcattttcaaaaattattgagtacttttaaaatttactaattaaaattggcaagaaatatatttaaaaatatatagaatattttcaaaataatttaactatcaaaacatgatttaaattagaataatttaatttataaagatatttgtcaaatcaattaattaattagcaaagattttataattatcccaaaaaaattattaaagtgaaaatgagcaaatgttaattaaagtttttagaaaaaataattaagcaaagacgaaagtataaaagaaattatacctgcaaaatgagtaaaagtttaaataaaaaatataatttcatttaaactattgaaaaaatactcaaacctaaaaaatatatatatatatacagataatattttaatttaattcaatgtaataaaattcggcagttttttagacaattacgaaaaattaattattatttcaataaaaataaaaaataattacagtttctgtttattcattttgtaaattttttttcatttcatctaatcatcgaatttagaaatattttttttcctatgaatataatagcatttttaagtttcagttaaaatgcttgtttattattaatatttaaaacattttcaaataaaataaattcttttcatcaataataaatttttatctcatataatttatcattgtcacttttttacatttttttcaattatttattattctttattgttacactttcatttttcttttccgaatttcggtccgtatgataattaaaaaataatgtttatgtaatacagataaattaattaacagaatatgctaattttaataaaatttgaataatattttacaaaaataatttatttatcattttctttgtttttctgttttaattttaaatttattaaataaatttact

SEQ ID NO: 41294 - DNA, 991 bp, Heterodera glycines
cacacaccttcccataaaatatcaacggtgaagtcacgatttatcccaaattctctttcgcaaaagtgatggaggtctgtctgttcactggtccacttatattgaaaattttgaggtgtaggaacaaaaccgaaaagtatcttacatttattcaaatgaaataataaaataatatttttgaaaaaattttatgtgatagagaaagattcgataaatatttgtaaaatttttaaagaatgttatttccttaaattttttacttgtcaaaattttatttttttatgttcttctaaataaataataaattaccgattggggtccaccacgtccaaaacccgctcgaacttcggctgctcctcaaaataaggaagacgccccaacgcccaaaggatgtcctaacaaaattaaatttttgaaaaaaatatataaattgaatttttactttaaattgtttgtgctggagctgcgcatctttgtcattgtcaaagaaacggaaccaactgagatattcccgcagtttttcatcatccagcaaaacctggaaatgaagaaaattgtttttttttattaggtgggaaagaatcagagaagcaagagagatgtctgtgatcacacagacacgtacttaaaaaaatattccaaggcctacaaatttgataaaaatctgctaaaaatttacaaattttgaaattttttggataaatcaattaacaaaatcgcatcgcatttaaaagttacaaaaatattccctgcggttcctttgtcccgaaccaactaaattataccgaactcacccgctctgttttcatcggttggccgcccacggtgcccttggaaagtgtgtgcgcaaccataaaaatggtcagaatcgtgtagacaattgagaaaaggcaatgcattttattggaaattgactgtaaaaaaaagaaaataaaaaaaatattagtcaaaataaattagtaaaatttgctcaaataccaaaagtcaaaat

SEQ ID NO: 41295 - DNA, 952 bp, Heterodera glycines
tttctttttttcataacattagggcagattggtcagacattttgttgaataatttcttaattttcgagaagggaattaaacattgagtcaacgaacaaaaaataaaaaacaattcggtcaaaagatagtcattccgtacagattaaaatacatttaaacgagaattttgaaagttttgaattttcaattttttcgacttctgtcagggactctgaaaaaaccaaagtgaatgtccgagtcgtgatcagtagggatggtaattatatggaaatccatatttttttcctggaatgtgggaggcctgaaacgcacgaaaaacatgtttttagcttggtttgaagcttctaggaaggatttctatatccatattttccatatttttccatatttcgcgatttatgtccatatttccatattttggcatttttcaaaaaaatctctattagaacggccccagcagctaaattagtctttttgagcccaaaacccgaaaaatttttcaaaaaaatcattttttcgccaaaatttctcgagaatattgaataaatttaaattttcttaaaaattaataaatttatgtcaaaaataagcaaaaaagcgaaaatttcgcttttgttgttgattttgcgctaaaaaaattaataaattttagcttttatgttttttttcatttaaaatgattgcacgtaattgccgaaaaaattcgagaccaatttccgaatggttgaccgactaattgcaaaacgaaagccgtctttgtcaaagcgccttaccgagtcaaaaaatttggaaatggatttcatatgcaatttcaaccaacaaatttgaagaaattttgcactcaattttgaaaaatttatgtccatattttgacatttttgccatttattttcatattttgagaattttgccattttatgtccatatttttgcgattttagtccatatttta

SEQ ID NO: 41296 - DNA, 1115 bp, Heterodera glycines
gatttaaattatttattctgtaccgtacattcgctgaaatattggctgtatattctttaatttagatattcctaatgtatattagcaaaaaatctttaataatggaatttatgatgttttcttttatttagtgattaatagtttatttctcttttcttgagcctatttttagtatttattgcttttaaataatatataatatttaaattagtatcatattcagttatcgtcatactctaagtaaaaatatccattttattcgtttattttaatttcataattttatgttgttaataatacatagttttaattaaaggttaaaaataattaatataaaaaatatatttttgcaaaattttaaatttcgttttttgtttatggattaggttctttctcaaattaaaatttaattcaattatcgccgccataactttgcatccaaattttcaatcatgcacatataactgttataatttaacaaaattcgcaaaggagagctaaattttattttatctcttactataagttgaacttcatttcgaaattgttttctattatatttaaatttctatacattgactctaatatattattttgaaataattttttttttaaataatattgtttttatggattcaattttatttttcaagtaatgtgcatattctaatcttccttagcagccacattcgtacttttaaatttgttaattttcaattaatttataataaataaaactattagtatcatttttataacttaatcacaaatgtttattgtgcgaaacccttcatattgcataagggcatctttttgtatacacattttttttgtattacatttctgtttggctttaatgagtcttaaaaatgaagcatcaatttaatttttccttactggtccaatattaaatttcgtggtttttcgaaaattaataatttcatatattttttaagcttttttttataaaattaattaataattaaataataaaatagtgaagagcaacgccctgcggaaactaaacccgtcttgtttctattgatttttcacccaatgaaattgcatttttttagtacaataaataaaatttatcattttgatgcaatttaaag

SEQ ID NO: 41297 - DNA, 988 bp, Heterodera glycines
  unsure (1)..(988): unsure at all n locations
tagggctgggacttntagtgacgaaaaatctcgaaataattaactaaaatagtgagtaaaaatgccaaaatagtggcaaaaagtccaaaataatgacgaatagtgacataattttcagccaaaaattaagcaaaaataatttttattcactgattgcattgcaaatgagtagggctgggatttttaagggcaaaaaaacaaaataggtacataaaaaaataatttttaaaattaaaattcttgccacgaaaatacctttttgagaaaatttttttcatttcttaggagtgctttttgaaaaaatttttaggtcgattcttaggggtgtattttttggttttattgcatttttgttaaggaatttcccaaaaaatgtcgaaatagtgaaaaaatagtgacaaaactccaaaatagtgatttttaactattttagtgacgaagtagccaaaatagtgatttctagtgaccgatagtgacatcagaatcgaaaaatttaaacgtagaaatgcgttttttgagctcctttcttcaaatcaattgagcaaaaaaaatagttaaaacctaaaattcccagccctagtaattagcttaataaaaggatgaaaacttcactaatggagcatatcggcatcaacgaattaaaaatggaaacatcaacacatatttccacccaaaaacacttcgtaattcctaatctaatctgatgatcagaatgggtttttaaaaaagaaaaatttaaaatatttatttttcatttatttagaatatttaaaatataaaaattcttttaaaaatttaattctttttttttattatgataatgagcaaataaaattagcaccaacatgtccagttttccttgngatgcttaatattatgaaggcattggtaaaaacagaanaaattattttggatagggcaagaaattcaaattagaaaatttttaaggaatgannaaaataactaattaatatttnattatattttt

SEQ ID NO: 41298 - DNA, 603 bp, Heterodera glycines
cctcaggttccaaaataatttgaatttttgtctcagtggtatatgtgctagtcaccaaaaggggggttccaggttcgaatccgatgcatgttaacggacgtttttggtgattttaagcaaaagaagacttgtaaaatgacaaataaatattctgaaaaataaacaaaaatgataaaacattttgtttcttcacttttttcaaatcatcctttaatccaaatttgttaaattacatcaatttggcattcgtcatcaatttcttccgccacttcttcatccgtgtcatcctcgcccttcctttcttcataattctaaagatgagaattcagaaaagggaaaccttttgaaaaaacaaacccgcttcaattcgtcaatccttccggtgtccagcagccaattgttgacgaaatggtgctccaattgttgcaaaatttgttccgcgtcaggcatacatttccaccattgttcgagtcttcgccacaccgaatgaagcgcttcatcaccttgaaaatattaaaaatttgtgctaattaagcaatttgtttttcaccctgctcatccaaaaggccaatgaattgatgttgtcgtgcaaatggcacaaag

SEQ ID NO: 41299 - DNA, 973 bp, Heterodera glycines
tgcaaatcgatcgtctgacttgggtataggggcgaaagactaatcgaaccatctagtagctggttccctccgaagtttcccccaggatagctggagctcgttaagcagttatactcggtaaagcgaatgattagaggacttggggacgaaatgtccttaacctattctcaaactctaaatgggtatgaagccagggttgcttgactctgaacccaggcgttgaatgtttgagctccaagtgggccatttttggtaagcagaactggcgatgtgggatgaaccaaacgtggagttaaggtgccaaagtgcccgctcattagaccccataaaaggtgttggttgatatagacagcaggacggtggccatggaagtcggaatccgctaaggagtgtgtaacaactcacctgccgaatcaactagccctgaaaatggatggcgctggagcgggccacctatactccaccgtcattggcttgtacacgtgcttgtcgcgtagtctggccatgacgtgtaggagggtcgtggtggttgcgttgaaggctttgggcgtgggcccggccggagcttccaccagtgcagatcttggtggtagtagcaaatattcaagtgagatccttgaagactgaagtggagaagggttccacgtgaacagcagttgaatgtgggtcagccgatcctaaggcaccggctaacgccgtaacacactacggatgacgacttttctgtgcttgcgcagttggtccatccggttgccgaaagggaagtgggttaacattcccacgccaggctagggaaatgacggttcgcaagagctgttttgcgcggtaacgcaaatgaactcgcagacgtcgtgtggagtccgagccagagttctcttttctggtttagggtgtgcgtgcctggaagtggctcagcctgagatagggatgttgcgcccgtaaagcaccgcggttcctgtggtgtctcgtgcgc

SEQ ID NO: 41300 - DNA, 1027 bp, Heterodera glycines
ttaagtaggaattattatttcaatatattaacaaaaatacaactattagtttcattattaagcttattacatcaatatattagaaaattaattatttaattgttttaattttattaaatttatcgttttttatttactgtagattatttattttacttaaacaaatcacaccttaatttcggctagatcaacttcggaacgtgtgaccagcagtcgaatcagatcgaaatcatttatgggaaatgctaaaaatgatttgaatttgtttacaataattttaatttttcatcttaaagttaattgagatcgtacacgctaataccgcaattaataaataattaattaccttccacggagtggtgcaataaatcagcaaagtacatagggcggtttcgaaggtatttgatgagcgccaaataacttaatgttaaaattaatgggccaaaaattgacaaaatgccacaaataaaaacctcgagaaaatggatttaaattaatggattaaaattttgttttccttagtgtgtcttgagcagttaatgaggatgaacgagttcatcaatttgctatactaattaaggctaattgttcacatctccagcccatctcaatttgtcatactaattaaggctaattaatcccccccccgtccctgcttctgccattaccccgctttgttggcatcgccgaattctttcttgatgcctttttcgatgtcaaattgagcgatttgtttataaaaatcgaaggtgagccgaagctaaaagtgcgaaaaatttacaagaattaccacaaattaatttaattgccgtccagaaatatttaccgataaaattttgtactacaaaatttgttttcttaagctttaaatatctattttattatttatcttttggttttttattaataataatttggaattcgtccgtaaattaaaaaatatttttccaacttgtttgaaatttcgttcggcaaacactttgttgaattcgtgatcattttcactcggattgaagtcggtgattgt

SEQ ID NO: 41301 - DNA, 964 bp, Heterodera glycines
  unsure (1)..(964): unsure at all n locations
ctgttttgtagcacttttaaatgttgtatatttgctcttcatggggcnaaatatcatatcaagcagagaccggcacgatcgagaaccgancgannngggcggagnngacgaaacacacngcncaagnggcnaaaacgagcgaccaaaacaaacacaccgggagacggagaaaacgagcccgggagacgaccccgagagagacacgnaaaccaacngaagaagaaacancccccgcncaatcgcccgcattagcgccaaaatacaataaaagtgagtgaattttaaaattttatttacttttatattttaagcacaaaataaatactccaatgaggagaaattaaggaaagtgaacgaatacttcgaaatcaaagaaaaaaatccgaaaattagtgacgaaaaaattgctaaaaaatttggaattccgtgtcgaacactgatcagatggataaagataaatttttaggatgggtgacaatataattgtcctctaatgctgctttttacatgtccagacgatttttaccgcattaaattacttgaaatacataacttttgcataaataaacaatggaaggttttaataatgtttcgttttgagtttttgcttgaaatttctttttttaaatttcaaatttccttttttgtcttaagtttttgaaataaaaacgaagtttttatgtaatttttcaagctaatagaaaaatccaagaacaagcatatcaaatcatgatcttattgctctattgcagttagcaacattaaggcttcaataaatttttgtacaagcatcaaattaagcatcattgtgttaatgtgttaattgatagcgctaactgttatctattagtcggctaaggttgaaataaaggccaatttcatgtacttatggccaaaaaatgtaattttctgaaattaattgaaatgttctaaattttggcataaaggagataacgcttaaaat

SEQ ID NO: 41302 - DNA, 1333 bp, Heterodera glycines
aaaattttcgagctaggccccctagaaattttcgaaaattttttttgggttgaaaatgggggtcaaaaatatttttctggggtattttgatgtgctgagcacgaatctgatgttaattttaagtttaggaaattttggaattttttaaaaattctttattttttggcaattttttggccctcgggattttggcctaatatttgaaaattcataactcagttcagatcaggtctattttggtgaattaaatctttataaatagcaaaaaatcgggagaattttatgagatttatttgaaatttataccataaaaacaaaaaaagttattccagaaattctggaaattttcgatttttcagaaaaaaattcagaactcggttctgtaaaggtgtttttgaaattttaaatactgaaaaaatccgcaattttttgctctattatataaattttattttacatttttatccctttttaaaaaaaagttataaaaataaaagtgattttgggattcgggaccaaaggggggtgaccaggatttttgagtggaaaaatttttccacccaaaatcttccaaaaacatgtcattaggggttatttgggccgctgatcacgaatacgtgatcagattttacttttgacatagtcaagacctcagaatccctgtgtgattggggattctgaggcatcattttttgggggggggcaggttcggatccggacggtgtaaattattttcgttatatttatggttatttttaatgtttttaattcatttaaaagagtgtttgttttataataaaaaataaattttttaatttaaattaaattattttttttatgaaaaattttattaaaattaattatttttttaattaaataatttcatatatttttttatttgagtttttcagaaattaatttcatttcaatctaaataaatttcaattattataaacttcaaagttttttttaataataaaaagaggcatttattttacaatttttaaaaattattaatgcatttttgtacctcttctgccatttgttgtacctctctcttttaatcacagttgtacctcttctgatcattgttgtacctcttttaatcaatgttgtaccacttttaatcactgttgtacctcttctaatcactgttttacctcttctaatcactgttttacctcttctaatcactgttgtacctcttctaatcactcttctaatcgctgttgtaccacttctaatcactgttgaacctcttctaatcactgttgtacctcttctaatcactgttttacctcttctaatcactgttgtacctcttctaatcact

SEQ ID NO: 41303 - DNA, 1292 bp, Heterodera glycines
  unsure (1)..(1292): unsure at all n locations
aattatatgtgctgaattaatattcagctgaaatttaaactttctttttatttntggttttaaaattaaattgtatataaactctttgcattaaaaataaaatcattaactcatgtcaagtagactctttatctgagttgttgctgaagcatgattttaaataattaaatattttttaatatatttagttttagcttgctgttcaggcggcattctaaattcgatattttttcaatattgaaatttaattaataattcttatgataaaatttataattttgcataattatttttttaaattaaattatttatttaaattattagttttcttactttttataataaaatcttatttttctattttttatcaagactatttatattaaataattataataaacataaacttttaaattataaacgaaaagtgttaaataaattttttatttaaaatttatttttcacctttatgtcaagtatttttcaattttaattatgtccccttatcaaaaaacagataatcattattattacatctattattattttattttttactatcaaccattgaaattatattgctgaattagtttgagcggaataatttttttttcattatttacataatatatcacgatttaataagtcgatttactgagcccaaaaaaccccgacttttctcgccccgaaagatcggagcactgtcttaaaaaaacaattaaatagaagctctaattccaggtgtccttttgaatttgctttctctgctacttttttttagttttttaaaaatttataagtattaaaaaaataaaatctaagaattttcttttcaatatcgggttgctattttttccgtatctttttcaagtaatttttacccttttcgatttgcgtaatttatatgtaaatgatttaaaaattccgttaggttaaagtttaatgtatttatatggttttaattatgtttttatttgcacctgtgtttttcataatttccagtatatatttttatctttcctcaagttataaattttattataaattaatataaattacgtattgctcgttttttttctagaatttattttacttgattattgtttaattttcttgggaaatatacaaacagtttatttaatattttctcggaatatcaatcaaacaaatattgagttagtataatccattaattgcttatttgattgattaagaatttttttaaataataannatatataangttttttgttttagcaaaaatatttttattttttgttatgcttgcttaa

SEQ ID NO: 41304 - DNA, 1126 bp, Heterodera glycines
aaaatttgaaaaaaattaaatgcttaccattgattccagcgcgccgattcgctcacgaagcaagttgttttccaacttgagctcctcgttttccgcattcgtgctcgccagtgcatccgccctttctttcaactggtccttcttctgctttagcacctttttgtagcattttttcgcctcctttgcatccgccgcctatgaaaacgactaagtgaaatgatttcttctttaatgcatacatgctgctgaagaagttcgaacagtctagagatccgcaacgagcggctctggagttcaccgcacaattcctgtcggcgcaccatgttgggcgctttggtcttgcaaaactcatcaagcaaatcgggcgagttgacgtcagtgtcctaaaatggggtgaataataatatacttaaggtgcattcaaaggcacccaacttagtcgaaagagaatactataggtacattcagaggcacctgttctaaaagccaccaaaagacagactattctactaataacactctcaaaaacctcttctcgaagtgcatcttcaagcgtgagttcgtttgggttcacgcgctcagacattctggtgtattccaaatctccacacttctcgaagcgcccttcggcagccgccctcgcagcacgggatgtgcgttcagtgtgtgagtgcatgaactccttacgccaatgagccgcgtatcccgagcgcccttttgcgttcttccaaactgaaaaacggaaaaagtttaggcgtattttgtcccacccccccccccccttggaaattacctttctcaaagaatttgtccttgaaggcttcagctggtggccatgcgtggttgtccagccaattggcagccgccctttcatcctcagtcatagtgtcccggggctttaacacaaaagtataaaatttttaaaattttgtaaaaaaaccttttctccttttttgtatttgccttcgaaaaccttcaaatgttctgcagccgccctctcgtgcttcaggtaagcctccatgtgtaggtcgacataacgcgcggattatgtcgttgatagtattcataatatgctcggaaaaaaggattttgatctctaaaataaaggcccttttaaaaaaaaaat

SEQ ID NO: 41305 - DNA, 1345 bp, Heterodera glycines
ttgttttttctttgaattttgccttattttaaccccccctgcccccccccccccccgggggctcaaagcgggtccctatgccaatggaagaatttgttgtagttagtttcgtttctccgaaatggctcctcccttctctctttctctctatgcttctctgctgttgtcttctccaccttattatgccgggtgagagatccaacagaagcacagaaaatggcagaaggaaaagagaaaagggcacagcagggaaaaggaaaaaggggggggggacgaaggtttggttttcaatgccacgggaaaatgacgggaaaagcgaacgaagcagcggagagaaaagggggagggaaatgccgggggaaatgccggcggcgggtaaattctcagagggaaacgaagacggcgaaatgccgccgaccatcgttctctgtttgctgctgttttgtcaacaaacgccacacgcgcaacagaagggcgggacgaacattgcttaaggggaaagccaaagaaaaacattggcggatgataatgaaaggaatggaagggaaaggaagggaatgaatggaagagaagggggggcatttacatacacagcccaacgcagcagaagcattgatgaagccggagggaggggaagagaaagcggaagagagtgatgagagacaaaaaggaacagagagataaagagtggaaaagagagaaagatggagggagagatagaggtgggagggaaatagacaataaaagagggaagagagggaatgatgagtgtaaagagagagagagatagatacagagaaacgctctactctctcctctctcccctcattctcttcctctccctctttctctctctctcagctgctgcttttccttttctccttcccccgtttcttcgcataacttcccaagagaaaaaatggtcacactttgcctaaaaattacaaaaaaagaatgctgtgcaaatttctggtatgacctaagggtttagggcggaacaccaaagaaaatgttttttttatttgtgcgatgaatgcttaaattaattaattgagttaattaacccctttttggtttctcagatttttcgcattgatttgacttaattgagggaggagggggggggggggtaaagaactcttccgttaccatctcttctaccgtcgaaattaatcatttttgtgcggtgatcaccacacaatacacaaagtggtgatcgaagaacagaagggaaagaggggaggataaaaaagcaatgggtggaagaggggaagagagagggaacagaaagggggaggaaagagggagagagagggggcgggagagagagggagggacaaaaact

SEQ ID NO: 41306 - DNA, 1153 bp, Heterodera glycines
gggggggcaaagcaaatgaattgtcaagacaaagtgcgggcaaagggggggggagggtgccaccgcccatcgaccgactgccgggaaagtttttgcccctattatccggcaacttccttttgacctgcgcggtcaaagcttttgcgactttcccttgggctattttcacatccccccttaaatggcgccttttgcctttgccctttcattttgcattttcacccacccgtgtgcgttcggacgtggatcttcatattctcagaacgagcaaaagtcttatggcacatctcacaagtgaacggacgttcgccggtgtgcacgcggagatgattctttggggggggggggaagaagagagaggggcactgactgaccttaagtttgtatttggctttgaactccttgccagagcgcacacaatcttcccagagacaaatgtgaacagtttgggaaaaggcctaatttgatgggattagaatttgattggctttggcttttcgattgcctctgagccatgttcggtgcccgtgggcgtaatggccgatgtgccaagatgctctgtgtctaagtgctccacgagatgctccatctcctcaaactccttctcgcacagcaatcgctgctgccctgccatccccataatccatcggcaccgctttggcccattttccgcgctccttcccgtgccgttctctcttcgcccctctccgctgccctttctattggcatttttcggtgcctttcccaccgaatggcttccgtccttcttcagatttttcttcgttttgtgtcgtccattcgcttcagtgtccatttttccaatttcgttaaaatgttcgaatgatgaaaaatgatcggacgacgaaactgctgaattattaattcgaaaagcttcccaaacaaattagcactagttcatttcacctcttttattgttaaaaaatatgccgtttgagttcgtctcaaaatatgccgtgtttgttgatgtcgtcggcagtggcactgtctctgccattggtgttgtccgaccgaaagatgtgccattgttttggaaagtggcccaactttcatactcagttttgccattaaatggtgtgtatttagaagaagaaaatgatggaatttggtaagggatgtgctgatagtattgttg

SEQ ID NO: 41307 - DNA, 1360 bp, Heterodera glycines
taacttttttctttgccactaaatccaacattcttcgtctcattcgatagccctaagtgctctctattagcctgtaaaatttggaaaaatttcgttaaggttcaaaaaagttatggtcagaagagttcaactaaccaaaatttccaactttttttggctcgaactttttttatactgaacgaaattttttggaattttgcaggctaatagtgcatctgaagggctttcaaatgcaagaaaatgaaaaaaaaattattttggcggcctaaacaattgaatggctcgcttaaatacacaactttgcgggtaagatcaaggatcatcattttcaagtaaaatttgacgtcggatcaaaaaaaacaatgccggattcattttcagcgcttgaggtgacaaaaacattaaaaaaagctccacttcttttttttaaacatttttagttagccaacgaagccgaaaaattccaaaaatattttctattattttttcaacaaaacaaaaacattaaaaactccttctttttttgttacaacattcattatttccccattgaatttttattttcaatttttgaatttctctggtcccaaaagatgcaacaaaatgtttttcccccattgcttgtcactaaatactttttgtcatttgaatttgatttttttttacattttcattgtttccatttccatttttgcataaatttctgtttttaaattttaaattgatctaaaaaacaacatacttgtacagtaagcatgccttaaaaaagtgcaacaatattgcagtgccgaaacctttgccaagattccaccaaaatagcgaccttattagacaaaagaaaaaattcggaaaattactttgcagaaaatacaaccaaaagtgcaattccaaaaatttatgcgcaattaatacgctcagaaaagcataaaaacggttttctgtttggtttggatgccttttttgcctatttcgggggtttttgtgtttaatgtgcctattttcagaattttgaaaaaatcattttacaaaaatgcaataaaattgaaattttttccaaaaattgatcttcaaaatttaatattttttcttcataaaaattttggtttaaaaaaatgtctttattcgaaaagaaatctttaaaatatttacatttacaattgaaatttttattttttttttgtgttttgctaccaaaaaagcgttaataaaaaatgttatatttgcctattacgcgattttttttttgtctaaaaaatcgcagccatacgaaaatattgtaaataatttttaaaaatcgtaaatcatttttaagctggattatagaaatttgatggaaaatgggaaaataaataattatttt

SEQ ID NO: 41308 - DNA, 1000 bp, Heterodera glycines
tggcaggttgctgagagcctcgtggttggtcggtagtgatcggcttgtcttaatcgcgttcttccttcagttgcaaaagcttcttccgtaaaataaaatggataaattttaacgacatttcacagtaaattttcatcgctcgggcttgtacacaaaatcacttgatcattttgtgaaatgaatgtgctaacctcacgcttcaacagattacgcagtttcttctcgaaggctttttgcatcttccagaatgggttaacgagagggtccggaggtacttcaacttcaaccgtctcgacagaagacgcgttctccgactcagtggcatccgcgggcttacaattccccatttctctcgttgattgttatatgcagagcaaagaaatataaatttaaaaaaacactaattgtaagtaaaaggattattaattagtaatataattggtaatactatagatggtgcgccccctttttagaaaaaaaaatttttttgttctaaaaagtcatggaaacatgtttatgggcagttttgagggtcgctgatcaggaatctgacattttgaccaatttcgaatctcggacccgaattcgaagaaaactcatttctcaccaaaattcaccttttattgtccaaaatcgattcaaattttcagtttttgttcaagtttgggtccgagcttcgaaattggtcgaagtggatatcagattcatgatcagcgacatctaaaaccccataaaattttagatgactttttaaataagtgttaataattttgtgtgtacttggattttgtaaaatttgacagttatgtacttgcactatgggtcaactccactgtgcagagaaaagcctagtactatctcgtcgtttctattttctttgtaatttctctcactttggcgtactatctccttattttttaatagaaaaaacagcatttacttcgcgatggttaactttttttttccctatgtttaaatctgcttgaaattttgcatatcg

SEQ ID NO: 41309 - DNA, 802 bp, Heterodera glycines
tttatagatttttaaatgtttcggagccttttttggcgtaccaaaacttcatagagcctggttctttctattctcatgctactcgccccaaattttttttacaggttaactagggcctattaagcgtatttccagaaaatctcgcatgaatgctcattcttacatgattcatagatttttaaaagctaggattgttttttggcttaccacaacttcatcggacctggctctttctattcatcgcctcagatcgccgctaattttttttacagcttaactaggccatattaagcttatttccagaaaatctcgcatgaattctcattgtaaaattttttatagatttttaaatgtttggatttttttttggcttaccaaaacttcatcgaacctggttctttctattctctttcaaatcgccccaaattttttttacagcttaactaggcgatattaagcttatttccagaaaatctcgcatgaattctcatttttaaattttttatagatttttaaatgtttggatttttttttggcttaccaaaacttcatcgaacctggttctttctattctcttttaaatcgccccaaattttttttacaggttaactaggccctattaagcttatttccaaaaaatctcgcatgaattctaatttttaaatttgttatcaaaaatgtttggatttttttttggcttaccgaaactgcatcgaacctggctctttctattctcattcaagacgccccaaaaggttttacagcttaactaggccctattaagctcatttccagaaaatct

SEQ ID NO: 41310 - DNA, 1309 bp, Heterodera glycines
  unsure (1)..(1309): unsure at all n locations
taaatttgttaagtaatcatagtttattcaaatagtgcttaaaaagtttgtacaaaagtaagacctaaaaaacggtaaatttaaattcccccccccccaccttttttcaaattttagtcatttcggggtcgctgatcacgaattcggcttccatttcggccaattccgaacccgggactaacaagaaaacaaaatgaaagcgtcaatcccacaatgaacgaccatttaagctgttttcaaagtagaaggaaaacaaaaaaatgcgaaatttgggcgttggaccttttgttcgaattagggtccggaaggagttcgaaatggatgtacacctaatatttgtgaccagagaacccgaaaagcctataaaacatattttatggatttataaataattttcttttcgaattaccctgaaacctagggtactttcccgagggtgggggtcgactgggcgccaaccaactgggcgccagcccggtttttggagcacaacttttttcatagttgtccgaattgaatgaatttagtagcactcgatagccctaggtgttttctataagcatgccaaaattcgaaaaatttcgattaagttcagaggaggctagccaaaattcaaaatttttgaaccattctcaaataatcaatgaaaaagtactcgaaatcaatttgttttccaattttttatcctaaatttataaaatcctttttaatttgaagttctcctaaattgctaaggtgatctgtagagatgggatttttaggtttttacctattttttttgcggcttaattatgatgagagaagcccaaaaatagcattttctcctaacaattttcgatttagagcgactttttagcacctaaaattacctaaaactggattttcggtcaatagcacctattttggcatttttcgagttttagcacctttttggcctttttccagaaatttcatagcaaaactgcaaacaaaaacgaaaaatacacccctattaatcgatgccataaaattttaaaaatatacccctaaaaattgaccaaaatttcagaaaatattcccctaagaaattaaaaattttcccaaaaattcgtcttcaaaatttaattatttgttatcttngaagttgcaattgtgcgggtgaaatcgatcaaactgaatcatttttggggatttttgtgcataaagacatggatttttccaattttttagcacctattttggcattttttggcgtttttagcacctatttttgcactttttttggcaacgtattttaatacctatttccaggatttttaacacctaaaaa

SEQ ID NO: 41311 - DNA, 1591 bp, Heterodera glycines
aaaaaattgaaaaaaaatcgtttttcaagttttttttaattggtttggaaattcaaaagaataattcggcggaaagggcgagcggcttgctctctgcagcttatattggtgaggaataaaaatgaaattattgcaccgcaccttccttaaaacggcggttgcccgtcgcaccgtgcctgcgacaatgaccaccatccgagccacccaaaagaacgaaatgtcgtgtccggtctccagccaaagagccggggaaaaaagtggcgcctgtccgccgttctgtttcgggcccaacccatccacactgaaagggccacgatgccggcggagaaccacgtgtccagcacgtcctcgtctggcgaaaatggatggggtggatattattccatttttaaaccggttaaaattcaaataccccgcttcgagtgtgacggactgttcagaaacgttgaaccgcttggccgcctttgtcttcgcctccgcctccgttcttccggacacccaatacgattcttcgtcgtcaacgctcttcattgtttcccggcggtgtcgaagaatgattgccgtcaatggtgataaaagaggccgggatttggtgaccccaccgaagctgacgagaagatgcaccgaatcccttagatgatcgatttagtaacttcttatgtgattatgtttctgttccgaaccgaatgtcgttcagccacgcattccacgtgttcacgtggtattccgggatgagtcgaagtcgtccgtcgaccaccgccgctttggcccgcttcgccatctctgaagagcgcacgtaccactgcgattttatgatgggctcaatgatgtccttggaacgactgaaaaaaatgaaaaatagtaattggtgttggaaaatatcatgaaaaaaacagcttggaaagtgcagaatactcgccccacaaatatttcgtgtgcataaaattacgacatattccttgggtgttaaacggaccattaaataatttttcaaatttgtataattgctaatgagccgggttcgctttcgtgaatatcttgtgaccaaaaccatgcttttttgccacagtctctccctcacctgcaaatgcgcaattgcatcgggttttccttggtgtcccggtacagtcccatcgccttcagccgcccacgcaccgccagccgcgcgctaaagcgatgcattcccgcgaaagggccgcagcaaggcgcgcaagaaccgtggtccgtgaagatgttgatcagcggaaggccgtggcgttggccaatgtcgaagtcggtctggtcatgggccggagtgattttcaccgcaccggtgccaaagtcgggcagcacggccgagtcggcaattatgggcagccgacggtcggggaaaaacgggtgaacacagtgctgaaatgagacagaaataataaaggggtgggggtcgacgccaaattttactaacaataagggggtcaaaccatgtaaatcgatgacccttttctttttttgtttttcaaaccatacctgcgcaagagggtggtcagtgacagggtcttacgttcgactttgaccacccatgggggggtcagagccccattttttctacgtc

SEQ ID NO: 41312 - DNA, 1260 bp, Heterodera glycines
tggacgcgtaaacttttgatttgacgcgtaaaagtcgattgaacgcgtaacctgcagtagagcctaaaaaaaaattttgtcgatcttagggatgtatttttgaaattttttagatcaattcttaagggtgtattttttgattttattgcatttttgttaacaaattttccaaaaaatgtcgaaatagtgaaaaatagtgacaaaacggcaaaaaagtgaattttcactattttaagtaacgaaacgccaaatagtgatttctagtgacgaaaaatgacgtccaaatgaaaaaattttaatgcagaaatgcgttttttgagctcctttcttcaaatcaaacgagcaaaaaaagttttttcactagaaatcgcgtccctagtaataatacctactggacacggcgattcaattttgggctccaagtacaaataagtttattatttatttagtaatcagaacgccaaaactttgcaaaacttaaaatttttttcggatttcccttgtaaaaatagaagagccgatctcgagttaaaaacttaagtttcacaaaataaacttggaatcgctagagggggtcaaaatattggtctatgcaaaattttaaaaaatttaaaaagctagaaaaattttttgaaagggacgaacatttcataattttaattctttttagccaagtcctcgatttaaggccaaaccaaataaaacttacaatattctccagaattttcccttcaaaaataattatgccttcttctgtaaaagaagaaattgaaattaacacacaacataaggaggactcgaacctgagacccccttttggtgactaacaaaaaattttcttttctaaaagtcgttaaaacatattgggggttttctgggtcgctgatcatgagtctgacattaattttgaccaattttgaatcccggactcgaacaattttcgaaattcaaaattctcacacataaaacaaatttgaattctcgattttttgtccgagttcgggtcctggattcggaattggccaaaactaaggtcatattcgtgttcagcgactccgaaaagcccagaacacatgtttttctaacataaaaatttataaaaaaatcaatttcttgatgaaaaatcatagacaaaatcaatgatttttcgaattctgaactcagatccgtaatcagcgtttttttaaattagaaaacttgaaaagaaaaaccttaaatttattttccgctgggacaccaattctccagtattacccaaaa

SEQ ID NO: 41313 - DNA, 924 bp, Heterodera glycines
cattcaaatcgccccaaatttttttacagcttaactaggccatattaagcttatttccagaaaatctcgcatgaattctcatttttaaattttttatagatttttaaatgtttggatttttttttggcttaccaaaacttcatcgaacctggctctttctattctcattcaaatcgccccaaatttttttttacagcttaattaggccctattaagcttatttccagaaaatctcgcatgaattctcatttttaaattttttatagatttttaaatgtttggatatttttttggcttaccaaaattcatcgaacctggctctttctattctcattcaaatcgccccaaattttttttacagcttaactaggccctattaagcttatttccagaaaatctcgcatgaattctcatttttaaattttttatagatttttaaatgtttggatttttttttggcttaccaaaacttcatcgaacctggctctttctattctcattcaaatcgccccaaattttttttacagcttaactaggccatattaagcttatttccagaaaatctcgcatgaattctcatttttaaattttttatagatttttaaatgtttggatttttttttggcttaccaaaacttcatcgaacctggctctttctattctcattcaaatcgccccaaattttttacagcttaactaggccctattaagcttatttccagaaaatctcgcatgaattctcatttttaaattttttatagatttttaaatgtttggatttttttttggcttaccaaaacttcatcgaacctggctctttctattctcattcaaatcgccccaaattttttttacagcttaactaggccctattaagcttatttccagaaaatctcgcatgaattctcatttttaaatttttta

SEQ ID NO: 41314 - DNA, 1037 bp, Heterodera glycines
  unsure (1)..(1037): unsure at all n locations
tttttcgggncgagtcaattaaaaagattttttccaattgatcccatttnntctccagcctttccaccagtttggaactgcttgtttgtaatntcgtttaatttgttaaaaaattcttgacgttccgtttcaagaattgaaggaatatttggcgtaaagtcagtgtcatatttttgataaatggtgaacaatttctccttcatggaaccaattgcttctgtcaaatcattgactgaaaagaaagattaatatttaatttagaaaatgaatattttcccattttaggcttgaaatagattaaatgaattattatttttattaattttcactaatcaccgctcgtaacaagaaatattcggtttgctaatagagaaaataataacattgttgaggtatttttgctcattttattcatcggtgcctaaaaattaaaaagtttatgagtagaaaattaattagaaaatagagaaaacccatttaaaattaggaggatttaattatttaaaattcggctgatcccttcttaaggtatttattatggatctgttttttatcttatcgtattttgttttattaagaatttgtgtaaaataaaaaattaaaatttttgacttcaagagaaaaaataaaattcgattataagtcttattaccctaacctcttcatctttttataatttaaatattttttaacttatattattataataatgcaatttatttacttttaccagtgctgtctattgatttttggcaatgcttaaaaatttatttcactataataattttttattataatttttgttttttcatttataataaataatctctaaggggtaggaacggaagtccctttttgaggtctaccaattttttttttaatttcaaaaattttttgtaaaggtagcaacagcaccaattcgatgggaatttgctccgcttttgtggcagtgacgaaatcctgcaaaaaaaaaaacaataattggacaatcattaaaatattaattatatagncataataaaaaacgaatgataaaa

SEQ ID NO: 41315 - DNA, 1203 bp, Heterodera glycines
agccaggaatttatagcagttttgtgccaaaaatgacaaattaaaaaaaaattaaatttaattactaaccattttaaaataagaacaacaaatccgaaaagacattttgtcataacttgctttatcagagatggcgtcttcggagtgtatttgcatgtgccattttgctatatgaataatagccctcatacccttcagggacattggcagcgaattcagcatgaggatttgctaaaatttgcaaattcaatggaaaaacataggaaaaggatttaagaaaaattcaaaaaatcttagaagccataaattttcttcacagtcaaccaaattttataaatttgacatcaatcgaagcttagtcttaatgatcttttttagactaattaaaataaaaatatgatttaaaataattctacctccaattccatcagttccaattgccgctgctgctgcagatggttctgcgtgagtgcgttttgactgctcgtacagttgaccatcagagcgttctgggcaaggacaatattctgcatcggcgcctgattaaaaattttgataataacaattttagatttctcgatcgcaagaatcttgtgttttgtacagtaagtttttctattcaagatatgtccttgaaaatgcaagcagattttagaggaattcctgtggaaattttttaaggttaattagccagggatttttgcgatttattatttttttgggcatggttaatgtttttatcatgtaaatgccttttacataactaatcatgtccgggattatgtcctgttcttatctgtctacactttcatctcctcgtttccctactgttttatcaatttgctcaccctgtgctccgattggccctgatgcgccaggaaaaccgtccttgcccggctcgccaggcggcccttgtgggcctgattcaccaggttgcccttaaaaaattaacattaaaaattctcgaaaaatattaatttgacgcgtcacctggtggcgagtcgtccccacgttccccgggcgggccttcttcaccgactgggcctggcgtgccaagttcgccttgtggcccagttgcaccgcgtgcatagccaatggcatcctcaccgggtgggcctcgcaggcctgcctctccaatatcgccttggtgcccaatccatggggagtgggccttcatctcctttaattttttctttcaaaaag

SEQ ID NO: 41316 - DNA, 1072 bp, Heterodera glycines
aaaaatggtctaagtaaaatcgtaattacgctcaaaaagctctcaaaccattttagcgctcccattccttctacaatcgcttttatacatcccattatgagcgctaaaattatcagagtgccgaaaatcgcatgtgatctaagcctagcaaaaaatggtgtaagtaaaaatcgtaattacgctcaaaaagcttctcaaacaattttagcgcatccaatttccttctacaatcgcctttatacatcccattatgagcgctaaaattatcagagtgccgaaaatcgcatgtgatctaagcttagcaaaaaatgatgtaagtaaaaatcgtaattacgctcaaaaagcttctcaaacaattttagcgcttccaattccttctacaatcgcctttatacatcccattatgagcgctaaaattatcagagtgccgaaaatcgcatgtgatctaagcctagcaaaaaatggtgtaagtaaaaatcgtaattacgctcaaaaagcttctcaaacaattttagcgcttccaattccttctacaatcgcctttatacatcccattatgagcgctaaaattatcagagtgccgaaaatcgcatgtgatctaagcctagcaaaaaatggtgtaagtaaaaatcgtaattacgctcaaaaagctcctcaaacaattttagcgcttccaattccttctacaatcgcctttatacatcccattatgagcgctaaaattatcagagtgccgaaaatcgcatgtgatctaagcctagaaaaaaatggtgtaagtaaaaatcgtaactacgctcaaaaagcttctcaaacaattttagcttccaattccttctacaatcgcctttatacatcccattatgagcgctaaaattatcagagtgccgaaaatcgcatgtgatctaagccttaaaaaaatggtgtaagtaaaaatcgtaattacgctcaaaaagcttctcaaacaattttagcgcatccaattccttctacaatcgtctttatacatcccattatgagcgctaaaattatcaggagtgccgactcaaatcgccatgtgatctaagcctagcaa

SEQ ID NO: 41317 - DNA, 1551 bp, Heterodera glycines
  unsure (1)..(1551): unsure at all n locations
aatctgtgctgcgcaacttttttatcttcaaaaaggcgatcaatttgcgtggccgaaacctcgaaaagacgtaataacttgagttgaagtgatctaaactttagaaataaatattaatttaaattcaaatcaatttcattttgccttggttttttgttttttgcataaatcgtccccccatttcgtccgttttgtgctcccaccgaatttgcggatcctcagtccgggaggcaccgaccgcttaaatttaaccaagctttttgattgcgatataactaatttggtatacctaattcaaattgtgcaagcgattaaaactgaatgtgcgcctggcggcacttgcacttgctctttgtacgccgtcggttgcggtggcattccattggtctgaattttgttcttgaatttaccgagattacatattccagagttggaaaccaaggtttggaactaaaactgacaagttatcttcagactcttaaattgcctatttactctcattagcatattttatttatttttctttatgctgttttctattaactaatccactcaatcattgttgccaattaactttatcactttaaaatgcgcttccgtgggaagtgaccgtgccccgctttctccgtcttcgctgtcctcatcatcgtccgattcagcgagtgctatgattcgtgcggcataccctaaagtgaacgaacactttgcaagtggttgatcctcgaagttacagagagtacttttaattacaaaaaagaccaatttggggggggggggggataaacttatttttgcctttaatgtattcaaaaagaattatagtaattttttaaaattaatattgtgcagaaaattcattcagacgatctatctccgtattgtgtaaaagaaggctttaaatctttaaaactttaaattgaatattgacacaaaatgttaagcggcatatgccagcaacgaatttgtccattttttggtgtttaatttcatccctccctcctccgccatttgatcttatttaacagttttgttattaaaaatgattgatggacttgttcccggctccaacaaggtcagccgtgcacttttgcccatcgccccaattcgaattttcgtctcgcggtcaatgtgcccattgtttgtcgtctcgtacaaataaatcaaataatggtccaccaaatgcgcattaaattttggctcgacccacgaaagttcgaccttcagcggaagaaaatggggcggaacaaaaatattttttttacacaaaaataagcaattaaaaacgtttaaatgttacctcagttgtgccgacgtattgaaaaacgatgttccgagggggcgacggactctttctgtagcccctttgtaaactaaaaatacagtaacaaaaaaagaaaaaggaatacagtatactgcaaccaaagttttaaaaaatgcagtagcctaagttgaaacaattcaacgaaaatgatactatgacacttgtttcaggtttttaattgcaattgcattctgntgatttaatatttaccatgaaaaatgttgcgtatg

SEQ ID NO: 41318 - DNA, 1490 bp, Heterodera glycines
  unsure (1)..(1490): unsure at all n locations
ttggactcataaagtgtattagagcccaattctcttggacatgagattgacccccaatttatgatgcttttgatgtaggaatttcatatatttttatggtggcgacgataaattatgaaaatcaatttaaaagtgagcttttgccattagaaattttgctcttttttggcccgttctttccctttttagataaaaaaaaatatgtcctacttttttcccaattttaattaaatgtttttaatgaaaaataataaaaacacatggaaaatcatatttaaaaaatttatactttcatctataaaatgatttgttggaagcgaatcagacaaagagttttgtaatgtgtaaatatataaatgtgttgatttgctgctttttggggggacaaaattcactaaaaactattccaattttctaaattacgaaatggaggaggcattattgttgaagagaatggcaaacaaacggttaataattcaaatatggacttttgtgatggtggcgatggtttaagcataattagttctctgggtgaataaaaataaaaaacaattaaatctatttttgtgtggtttttgggcaatctcttaacacatggacaaagattaaaaactgatcaaaaagataaatttctttcgcatccaaatcaactaatcattttaaatttgttggactgtcagaagaatttttgatttaaaacgcacttaaatttcaacaaaaatttattttttactttttttcgaaaacaattaaataattgttttctgaaaatctatattaatttttcttaaattttggcattcgaataaactaaaattaataagaataatgattagttaattggactcataaaataatgaagaccaaaattttgtttttcatactttaatatgcttatgagattgctcttcaatatacgtaaaataactatgggtgttttttgtatattataatagccattgtaaaacaaataaaatagcaattttcatgaatttctaagtttgaatatcgaatagttgagatatatgtagaataaaaatattaaaacaaatttgtataatatatattgtattctgaatgtttcggaacatacttttttgtattatagcttgtatgaatacggggagagagagagaaataagccatgaaaatacagtaattcttttttgtgaatatacggtagcaataatatgtaataaagtgcagaataaattgtgtgtaaggacataaaatgaatggaaatgcaccgagggacaaaaaaaaaataataaaattaatttgtgaaaaaaagaagagaaaaatgcagagtgaatttgcttaataatataaaaagtattggtggntggataagtaaacactttcaaatagagccaaaaaatcccattttttaatgaatatttgtgaaaaagtaacggaaaaatgggattnttcatttaagtaccatttcaagtatagaataatggtaggaaagaaagtacacaaatactaat

SEQ ID NO: 41319 - DNA, 770 bp, Heterodera glycines
gcaggcacagattttgagcaccaaatgcggcggcgattttcggtcagtggcggataaactcccaaagcccccccccctccttcacaaagattgaactccttccgacccccttcagtccgatttgtaatatccatcgtccgtccgtccgtctccccattccgctgaccttggggggggggggggggggagatgctttaccaacagaacacaaatcgatgctggtcaaacacttaaaaagcattcaaacttaaaaagcatattctgttaaatatttgttggtgaccttttctctctcccatctctttaattattaatttttgttaaattttgtttatttaaatttttcaaataatcatttttatactttttgttatcgtttccaaacagaaaaaaagaagaatgaaacccacgaagagaatgccatcaggcaaaaatcgaatgtttggctgcttaaggaaatgccattggcactgactctcccccccccctttcccccgtcgcttctctccgctcggagtgtctttttgaaacccttcgccttttgttgttttttctccagtattttaaaattctctcccgggcattcttttctacatttttttttgttttgttgttttgccattccatcgatttgactcatttaattgtgacgaacgaaactcacgaaaatgaaaagcgggtgaaaaacggggggggggggggggtgaagcattttttatcgatagttgcttttatttcaccaacgaagcacttagggggcgggggggggg

SEQ ID NO: 41320 - DNA, 849 bp, Heterodera glycines
cccttaaggtggccagagtccataagcgtgtccgaagcttagtcggggcgcttatgagaagttggtgtgtaaggtacgaagtgttcaggaacggggaagtacggaagagcgcagcgctgttggtgaagaatggtgtgctacagggagacacgttgagtccgctgctcttctgcctctcagtggccgttgtttcgtcttcagtgagaaaactctttgactttgaagttctcataccgggacgaggtgtgatgcaacggcagaaccacctgttctatatggatgatttcaaagggttcgcaccgagtgaagagtccttaaaccggatgcttgtaactatggagcggaccgcctcagccgtagggttgaaggttaataagaggaaatgcgccttagtgagtacccgtgaagcggccggcgaggcgtcagggaatgagattccgaccctcggagcccacgacacttataagtatcttggagtcgaagagaggatagacatcgtttttgaggatgcgtgggaaagagtctgtgccaagatgaatgagcgagtgaggtccttgttacgatcggaaccgacatttggtgagcttagaaaagccatcagggtgacggtgaccccagtagcgaggtatctattcctcaatgtaatcgctggcgggcctagctggggaagcgtcctagcaaatgcccaagattttgacacgcgtgtccgtggcctcctacgggaaagagtgagtgatgagcctggatggcggtttaagcattgtaacgctgatcgcctgtacctccggccacagtggggtggattgggcctggtgtcgattgaaaacactttggttgagtctatcatat

SEQ ID NO: 41321 - DNA, 1658 bp, Heterodera glycines
  unsure (1)..(1658): unsure at all n locations
aaaaatgataagctgacagaaancgggagtgaatgggaatgttaatttatttatttatnttgtcaatccctctcgcaattttaattttatactcattatgctaataggttgngattatcatatgaaacaaataaaacattccaaacgaaacaaatataaaaaagtatgagaattaaaataaagcaaaaggtcaaagcatttttcttgtcgtcaaatatctttgacgtcatgttgtcatctttataatctgataaacacctggtgctgttgaagcggaggaggggaaggcgtccatttgagcggcggcccaatcgaacacttctcgtcgaagaggtcgatcaggtcgcgctcgacctgggcggaagcgttgctggaggcggacgagccgaaaccggaggatcccagcgccggcgacaagctggcgttggcacggtgtccaccggtgttggcgttgtgatgctggttcggtttgctgatggtcattggctaaaagggtgggaaacgaatttaagcattgcccacttcgttccattcttgtctttcctcaccccctccacctgctgtatttgctgctgttgtgacgtttggggaattggcggcgtcgttcccttcgctaattgtccctcggtcgtcgttggctgcgatcgataacgagaacccacaaactgtaaaagaacagggaaatgggtgatggagatggtgaaacggacgggtgaagaaaacattcatatcggggggcagacaaataataattatgggatgggacacgccccaatgcgtactgtagtatttacactgacagtatgaggagcatactacaatgtacagaatgcagagcaattttgtcgggaataaagcagaagaggaaatacgaatgttgtaattccattaaacagaaagggcgaaaagggacttcaaatttaggccgaattaaattaataaatggcaaataattgtaaaaataaaacaaatttttatgcgcttaaacaccgcccgaccaattgcttttttgtattaaattctattttaaaaaagggaatgtgtgcgtgtggtgggcgttgtgctttttgatgatttcttttgaagcaaaaaaaaagagagggggaggngagggggtgtttggtgaaggaagggaaggacgatggaaggacaagtggggggggggggggggaacgaattgtgttgtgtttggtgtgcgcttaagcggcgggtgggaaagggaaattatgtatgcacaacgaactttgattcattcgaaagcattcgttgaataaacaaacaaaaaataaaataaattaatgtaataaatttacagttaaacgaaaataaattaaaataaaaaattaaattaaatttaaaaacaaatacatatacatatgtatgcttacaggaatggataacggataccattaaaaacaacattagtaaaatactttttgttagcattccgattacaaattaatttcaaacggcacagttttgcgctccggtaaatgtgggattatttaaactcgaatttcgatcgattgggagaaaaggaaaataagagagaaaacatacgggggattttgaaggtcgttttgctctcgtgcgggagctcaatcgggggttcttcatgcttaaaaagggagaaagaattatcagggattctatggaac

SEQ ID NO: 41322 - DNA, 905 bp, Heterodera glycines
taaatctgggcgcatcggttcggggggactgaccgccataagagaatcgattttttcaagtgtccgtttggggtactcaaacaattatggggagcaaaaatccaaagcagaattaaagtacaggctatagggaagctattcccgaaggattcggcctccccataaatctgggcgcatcggttcggggggactgccccgaaaacaaaaaaatcgattttttcaagtgtccgtttggggtactcaaacaattatggggagcaaaaatccaacgcagaattaaagtacaggctatagggaagctattcccgaaggattcggtctccccataaatctgggcgcatcggttcggggggactgccccgaaaacaaaaaaatcgattttttcaagtgtccgtttggggtactcaaacaattattaaaaatttttagatttttattcatctccctttttgatagtgaaagcatctgagtgcctaaaataacttgtaaataaaattggtgcgtttcagagcagtttgtgaaaaaatatttatgaattaattttgctaaaaaaataaaatagtgaagcttaaaaattaataaaaaattttaaattcagaattactggagttagcatcatagcagtgcttttccttgtctttttgatgccctcgcaaaatctggttcgcttctgatcagtttataaaaaaaaagttaagcctaaaatttttcgcaaatttaaaaagcaattaaaaatttttagattttttattcatctccctttttgattgtgaaagcatcagagagccttatttaacttttaattaacatttggtgcgtttcagagcacgttctaaaaaatatttatgaattaattttgccaaataataaataattaatgaaaaagtcagaatttcgaaaatttt

SEQ ID NO: 41323 - DNA, 1069 bp, Heterodera glycines
  unsure (1)..(1069): unsure at all n locations
agtaataggtatagcgaccattntaagtggtcatacagtctgtaacaaaccataaggnccattaaaatttttggatttctcatacattccatggggcaccccctcccccaataacccacgaaaaaatggaaagtgtaaaagaaaataatttaatgaattttttcccgaaaattggcccaaatttgctgtaacaaaattataaggccacttgattcaacacaaataatttttttaaagagcaagaaaaaacctgtaaaaattcaagtaaacataactctttgtgttgatcaaaaaagtcaattgcaccccaatgatcagatcactccttcagggttatcgggaatgatcaaaattttaacatccccagggacttgagctctctctgaaaattttcaatacgttaaaactacacccaatcaacatgacatcatgcacagacatcctacaacaatttctgattttgaaaaagacccgataaatctaacaacattccattacattgacattttagtgatcaaataccgtaaacgcaagagtaggtgtctttaaaaaattcctagggggttggaaaaattttttggtggaagaataatatcagggtcagataaagcacaaaatttgctacaaaatggcatttggatgatggctcaatgatgcgtctccgccgaggaaagtaagcataaattcagactaccccaaaattgatcatgggatactgtatttttagtctagtcaattttcgacctttcgtttctccatgggcaaaagtcgtagagacatgcggttttatgcattctgtagcaatctctttctgtccgtcataatcatctttaacgaaaatttttccagccccctaggaatttttttctgaaaatttcccaatttcaagccattttattttgatcgacaaaaattcaaaaaaattacctactaaaaatcagtaaacttttgatgctggtatacccatccttggtgtcagatccgaaccctggttaagtcccttattatttttagaccatattcatataagtgatcgaccttcgaaactagaaaagtaccagaattatta

SEQ ID NO: 41324 - DNA, 127 bp, Heterodera glycines
cctgcacatcgccggcacggtcaccctgcaacggcgcgaacttgaagcgcgagttgccgaggtcgaacaaccaatcgctcatgccgccctcacgctgacttcgccggcgtgcagcaggcgttcccgg

SEQ ID NO: 41325 - DNA, 866 bp, Heterodera glycines
gagagagagagagagagagagagagaaaaaaatagagagagagagagagagagagagagagagagagagggggagagagagagagagagagagagagagagagagagagagagagagagacaatgagagaaattaaatgtggattaagcaaagtatcgtttccgcctttgtgtcatgccatttctcaaattgagagatggccttttaactcccatcgactgacttacaaatacataaagcacccgcaggcgcagcaaaggcaaatcgatcgggcaaagagaaaaaacgcacgcgcgcgagcggtttcacagccgcgcgcacgctttgcgaaaatgtgcccgaagcgtgaaattctcgcttgtgccctttgtggccaattttgccaccctcggcccaggagaggggggggggcggggggggcaattccccggcactgtcatcgagacgtccatttgacaataaatgccataattggagagactttcagagttaataaatcgggaaaagtgcatttgaaacgacttttggggagatttttttccttatggtttcgttttcttttttttgcgctgaaaatgccaaccaaaatattcatttgtttttgtatttggcaaaaatgaacgaaagtgtccaattaggagcgaccaacgcgtaaacagaagacagaacgagtcggccccggcacagctgtgccaacgatggccaaacaaacgacgcgtgaatgacgtggtgttgcatgcaccgccccgagggttattttcggcacagaaattgggggaccaatgggggacaaaaggacacaaatttaagcaatgtataaaaattaaaatatggcacaaaaatggaaacggaactcaaatggtcaa

SEQ ID NO: 41326 - DNA, 1084 bp, Heterodera glycines
  unsure (1)..(1084): unsure at all n locations
cggagtaggacaaaacgtcgtcagccgaaacgtcgtcgtacgaatttttcgaccataacttttatctttctcaaccaaattaaacattcttggtattattcgaaagcattcgaaaaatgctattagcctgcaaattttcaaaaattgttatttatgcacaaaaaaatcagagcaaaaaaagttcgaattactgggtttttgagttccttctggacataacttttttgaaacttaaccaaaatttttgagattttgcaaattaataataaacacatagagctatcgaacaacaccaacaattcttaatttgattgacagtgaacaaatttatggtccaaaaagtcttccgacgacgtttcggccgacgacgttttggggtgcaccgccgctgagaacagttttcatcaaaacaccaaattttgcgattataaacagggtttcactgaaaattagccaatttatatgtaaagttttgaaaaattttatgggaatttaatccaattcttaggggtgtaaaagtcgcgtttcgcgccaaaaagcgaaatgcgaaacgccaaaaaatgcgaaaagcgaaacctaggcacatccatgctatgcaggaatgatctgatcaagtttctgttaaagacttatttgatcggcataaaaagtttgcttagaaggaattttttcagaattttggccaacaaaatattgattataaacaatatgaccacccgataattgggtgtggcacacaaactcaaaggtaattggggcaattaacaaatattaggtttaatgaattggtatcattgagaagtccattaaaaacggtacaaaaaggttaagagtatacgcctatcaaagatctaagaaaaataatttaatgattctttacattggcacgaaaattccatacattctacggcacaatcttttcacccttggcaattttttaatgttgaaattgttccgtgcaaatttactgcaaaagttgatcaaaaatgtacacaanttcgggcggttggtcatcagagagtgccgacaaactccattgaaagccgttcggtgagcgtcgatcaaaaaatgggaaaagtgtacc

SEQ ID NO: 41327 - DNA, 828 bp, Heterodera glycines
  unsure (1)..(828): unsure at all n locations
gacatatcatttgtatagaaaattcatttacgtcaaatattcttcaatttttccaaaaacaaaagactttttatagaaaaatagtgaattttaaaaaaaaatatctttccnatcacatttcaaatacttaaataaaatttttcattaataaaataaaaataaattatttaaattttgcactcaaaaaatattattaatttccgtctaatattttagcattgataatgaaattttcctattcaaaatgcttttgggtggtgacacatcaaattaattaaaagaaaattttatttttttaaatggaatattaattttaccaaaaatatttgtttaatatttcattgtctgatgacaaataatattttatttattctttctttcacatcaattgtttcttcattctttaatttgatcagaaccagttgacaaattctgcgtaaaagtgaaaaagaaaaataaatatttataatcgtttaaataatttttattatttagtcattgacaattcgaggaagttgtatgaaaaaaaattttactattaaaattaattaannttattngnttantgtgtttgaattantananattttatttttgnttnannagaaaaananggnggnaattaananggnaaaaangatgnaanaaatggnaaangangtgtgnaagnngatnantnngntagggganntaaattttgngattgggatanataatatnannnatgaaaannnaggnntgganannaaaaagnntaggttnaatgtgtgatntaagaaaannagtgaaaannnaggnntggatntattnntagttntgagtgttgtt

SEQ ID NO: 41328 - DNA, 983 bp, Heterodera glycines
aaaatcgaattttttgttttcggggcagtccccccgaaccgatgcgcccagatttatggggagaccgaatccttcgggaatagcttccctatagcctgtactttaattctgcgtggatttttgctccccataaatgtttgagtaccccaaacggacacttgaaaaaatcgatttttttgtttcataaatatttttttcagaaagtgctctaaagcgcaccaaattttatttacaacttaattttagcactctgatgctttagtatcaaaaaggaagatggagaaaaaattttttaaaaaatttttccttatattttggttatatcgttttgcttttggtggggtgcttggaacagtggaatcatgcgcacccgtccgatctggcaagttaagcaacgattgctgactagccaaaaggttcggtgccgtgatgaaacgaaccagcactgcttaccccgcggcacccggcacggtcccccgaaggaatggatttaattaaattctctccttcggggatttttttccattaggtcgtccgttagcgttcgattgctctagtcaatttttcaaaatttttgttgaaatatttgtcgtgctctgaagggcgtgggaggggggggggggggcgaaggcccaccacgaggccgcgaagaggccgagtgagtaccttcggtgcaggaaaattattaaattttaaaaattttttaattgctttttaaatatgccaaaaaatgtaggcttaacttttttagtgaaaattcgatcactcatattttttgctaattgagcagaagcgtaccaaactttgcagggatactccccggtaaaggactaacttacactgaaatgagcgccgagctagctggctcaaaaaaattttcgaaaatctgagtctttcgtttttatttgttttttgcataattaattcataaatatttttttcacagaaatgctctgaaacgcaccaaattttatttacatgct

SEQ ID NO: 41329 - DNA, 830 bp, Heterodera glycines
cccgaccattcagtcacattcattgatcacttatcctcctcccttcagggatcaatctcgcagattaattaccctttgatagcttatttgctttccggctttttctctgtctcccaccttcctctgatcactcttatttctcctctccatccccttttctgatcagttgtccttctcgtccaatttattttccttcctccgtttcttcccctttcagctctttgacggatcattcggtggtcagtcttgccgaaaatgcgctgtcccttcgtggcgatgtgctgctcaaatgctgcggcgtgccgtcgctgaacggggcggagaagcaattgcttttccagtgccaattcaacacttgcgcacttagtttggacgctttggacagtcccaaattgcgtttcttcaaggacgatctcgactatgtgcacgaacgtcagtcacttcattaaccaattaattattgaattactttagcccatttgttgtcttcgtccgcttcgttggaaatttcctttgaactcgctgacccccgtccgcccgctgtcgcccccgctgctgctcccactttgaacaacagaagcaacaaccgcagcagcaccagcgtgtccatggcaaaccacgcaaaacagcaacagcaaaggaagtcggcgtcgccggcacgaatggcgtcggcgggcccaatgccaacaattgtcgccggcggggatttctcccgggtggacagctatgagaatttcgaaagagcggaaggtcggtttccccgctgccggggggcgaatggttttgtttttgggagggcttttgctttgtttcttcatattctgaataga

SEQ ID NO: 41330 - DNA, 1212 bp, Heterodera glycines
  unsure (1)..(1212): unsure at all n locations
ttcaaaataattgacaaaatantcgaaacaattaaatttcaaaattcgcttggccgagtccaaaaattcctaaatcttattaaaaaaattggctcaaaatcgaaaatattcagcactttttgggcaaaatctgttaacagacccatgcaaattttcaaaaattttcccggcggcgcctatcggcaccgccggacccctttctcctgaaaagtctttagaaaaagcgcgccgagaaaaaaagatggttgaaaaagaaaaaagtaatcagaaatttttgatcattttttgaataagattcacttttttcaaattgccggatccgaaaccggtttccggattgggaaaaatttaaattttcacatgttaatatttgtaaaaaccggcaaaatttcatttattaatataaaaattcgatgcaccagaaatgtcgccgccaaaaagacataatgttgccgacaaaataaaaaattttaaaattttcaagatattaaagcatacaaaaatatttatgataaaaaataaataaataaatataaacaaataaaactttattatggaaattataaaaaattttgactatatggcataaggtaaaaatttaaaaaccccgaaccccgaccccgacccgaacaatttggtcgaccccgaccccgaacgattttgttaaccccgaccccgaacttgctgaccccgacaaccccgacttttctaaccccgacgttcgggggtgcaaccctaaaaaatgcaataaaaacgataaatacacacctaaaaatcgacctgaaatttttcaaaaatgaattcttgaaggctgggaaaaattttctggaaaatccgttaggtaaaacggaatgagcacaaaatttttcacgaatttcatatttccttaccaatcactcataaataaattttaaaaagttttaatcgatttttaagggtgtgagaatttttgaaaagtctcggattttgtgtttcgcggttttcggactcggggtaagtcgcgaatctcaggaagttttcggtaagcattccgattgatcattctctactccagcggagataattgatgaaaatttccgtgatgaactggaaattgtcattaacaatatctaattgtgtgactaaaaaatgacagcctaaggcgagccgaaaattgttgtgccatggcatttatttggttggaccgcgaatatgccaagcttttaccgtttt

SEQ ID NO: 41331 - DNA, 945 bp, Heterodera glycines
  unsure (1)..(945): unsure at all n locations
aaaatccccgaaggccaaaaaattgacgaattttcaaaaatttntaaaaatccaaaaaaaatctgaaaacganatacaaaaggtcatattcgtgctcagcacctcaaaatatacnccagaaaaaaatttntcacccccattttggcccacaaaaaaannaattgaaaatttctagggggcctagctcgaaaatttttgaaaatttgagaaaatgaagtacaccgttcgatagagcttaaaaagctctacaattttgctctaaggcattttttgtctaaaaccgacccnctgacgagttatgggcccgggactcaaatgtcccgctcaggccaaaaaatttttctatttccgggaaaaaatcgaaattttttcaaaaatatcaccaatcgatagagctagaaaaactatgttttggaagtggtcttcgtttttctgggaaaattcgttaaaaattcttaaaattcaaaaaccaaaaaaccgttttttaggcctagctcgaaaaattttcaaaattttcgaaattttaaaatttagaaaaatcgagctttcgaagctctacaataagtctgctggccaccctgcgctcaggtcaaagcctaatgagttattcaacggggactgaactggacaaatttggtactgaatttttgtagaagcacacaggccatggggttagagatagaggcctggaattttttttaacatttagccaacacttcaacttagggccctcacagcgggaattttttgatccgagttttaaaaaaaaagttacgggccctaaactgcaagaaaaagtgagaaatcggtccccgggactcagtcgtccgcgcagaatttttctctatatttttcccggatgcgccgtgaaaagttgtaagaccaatgcacaactttcaaacccgtcccgttagccattcccgagaaattggttttaaggatgaa

SEQ ID NO: 41332 - DNA, 1590 bp, Heterodera glycines
gctctcaaaatgcatacgaattattagctagcggttaaaaagctcgtagttggatctgtgctagccgtccggtgcacactttgtgtgttactggtttggttggcttttctgccggtctttccccggcgttggcctttaccggtcggcgtcggtgggctggcgagtttactttgaacaaatcagagtgcttcaaacaggcgtttcgcttgaatgttcgtgcatggaataatagaagaggatttcggtccgattttattggttttgctgaccgagataatggttaacagagacaaacggggccattcgtattgctacgtgagaggtgaaattcttggaccgtagcaagacggactacagcgaaagcatttggcaagaatgtcttcattaatcaagaacgaaagtcagaggttcgaaggcgatcagataccgccctagttctgaccgtaaacgatgccaactagcgatccgccggcggatttattcgccctggtggggagcttcccggaaacgaaagtcttccggttccgggggaagtatggttgcaaagctgaaacttaaaggaattgacggaagggcaccaccaggagtggagcctgcggcttaatttgactcaacacggggaaactcacccggcccggacaccgtaaggattgacagattgatagctttttcatgattcggtggatggtggtgcatggccgttcttagttcgtggagcgatttgtctggtttattccgataacgagcgagactctagcctactaaatagttggctcattgcttctgtgggcaaacttcttagagggatttttcggtgttcagccgcacgaaattgagcaataacaggtctgtgatgcccttagatgtccggggctgcacgcgcgctacactggcaaaatcagcgtgcttgtccttccccgaaaggggttggtaaaccggtgaaaatttgccgtgattgggatcggacattgcaattattgtccgtgaacgaggaattccttgtaggggcgagtcatcaactcgctctgaatacgtccctgccctttgtacacaccgcccgtcgctgcccgggactgagccatttcgagaaattcggggacggttagtgttccggcttcggtcggtatgcagactggaaccgatttaatcgcagtggcttgaaccgggcaaaagtcgtaacaaggtagctgtaggtgaacctgctgctggatcattacccaagtgattcctattcaccacctacctgctgtcctgttgggctagcgttggcaccaccaaatgcccccgtccgctgatgggcacaggtcgttcgagatgacttgtggacgctgcccaacattacggggcagctgcctcacgagccatgcttttggggtgcttccatacgttggagctgtggtataccgctcagtgctgcacgtgtgaaagcctgtgtatggctgctgcgtggcaatgtgtcggtggcgggccgcctcgcttggctggttcgctgcgccaatgtgggatgcacgctcgtggggcgacctaacggctgtgctggcgtctgtgcgtcgttgagcggttgttgtggcaggcacataacacactgac

SEQ ID NO: 41333 - DNA, 977 bp, Heterodera glycines
  unsure (1)..(977): unsure at all n locations
atttcactagtagggatcggatttatagttttttcactattttttatcctgagttccccatagcctgaaatgcacgaaaggttgttaagctacttttcgagttattagcaactattttatagttttttatttttagcaactaaaaaactataaattttttgaaaaaaaactattttcaattattttggcgttttgcctaaaatttgttaacaaaaatgcaataaaaaggaaaaacccacccctaaggatcaactttttgaaaattttcaaaaatacacccctaagaatagactcaaaaaatttttcaaaaatgcgcaccacaatgaaatgaaaaatttctcaaaaattcatctccaaatttatttatttattttcttgacattaattctattttaaaaatttttatctcaataatgatttgtcttaatattgtacctttttttgttaaaattttacgatattacacccctaaatttgaaatttttagcaactatttacccatttttagcaactattttgggggttttttagaaactaaaaactaattattttggcagtttttagcaactataaatccgatccctaagaataacaaaatataattgtttcttataaatgaaataaatatcaaaaaaagtgcaaggtcgaacctaaaaagtaacaataaaatcatattttattttattattaattttatttaaagcagccttggcctaaaaaaatcaataattgatatataaattaataatcagttaaagtttcatttttaaaagatattttaggtctatataaattttctttaaactaaattaacgatcatatttcttgaataatttcatacggcataaataatgctacattcaacctgataaaaataaactttaaactgttcaacaaaatatcaaaataaaaaatattatataaatttagatttttcaaaataatgtataaaaatnnaataaaatcaatttacaaaa

SEQ ID NO: 41334 - DNA, 1068 bp, Heterodera glycines
tgtgaattttaaaacaatttgttaagaaaattgctaataatagagcctgtgaagggctttctaatgatagcaagattgttggatttggtcgacaacttaaaaagttatattgactcaattttggccagacggagtttgcccgttccggtctatcggcaccgcggaccctaaacccttacttttcttaaaaattagctcaaaatcgcaaaaaattggcatttttggacaaaatctgttcataaattgcactctaattttctaagttttccccggcgtcgcttatcgacactagttggtacatatatcactttttgaaaaaaaaatgttttttgctttcaaaaatcaccaacgaaaaattgtttcctaggattttctgattcgctgatcactaatccggcatccatttcgaccaattcctgtcttgaaaccaaattcgaacaaaaagtcgaaaactcaactttttagtcgtgatcagcagggcttccttttttctgccgttgctcagcaatcgttgagtacatccgaactagtgacaaataatgacataattttcatccaaaaatgagcaaaaaaattttttattcactttttgcagttgcaaatgaggtacatttcctttagaatagtttcttcgcaaatattattctatcagaaagtgtgctttttttgtataaagcaaaaaaataaataaaattttatttcctataatatctttcaaggaaggatgggacaacactttgaactagggttgcgtccccgaccgtcggggttggaaaagtcggggttcgggtcggggtcgacaaaatcgttcggggtcggggttcgggggttttcaatttttgccttatagcataaagtcaaattttttaaattattttagcttaaaattttttattattcataataataattttatgtacttttttatttctttttatcataaatatttttgtatagaattaattaaaacgataaggcatttttaaatgaacaattttcaatgaaaatctgtaaaaattgtcaaaatttcaaatttttcctccgggccggacccacaaaacctatttt

SEQ ID NO: 41335 - DNA, 1344 bp, Heterodera glycines
  unsure (1)..(1344): unsure at all n locations
tggaaatttttattttaaatggggttttggctgattcttggtgcaatttttcgtgatttaaaccggctcaaaaaccggttttttgatttttccgcacctcgggaatattttttacgatgattagaagtcattagagattgattggaaccctttttgggcggtttttttttgcgggcccacaattctatagtaaagcctaatttataaacatttgagttaaaattacttaaacctattcaaaagcccacccaaaaaagtgcaaagcaacaaaaatttttaacttttcttttatgcctttcaaatataaaaaagattttaaaaatccggctgggataaatgggcgctggcaaatgggcgccagcacggttttttaaagtcatccgaactaatgaattgatattatatgtgttctctaataacctgcaaaatttcaaaattgtatcttaaggtttaaaaaaaaattattactaaaaaaacttccaaaaaactggcttttcctaacattatttggtcataacttttttggaaacataatgaattttttttgaaatttggcagattaatagaagactctttctcttacattaggattttcaaatgataacaattaattcggttatacaacaactattaaagaaattatactccaaaaacggggtggcgcccatttgtcctccaccaaaaaattgtctaactaaacttgaatttgcaacaaacattgactcattttcaaaatgattctcataaaataccgaagccactggctataattgaattgattgccaaaaacaacccaacagtattggccataagaatctgtataattactctactaattaatcattatacttcattaaataaattgtttgtgcctcataaaaaaaatttctcagcggcatttgctcagcagtggtcgaaggttcggcagaggcggtccctccgatgctttcgccgattcatccacaacacttaatgaacgcgtccgggctcgactaatggtcaaattggccgattttgagcagcgaaatgtgcgccgaattggcaccaaagcgacggcatgcttttatcggggctttattgggcactcccgcggattaagacaattcaggaaatattttacaattttctgagtctttttggcgtacgttgtgaaattcggttggttctattgcactttttgagtccaatcaaaattttatgatttaatcaataatcctatatttttggaaagtaatttccgaacaaactataaatttttggtatcatttaaaacacaaattctaatgacgctagaatatacaaaactntaattttanacaattgaaaaaaaatgattacttaagc

SEQ ID NO: 41336 - DNA, 1147 bp, Heterodera glycines
aatttttggctccaccaaaatgcccacgttgtcccgtctcagctcactgcttgctgtcctcttctcggacaatgtcattcggtttgtgtagagaaagggggagatagactgttacgggatgggatctccctgggttttttacccaaaaaaaatttttttttgaatttgcaatttagggattaatccatcgggatcccatccgcaaattttttttattccaatccagcagcggaatgagtattataaatgttttatttttcaaaatttttagcgttggctcgaaaaatcaggaattatagcggtcttgcaccaaaaaatgacaaatttttacaaaaaaaaaaatcgaggggggggggcgggcacgtgcctccttcgctttcccctggatatgggcctggttttattacatttttggcatttttaaatcctttattaaacgatcctccgtcttaaaggctttacgacgtgtcatcggcggtcgacagtccgttgattcaatttgatttcaatgcgttgttgccagaccgaacgcctgacgacagtgaggcgagtggagacgaatttggacgaggacgtgcccattctacgcttggtttcatcactcaactaggtacatttctgatcaaataatttgccatattcccagatttctctcaattagagccccctgaaattttttaaaaattttcaaaagaaatttcatgaattttttttttgcgatttttagtaaatttttacctcaaattaattaattcatttttcagtttcttttgactttggaccccctcaatcggtggatggcaatcggacagtgctcggctctcttctcgcgttggattcgaatggccaactttacgccacacttttcccctttgatgggattgggttggaaatttattttttttaattcaaaaatttttaatttaaggccctgtgctcctccgaagggtcccctgcctttgtttgccttcccggcttcgtctcagcaccgtttgctttgttcttcgctcgatttgctgcacattcgtcatcacttcggtgttcaacactttttgttgtgggttatggcatcggaggacggactgttgacccatttcatacttcccatggttagaagttggcatttttcggtttggcacccattttt

SEQ ID NO: 41337 - DNA, 1400 bp, Heterodera glycines
gtgacccctgaaactttaaaataaaaagtcattcctaattgttggcattggcaccaccgccacagcactgatacatttggacaattaggaaatgggaacaaaaatcaaaactgatgaaaaaacaatgtgaatgacgggtttttattaaaaaataataataattaaaattagaaaacttaaaaaaactgctctcataaaggaaggtgtaaattttttgcgtaaaaaatagacatttgaacatgatggacagggagaatcaatgaaaattgcaccatcgattagtccgatcgatcaatattcattcattatttgatctcgctaccgacaatcccgaaatgccatcgctgtgatgcccaaggaatggccctggtacgttctgaccactttgcacgcgttcaactcccacattcggagaatgccatcagacgaagcggtcaccatatgctggaaaaacaaattttacatacatatttcatgaatccatcaagaaaatattacgcttgaatcgttggtaaatgcgcagtcccaaacccatttgttgcccggcactgagtaagtgttcaactgaaaacaaacaacgaaaattgatcaatccgacgacaactcagggcacggtgaacaattaattaattactcctcacacaaaaataattggttgtactacgtctcccaccccccgccccgttttcccgcgagaatttgagggggggggggcgagctgatcccgaaataattttataatttacgaagtttctaaattcgtccaaatgcaccgaccagcttgtgcgtgttgctgctgcaactccacagtttggcggtttggtcagctgatgtggtggccaccgcgagtccgtcgggtcggaaacggcatttgagtccaaatgtgttgtgtgcccgcactttggtgcactggtagtggtgctttgcggcgccagtgccgggcattgaaaggggcggcggcgacggacgcatcggttggggcacggccaacggcgtcggatggtgtggctgtacgtgttgagcatgtgttggtacaacgacggagtggtgatgcggttgctgatgatgttgcaattggggaaggtgatggacgagatagggttgcactgcaaaaaaaacacattttgagaatgcgacataataaatacccacaaaattgtccggaaaaaatcccggaaattcttctgaacaagattttcactgacaaatcagctttttttaatcttgagcacatattagacatacgggtgcattaagtacgttttcaacctcacggataaattcacccgtatcgtttccccccaaccccgtaaattttttttaatttttgcaaattaaaaaaaaaagtaattaatcataaaatgtggagaaaacgctaaaaaatttttaacacattctaa

SEQ ID NO: 41338 - DNA, 819 bp, Heterodera glycines
tgccgtgccatcattccccgatcgatcactcaattcccctccccctttggcttcttccccccccccattattcgctttcgctcactttgctgtggaaccctcgccagcaacaaaaggtcatttcggctgtcgtcgctcttcttttgcgaattctccgccgttccaatgggagggaatggcgaattgaactgatggaaaaggggcggcggaggagggaaaggaaaagcgactgaaaagggaaaatgaaaggggaaaagaaaggcaatgaaaagccatgccctcgggcggcggagattggccaaagtttggggcggaagaagcgcaggggaagaacatggaggaggaggagggagctgaacggaagggaaagcacttccgatctacggacagaagaagcggcgacttccgccctcccccccgctctcgacggactgtttcactcttccaccggtgacggagcaagacgcaccccccccccccgcaaacacccttttgccttaaccattcatttcattttattttcccctccatagccattagcttaatccgcatccattaggcgactttcagaattctctttgccagttagcgccgtgaaacatttaaggtgccatcgacggacttttggcatcgtatgtttcaaagtctctgagacttacttaagcactaacaaataagtgtgccatcattcgaccggaagaacttgtttttatttaatgttcttttaagcggcatagaattttgttttagtgagtgtcaatacagtaataggtgaatagacggaacgcgtaatcaagggcgtatccagggggggggggg

SEQ ID NO: 41339 - DNA, 470 bp, Heterodera glycines
tatcacatttaataaattcctttaaaattttctaattaaaaaatatttaatccagtatttttcatttttccatcaattaagaggcgcttctcttttccatttctgctccgcagctatttttttattagcggtgacttgtatcaccgtggctggcagaaatggagagaacaaaaaaaactgtttgtaatttgtttattggacaagtcttttttcaaatttaatttaattattaaaaaaatacatttgtattttgtacttgtaattttagtaccggaaatgcacattttccgttttgaacttaaattttagttttttttttcggttacgtttttttttgtattttcaacaataattttgctccgattgcgttttttttgtaaattaaatttttttaacttttttcgaaatttcattatgaatactacttttttaacaaaataaattctttttaaaaaattttattgaaaaat

SEQ ID NO: 41340 - DNA, 988 bp, Heterodera glycines
  unsure (1)..(988): unsure at all n locations
ttgcaaaattaattcataaatattttttcagaaaatgctctgaaacgcatcaaattttatttacatgctagtttaggcactctgatgcttttactatcaaaaagggagatgaataaaatttttaatttgctttttaaacatgccaaaaagtttaggcttacattaaaaaaattttcttcggctctagctctttcaataagcaataaaatcgtaccaaattttataggcatactccccggtacaggactaacttaacctgaaaaaatgacaattgtaattgattttaaatttttttagaaatttgagtttttaactgtttattattttttgcaaaattaattcataaatattttttcagaaaatgctctgaaacgcatcaaattttatttacatgctagtttaggcactctgatgcttttactatcaaaaagggagatgaataaaatttttaatttgctttttaaacatgccaaaaagtttaggcttaaattaaaaaaattttcttcggctctagctctttcaataagcaataaaatcgtaccaaattttataggcatactccccggtacaggactaacttaacctgaaaaaatgacaattgtaattgattttaaattttttagaaattctgagtttttaactgtttatttatttttttacaaaattaattcataagtatttttacagaaactgctctgaaacgcaccaaattttatttacatgctagtttaggcactctgatgctttttctatcaaaaagaaagatgaataaaatttttaattgctttttaaacatgccaaaaagtttaggcttacattaaaaaaattttcttcggttctagctctttcaataagcaataaaatcgtaccaaattttataggcatactcccccggtacaggactaacttaacctgaaaanatgacaattgtaattggagttttaatttttttagaaattctgagtttttaactggtttattatttttt

SEQ ID NO: 41341 - DNA, 519 bp, Heterodera glycines
tctcttgttttctcgtattattacattattcagactttgtggctttcgaatgataccaaaaagatagggtttgtttgaacatgaacaaagttattgtataaaaacccaggtattgtcaattgattggactcataaaggtcgctcataaagtgcactagagccgataattttgttaatttcaagaaaaattggcaatcatgtcgatactaaatgaggaaatatataaatgaccgtcttctctcccactctctcttccaccctcccaggcttgtctgtgactttctttctttcaatcaggcctccatttcgaccaatttcaaacccctaacccgaattcgaacaaagtcgaaaattaaaatttttcgatttttagtctaaaaatagtttaaacgattttgttgtagcactgatgagtatcagtgatgactttcagtttgttttcgtctgtgtaaacaaaaggtggaacataaatttgaaattgaaagaacttgaattttcgacttgttgttataatttgag

SEQ ID NO: 41342 - DNA, 724 bp, Heterodera glycines
cacggcgagtcaattttggactcccagtgcaaataagtttattatttatttagtaatcagaacgccaaaactgcaaaacttaaaatttttggagattttcccttgtaaaaatagaagagccgatctcgacttagaaaatatactttcaaaaaacaaaatagaattcgatagaggtgcacaaaatatggatctatgcaaaaattcaagaaaatctgaccctaggaaaaattttttgaccttagtttttccatatttctctcatcgatatgtaggaatgaatgaacacaaaataaccaaaatttgcaatattctttaatttttccccttttcattatctgctctttattcattcgaacgaattaattaatcatgcatttaatattaggaaacagtaacttaattttttgattgcaccgcttccacttaattacctacccaaaaacgtggcttttttcgtttgtgccaactgcaaatgtaaacaagcttttcggacaccacagacatcgccttccaaaccaaaccaccttatgactgagtcggttgagtcgtgttcatcgtccaatttcgtttccgaaaactcaaatttttcttcaccgacgggagaggaggacgtggagggcgaattttacgattttaacattgacaaatttgtgcaagaattaattaactctgccgtaagagaagcaagttgcaattgtgcagaaaacgtacggagaaacagcac

SEQ ID NO: 41343 - DNA, 1072 bp, Heterodera glycines
gaaagacgcgacgcagagggtgccattttgggatgggaatgtgttggtctcgagcacttgactctcgagaccagtctatgaaaagccgtggggcgtttaaatgtttaacgcacttgaaaatcgaatgtgaaaaaaggctcaatattaaaatttgattttggtttattatttttttaattattcgtttccggtttttatacatcaatttaaatgtgagtcgagacccgattcccgaagtgttatagacgcgaaaacctaactaccgattttctggcttaggggatcaaactcagtagtgttggggggtgccgagtcataacttaatttcgataaaggcttgacatcgttggcgcacgctgtcctgtctaaacacgtggatgtgatccgtttgttggtggagagcggcgccgacgttggcgtttttgacaacgaaactctgcgatcgccgttgacgattgccatcaacgagcaagaaaatttgaacactgagattggtcagtcagcaattaaaggcagtgaaatataaatgttcaaaaaatttgggttttctttcagaaatttttgatttttatggtttattctgcgaaaagttagtgttttcgaatgacatatttacattcatcgaaatatttcaataaaaaagaaaaaattcaaaattaacaggggatcatttttaaatacataggtcaacaagaaaagttaaaaattatgaactcgtctttgcctgaattttagctaattaaggtttttctgggtccaattaaatttttttcaattcagttcgtctgctcgttaagcctggcgctaacctaaacagcgcggacataaatggacggaccccgttgattttggcgaccagcctcgaaaatgttgaaattgtccgtttgttgctggacgccggagcaaacccaaacattttggacaacgaaagttggcccatattgaattaatttaataaaattgtgtttcccccatatatttattaacccaagtttttatttatgatagatcaaactgcattggattacgctgttttgtcgaacatgacgggctcattttgcttctggaggat

SEQ ID NO: 41344 - DNA, 804 bp, Heterodera glycines
aatcactgcaatatgcttatttctaaatttatgtacctctcctattattaccattaaaattctgaatctacaatttttcttggctccaataaccaaccaccgggcgcctcctgaaactgtttttcatcgttcatctttgtttggttcttcttactctattcccgcattttttatttgtggcacacaaactctggcaaaaacaaaggagttgatggccccaaaaattcagtatttaatcacttaaatctttcttcccaatcactgcaatatgcttatttctaaatttatgtgcctcttctattattaccattaaaattctgaatctacaatttttctgggctccaataaccaccaagcgcctcctgaaagtgtatttcatcgttcatctttgtttggttcttcttcctctattcccgcattttttatttgtggcacacaaactctggcaaaaacaaaggagttgatggccccaaaaattcagtatttaatcacttaaatctttcttcccaatcactgcaatatgcttatttctagatttatgtacctcttctattattaccattaaaattctgaatctacaatttttctgggctccaataatcacctagcgcttcctgaaagtgtttttcatcgttcatctttgtttggttcttcttcctctattcccgcattttttatttgtggcacacaaactctggcaaaaacaaaggagttgatggccccaaaaattcagtatttaatcacataaatctttcttcccaatcactgcaatatgcttatttctagatttatgtacctcttcta

SEQ ID NO: 41345 - DNA, 620 bp, Heterodera glycines
ctttacgatgtaactctctataggtctgagtagagcagcgcgggagcaggaattttgcccaaaaccgggacttgccgggacctgagaagccgggaccggaacctcgattttcgtgcgggaaccgggaatttttaaaaattaaaaaaattcaaatttaatttattcaagtgaaaataatacaaaattaaatttttaaacaaccagaacaagatttaaaaaacagaacaaacattataaataatatatttatgaattcgaacgaaaaaggcaacaaaagacaatgagagagcatttatgaaaataaatgaaaaaaatccgtttccaattggtgagatcgatcatttcacaaatataattaattcacttccgcacaatttgacattttcacaaataatcactcattccgctgatcattgggcccggaagtcgtcgagaacatttcatcgttgctttgacccgcttcttccgatggtggcgacaatggcctaaatgattaagtgcacttttgacttatttaaacaattgaaatgtgtttttttttgctcacccaatgcattgtttgtcaattttaagcataaattggacattgttaaaatttgcatccaaattttcgtcttccc

SEQ ID NO: 41346 - DNA, 1286 bp, Heterodera glycines
  unsure (1)..(1286): unsure at all n locations
gctactcccgaaggattcggtctccccataaatctgggcgcatcggttcggggggactgccccgaaaacaaaaaaatcgattttttcaagtgtccgtttggggtactcaaacaattatggggagcaaaaatccatcgcagaattaaagtacaggctatagggaagctattcccgaaggattcggtctccccataaatctgggcgcatcggttcggggggactgccccgaaaacaaaaataaatcgattttttcaagtgtccgtttggggtactcaaacaattatggggagcaaaaatccaacgcagaattaaagtacaggctatagggaagctattccggaaggattcggtctccccataaatctgggcgcatcggttcggggggactgccccgaaaacaaaaaaatcgattttttcaagtgtccgtttggggtactcaaacaattatggggagcaaaaatccaacgcagaattaaagtacaggctatagggaagctattcccgaaggattcggtctccccataaatctgggcgcatcggttcggggggactgccccgaaaacaaaaataaatcgattttttcaagtgtccgtttggggtactcaaacaattatggggagcaaaaatccaacgcagaattaaagtacaggctatagtgaagctattccggaaggattcggtctccccataaatctgggcgcatcggttcagggggactgccccgaaaacccaaaaaaaaattttttggataaaaattatttaaatgaactgactagataatatttaaaataggttatttctcttcctttcagtatccctgcaaagtttggtgcgcttctgatcagtttctgaaaaaaaagttaagcctaaactttttggcctgtttaaaaaggaattaaaaatttttaaaaattttattcatctccctttttgatagaaaaagcatcagagtgcctaaactaacatgtaaataaaatttggtgcgtttcagaaccctttctgaaaaaatatttaagaattaattttgcaaaaaataaataaaaacgaaagactcagattttcgaaaatttttttgagccagctagctcggcgctcatttcagtgtaagttagtcctttaccggggagtatccctgcaaagtttggtacgcttctgctcaattagcaaaaaatatgagtgatcgaattttcactaaaaaagttaagcctacattttttggcatatttaaaaagcaatgtcncgtttggggtactcaaacaaattatggggagcaaaaatccaacgca

SEQ ID NO: 41347 - DNA, 1102 bp, Heterodera glycines
  unsure (1)..(1102): unsure at all n locations
tcaatattgggtattaantctgagtagaaaacttaagtattctttattttaaaaatttcaaatttacaatagcaaaaactttttttcttctttttttagtctatatttttttgtgagcccagttagtatttacaaaaatataagccccagggcttcatttaattatttttggcaaaatcatgacgaattttgtatgcattatccaagtttgatggaatttatgtaagaaacgtcccagccccgatttctttccatcaaatctatgtaaaatctttttggctatcatctttgtttcatatccatgtccgaattctttcatccgccgactgtcactaatcattttatcaatctgttttttttcttttgcagtaaattttacatttttctaaacttttctcttgcttaatacgtcactaggggggttggggtgatttccctaccgccacttccctaccgccatgtccctaccgccaattccctaccagccatttccctaccggccacttccctaccagccatttccctaccgccatttccctactaaggcatttgggccatttccctaccaaaaattttttgaaattttttggcaaaatttcaaaaatagaaagggtattttcaacattttgatgtttctcgtgaattataagacaataagttttttgtttaagttatagattagaaaattcaggcaattctaacacaaaagaaccgtacaaagcttcaacacaacgggcattcatacatttttcacaagctgagtgctgacggtgaagttcgcttttgatcgtgtgaacaccatcacgcaaaagacatccgttgcaaagggcgccttcacactaacctcaacaacaacgttttgcgtgaagttggaaaccaccaatgtgaaccaagtgcagctcgaatggaagcgcaacgattggagacttgacccctggaatcattgctctggacaaggctcttcccgacgaacttactcccgtccttgactggtaaattgacaatctcacaaattgtttagtatttattgttctttaattatttattaggttaatcatgaactacacgggtcgtcttaagcatgatggaagcagaacacgcc

SEQ ID NO: 41348 - DNA, 295 bp, Heterodera glycines
tgaccagttaaaataggaagtgttcagataaagaaaatcaggaagtgatcacatagaaataaggagtgatcagactgagagaaacaacataagcttgtctacccgactgaatcatcggccacccaacggctgccagcgtatgcttgagtttgtcctctttgctgagcaaaggcacaaatcgcacattttcgttgccagttaaatgatcattatcggattcgatacggtgtgactgacgaaaatggtaagtgatatgtgctgtgaagtcgacagaaaggccaatagacatcaaagt

SEQ ID NO: 41349 - DNA, 1407 bp, Heterodera glycines
ttgcgttgggataatcagtgccgggcagcgcgaaaagctccgcccccttctccaaactgatcagatttggggagttcatctcgggctgaaacagttgtgggttgcaaatgacgcgccaaaagttgacgccgagcaggtggggctgtgcccgcaacggcaagtcgggcaccaacaaattcagccaaccccccgcggcgactacgacattttcggccaaatattttccttaattctatggcatttaaactagcgtccgtcttcggcatttaatgtacaactttttgtcgtttggacttcgacaaagtgccttcctccatgccaactttgtgggtgttcgtcggcatttgccggtgccgtgatctctgctgagtccgaagcatctgttgcactttcccacggcgtaatggccaacacttgctcattgtctcggattttggccaaattactaccaagtttcacgtattgcctctgaaatgatttcgcatttaaacaataatgtcccatttggaaagacgaaaagcgcccattagtctcatcgcaattcgcaaatgatccgtcggtcccaagcactttttaattatctcgacgcaaccctttggcactgaagtgcgactgacttgaactgttcgcagacagttctcagcgagcattgtgccggcaccaggctcgtacagtgccgaccatcgttcgtcataattgtgcaaatgcgggaagcgtcgctgaatggcactgcccccacggaacacttggtgtggcacaccgaactgacgaaggaccgaagcgcgcagctgagtctgagaccaatccgggtccaatgtcaacaagccgttcttccttttttcaaaaagagcatcaaatttttaaatattaagaggagggacaatttcctttttttaaacaattttgaaatattttaatttaaattaccaaaatattttggattatcaaaatttaaattatttttacgtttttaaaatttagcatttcttggctttgctcaaaatctgataatttctccgttttagttgcacaaataatttggtaaactaaatatttatgcataaatattatgggtaatttatgaattctattttctgtacatgtacagcgcctccccgccatccaatttgtgcagtccgtcccattcccggaacgcgtcttgcgcgagtcgaacccaatggggctgactgtgagtaagccgaatgatgcgcgaggcgccgtgggaagatcccaatttgtggtccaaagcgaactgaatttgtttgcgattggatttgttcaccgataaggctgcgattttaaattctttgattaattgagccgggaattttcggcgtttcggccaaaaaatgaaattgtttaagagaatttgagacatggcgagaggaaatgttttttttaattgtt

SEQ ID NO: 41350 - DNA, 1159 bp, Heterodera glycines
  unsure (1)..(1159): unsure at all n locations
catgagtccacccttggccacnccgtcttcgaaacggcttttggcggtcggttgaccaatcggacatttcttggccaacccaatcatcnacattaagccaaaattgccgtgaacatttgctacgggcgccaccatccgcaaaattgagatgatgtacgcgttgaatggtgtgcttctgctgatgctaccaaatgcacttggttcttctccccnccactgtttgaggtgccgacatcattttcaacccttccgccactgtcagcggactcagcgaagcactttggcccatcgaagcgcgcaacgcggccatcgccaaccacgtgtttacagtgggtgaaatgccatttggaaatggcatttcttttgttggcattttgctcaggtggccatcaatcgcgtgggcaccgaatcgtttccgaatgaattcacttcgggcaacggaagagccggtgggtgggaggacattttggcaatttttgagagaatggccccattgattggttaagcccacaaggaatttggccatttctacggcagcagttacgtgacagcgccggacggaagtcggacgccggtgaaaattggacgaatttggggaggcaaaagtaattttcctccaaaagggcctctcgaggacgcgcgacggcgtactaattgtggaattggacttgaatttgtgcagacaaacgaaggactcttggggatttagggtcaaaactatcgataacattccaagtaaatccaatcttttgttgctgaaaatctcttcagatgactcaacggttggaaatgtacgcccaaagtctaagcgcagccgcagcaagtgaatatcggccgaatgtggtcaaggagaagtgaggagcagcagagggaggaggacagagaagaagaagcatttgcattgatcaaaaaataaaataaaaaataaataattgaaaaaagacggacgaataaataattcattcgagtggccctttaaaagtgacccttccccccccccctcttaagggaaaatagaaaaagaatggtgagtgaatgagtagtgagtgtgagaatatcttttttatgcatgtcaaattgcgtcacgcccccccccccccaatgtggtcaaagggatgcacataaatgcggggcatcgaatcttcgatacatttcggaa

SEQ ID NO: 41351 - DNA, 1000 bp, Heterodera glycines
tttttcaaatttgtgccctcctctgcactgctcacttggcacgttggacacaagtcgaagcgggcgaagcacgcgaaatgcccgcaatgccttgacgtcaaatgcctggatgttgatccgggaaagcactgtgctgatcagactgaaaatgatttaaaattctttgaaattgaaatttaaaattaaaaaaaattaattcccacccgataacaacaatgataaagtcgaggatattccacgcgtttcgcagataggcacccggatggcacagaaaaccgagcgcgatcactttgatcacacactgatcagaaaagggaattgaatgataatccaatttaattattggtgttgaattgattaattgttttcaaatgtgacgattggattttcaatattttttatttgttaaaaatttatttaatataaatttaattaatttttacatttaataaacgcagttaattataattttaaacgaatatttatttaaatatattttaaaattcaatttaaatgcgaaaaaataaaataaaaattttgagataattatttttttaaattaaaattattcctttttaaaatagatttatttcattttttctctgttttcttttacctctgctgtgaatacaacaatgaaaagattctccaaattttcctaaaaatatttatttatttttattttttttgtcatttttaaccgaccaaaacggtgtttttcatgtccgaatcttgcgcaggataaggctgataaacggctaaggcaatgcaattaccgcaaatcatctgaacattggaagggtgaaacaatttaaaattaaattttaaatttataaaatattaattataaaaaattgataattaaaaaaatgatgttttaaaaaagaaatattcaaatatattttgcgaaattactttgatcagaaaaaaataattatttaaaatttaatcaattattttggtgaatttaaaatgatattaatgaatttaaaattaagta

SEQ ID NO: 41352 - DNA, 1472 bp, Heterodera glycines
ttattcacatgatcgattgtttgtatttatgagatggatttggtgaaaattttgcggttttcacgcaacgcccttaatggtgatatttaatactgtttctttttggtgataattaatttcattttttttaattttttttactcatatttattatgataatacattgagtttttatcaatttatctgtgctctcacttttcttatttaaattaaaattacttttaagaaaattgtcttaaattttaatattcatttttaaaatgacgaataaactttcttctgtggccttcgcagcgaaatgttttcattagttgttttattgaaatattatttttaatattattactattatttttgcaaatttaatgcgtatttaagtgaataatttaatttaaatcgaaaatttgataaaatgagaaaatatattaatttaaatttatttttagaacattattttttttattatatttttatttgttagaacattaaaaaatttaatttttacgaaattcaattttgtaatttaaatattgttttaactttttaactattattttatcaaaattgttattatataatctaatattcctcagttgttgaatggtatatgaagaaaaatttggtttttaatttacttgcaaaaatgtcgagagaaattaacatttgatttaactttttttaatttttaaaattatactaattataataactatttacctatttacttcatttcatttattaaattattgcaaaaaaatttaaatcttttttgctcttatataactcatgaaacggcatgtatctatttcagcagtgtggttgtttaattaaaaattattcgaaatcttatttaatgttttttattcaataatctaaatattcaaatttcaatgtctttcaatagtgaaactagagaatatcaaccgtaaattatttgtttatgctcaaatttttaaattttgaatttttaaattatttttgctttgttccaatattccgtcaattcttgtgtttgccttgccttaaaacgcattaattaactgaatgaaaatttggttttttaaagcgactcaaaaagcacatcctcgaaagcaatttggagggtcgaattactgtgagattaatgatcaaaaaagttaaaagcattaaataaacttattttacaattaactaaataaaaagttataaagtaaataaaattataacaattaatcttatttataaataaaaatttaaagctaataataatttttcgccatttcgaatctaaattaaaatatataaatagatttcttcattattttctaatacttttgcttattgtatatttatcttgaacagttgcgatagataaggcaaaaaatgcatattaaaattaatttatgtttaaaaaatttgtggttttaataatttatattcttgaccgactattttaattatgcaaatatcaattatatttaatgaatgatttt

SEQ ID NO: 41353 - DNA, 1216 bp, Heterodera glycines
  unsure (1)..(1216): unsure at all n locations
tttttttctagggtattttgaggtcctgagcacgaatatgatgtttgttttacgtttcagaatttttggaattttttaaaaattcgaaaatatttttaatttttttggtccttggaaatttgggttagaatgtgaaaattcataactcaatgaaggactgctcaatttaagtgaattaaagctttaaaaatagcaaaaaatcgggagaattttatgagatttatttggttttataatgttcaaaagaaaaaaagttattccagaatttttggaaattttcgatttttcagaaaaaaatttatacctcggttctgaaaagtcattagggaagagtaaaatactacaaaaatccgcaatttttttttaggggttatttgggccgctgatcacgaatacgtgatcagattttacttttgacatcgttaagacctcagaatccctgtgtgattggggattctggggcttcattttgaggggggggggggggggggggaagttcggagcgggtggtgtaccattatttttctttgtattttttgggttaattttcattacttttaataaatttaaatgtttggttttattaataataattttttttagtttaatttaattattttttgatgaataatgattttcatttaaattatttattatatttaattaaagaatttcagcttttattttaaaatttaattgtaaaatttttttcatttcaatttaaataactattcaattattatacatttcataatttgtttttcattaataaaaagtgtattatattttaaaaaatgaaaaatataacacatcgattttttatctattttgattaaaaacaattacataattaccgataaatgctctatttgaatgccccctttctaatnantgttgtanntcttttaatnanagttgtanntcttntaatnnnttttatatntnttaatnnntgtgtgattgnnngtntgagttnaantaaattttaaaaangggngngaagngnnngnnnaagnnnaataaaatttgaaaaangggngngaagngnnngtnnaagnnnaanaaaattttaaaaangggtgagaagngnnngtntaagnttaataaaatttgaaaaatgggtgtgaagtggttggttaagttcaataaaattttaaaaacgggcgcgaagcgcccgtccaagaccaacaaaattttaaaaacgggtgcgaagcgc

SEQ ID NO: 41354 - DNA, 1034 bp, Heterodera glycines
  unsure (1)..(1034): unsure at all n locations
gttccaaaattcgcaccacattttactgtgaaagtccaagtaccttaattggacaactacgtgtcaatgagcacagtcgccgttgnccagttgtganacagaaaaatgngatatcagatggggtgcgtcccatcctaaaaattcctcttttcgtctaaccatccctcccttattgtgcactatttcgttttaaaaattgggaacatttttttgtttgtttttttgaaactaaaatgtaaaaatttaatagaattatttttgattttaaataatgcttctgtttcgaatcttttgactctaagaaattaaactataaaatttagaacaattaattctctgaagtttttaacttggctttagcgtgtttttaagccccgccgtgaggcgggacagttccaaaatttgcaccacattttactgtggaaagtccaagtaccttaattggacaattaattgtcaacgaacacagtcgcctttggcctcttatggagcagaaaaggggaaatatcagatggggtgcgatcctttcaaaaaattactcttttcgtctaaccatccctccctttttgtgcactatttcgttttaaaaattgggaacatttttttgtttgtttttttgaaactaaaatgtaaaaatttaatagaattatttttgattttaaataatgcttctgtttcgaatcttttgactctaagaaattaaactataaaatttagaacaattaattctctgaagtttttaacttggctttaccatgcttttaagccccgccgtgaggcgggacagttccaaaatttgcaccacattttactgtggaaagtccaagtaccttaattggacaattaattgtcaacgaacacagtcgcctttggcctcttatggagcagaaaaggggaaatatcagatggggtgcgatcctttcaaaaaattactcttttcgtctaaccatccctccctttttgtgcactatttcgttttaaaaattgggaacatttttttgtttgtttttttgaaactaaaatgtaaaaatttt

SEQ ID NO: 41355 - DNA, 1593 bp, Heterodera glycines
  unsure (1)..(1593): unsure at all n locations
catggtcattcatttgactttgctcagctgaaccaaatgatgcatcacttcgattgaataggtctcaggtcacccatagattgtcacatttttgttggttttgtttgtttttatctcctcaagttcatccaatttctaagaattcagtcctaagttaattgtaatactaaataagccaaactaagcctaagcgagttatctaattaaagtgttattgttgttgtccttttcttccgataaagttctctatttattgtttgtgaatggggtttaatcgttcatattttggtattaatatagaaatgaaaacgatggaattctttgaacaggcaaataaaggcctttgattatacggggagggatttgtcatgtttcaaacgtgttccatttttaccgtatttttaacttttctcttgtctaaactgcctaattttattcaatattctggcatatctcaacgtatcgtcatggtaactgctgggcgaaaggaattcaatgaaatgagttggggtgaagccgatggacagcggagaatgggcgggggggggggggagagagaanccccagccaccgttgtttgggctgtgccagcggccctcacctcacctcattttcgcttggcccgagtccctccatcaataaataatatgctcacttttcccactaacactgccggaaaaggaagatgtgagcgagtttttcaccttttcatacttcgaccacaaaaaaacaaattttgctcaccgcctcgccgaatgtttggactggcggccgtaaaaagggcaaaggtggaggaattatgccaacattttccacacattttcgcagtttgcttttcgtccttcctttttttcattggcatttcattcatccgattgtcctaaaaatgatgcggttgttggcttatttccatctgccgctgctcacctctcttccggccctttattatgcattattcattcacccaccactgctggtgccttccatccatgccaattgtgccgtgccatgaccattcaatgtttggtccgacccgtcccattttcactgctcctcccaatgcttatccaccatagagcatttatctgttgtcactgaccaaatttatccgatgccataagcttcccgtcatttccatgcataaaacaaataccaatttcgcattattttaggaacatttgcatttttatgctgctgtaattctgcaaatgtccgaggaagttgacagacacatcgtggagcgttacgaaattcaaaagagactcgggaagggtgaggagtaatggacgttttttgtgggtggtgaattggtccctttcaggagcgtatggcattgtttggaaggcgattgaccgaaaaacgaacgatacaattgctctgaagaaaatcttcgacgctttccgaaatgctacggacgcacaacgtacatttaggtgaacagaaggcgcggaaggacagccattaaataaataaatggaacatgaaaatggaattaactaactacggttttcagagaaataatgtttctgcaggagttccggacggnacccaaacatcatcaaactgttcaacattctcagagcggacaatgac

SEQ ID NO: 41356 - DNA, 1039 bp, Heterodera glycines
aaagacaaggaaaagagccgcgaagcggccgagtgagtaccttcggtgcaggaaaattattaaggaagagagttcattatttatttgttttttgcataattaattcataaatatttttttcagaaactgctctgaaacgcaccaaattttatttgcaagttattttaggcactcagatgctttcactatcaaaaagggagatgaataaaaaatctaaaaatttttaattgctttttaaatatgcgaaaaattttaggcttaactttttttttataaactgatcagaagcgaaccagattttgcgagggcatcaaaaagacaaggaaaagcactgctatgatgctaactccagtaattctgaatttaaaatttttcattaatttttaaagcttcattacttttatttttttagcaaaatcaattcataaatattttttcagaaactgctctgaaacacacaaaatgttaattaaaagttaaataaggctctctgatgctttttctatcaaaagggagatgaataaaaattttaaaaatttttaattcctttttaaacaggccaaaaagtttaggcttatattttaaaaagtttcatcgaacctagcgcactaaaatcgatataatctctccaaattttgcaggccttctccattgtaaaggactaacttaacctgaaaaaatgccaacgcttgttgtttttaaaatttttcgaaattctgactttttcattaattatttattattttgcaaaattaattcataaatattttttagaacgtgctctgaaacgcaccaaatgttaattaaaagttaaataaggctctctgatgctttcactatcaaaaagggagatgaataaatattttaaaaatttttaattcctttttaaacaggccaaaaagtttaggcttatattttaaaaagtttcatcgaacctagcgcactaaaatcgatataatctctccaaattttgcaggccttctccattgtaaaggactaacttaacctgaaaaaatgccaacgcttgttgttttaaaat

SEQ ID NO: 41357 - DNA, 892 bp, Heterodera glycines
cggcagacaacagatgcatttcaaacaattcaacaatattatataaaatttaggcaaaaatttttgttccttcctctttggaaatggtcttaaattttgcttgtaaatattcagataacaagttttttttactgaaaattttttacacactacaggatgaaacgcaataaataatgtttgtagacaaaagaaattggcgaaaaaaattgcctcaacaatcagtggtgaaactgaaagaaaaaaacttccccaaaaaatcggagcttttccgacggcatcagctgcatttccaacagttcaacagtataaataaatattaggcaaatgaaaaatttttttccttcctctttagaaagtgtctaaaaatttttgttgttaatattcagaaaacgtgttttttttactgacaatttttttcaagagaaggatatgaacaatcacttataaggctcatgcttggagataaaggaatcggaaaaaaaaattatctcaacaatcagtcgtgaaacagttcaataattcggaagcagtgccatattgggaaaagatgcacaagtagagtaggctcgaaataaaggcaactgccgaagattaacaaaaattcaaatttattggccccgttctgctttgacaggccatatctcgccagggagtggcggtagaccctttgttgatacatttgaaaatgtagagcgcgtctagctcattcgaataacatcaaactggtttgtttttgtcacgaaacaacccgctgatggccacgtcgaagaaaagtcccaaaatttgacatccataaaactccattttttcataggccagcgtgtttaaagcaaacccgaaactgataggaaatttaaattgatcataataaaaagtttatttttatttgtcc

SEQ ID NO: 41358 - DNA, 1510 bp, Heterodera glycines
  unsure (1)..(1510): unsure at all n locations
acagcacacaataccattggtaaggttcaaattgaattctatatgttcaaaaaaattcgcatctattgtattgttgctcaattcatgctntattctaaaaacaaacattaattaagggaaatgaattttttctcattttcgtcgctttttcaaaaaaaaaaaatatacaaaaaccaaaagaatgaatttccatgttgtaaaaaccaaatattaaatttgtcttccgactatattttcgtcaaatgttcgggtcggaagatctcaagtttttgaaattttattttaaatattaacttttattttttaaattaaatagataatgaaaaataaagcaagttttttaaattttgtattatttttttcaaatctctcaccgttcctctgtgcacaatcagtcgaataccgaataaaaaaatactcaatattttcatcatttttttgcaaatattccactacattggccttttccaataaattcaaaacaaaatttgccaaaatgcaataattttctttcactgaaattcgcgtttcttctataaactgtctatttcgattgttcaaacgcattaaaactgaaagtaaaattttggggtccgatgggcgcacaaaaattttggcgttttgcatttcgccaagaatttttgccatttttaagctttcatataatgtcgtagaacaattttcaggcagtagtggttgcatagaaattgaaaatccgacaaaaatttgaaaaataattaaaagaaataaatcttttgttcgcttttttttgaaattatgatgttatgctgttttaattttaaatctgtctgccaatttgagtttttaaactcattctgtgatcttttttaattggtcgaagagaaatgagtttgagtttttgtgggtttttcaaaaaaaattacaaaatttaatttttttttgaatgattttaatgcttcggcataatctcgatttcaattttctttgtaactttagttatagataattcaatttcaaaattcctatagtcaaaattctatccaaaaattggccatttttgtgaaaatctgttaaagataaggaaaaattccaattttttccaactccttaattttcataaaaaatgagtaaaataccgaaaaaaccatttcattatgaattttttaatgctcggatgcgttttacaaaatttagagatttagccttgttttaaataaacaggtttttctaaattaaatttaattttcctaccctatttttggctgtttattaagaaataatttaagatttttaacatgaaaaattcatctaaaatataaaaaaactgagggatgaggaggaaagtcatgcatttccgctggaagcgagagagaattgaatgttggcgatcaattggtgagagtttggcgtcgcgttggcaccatggccaataatgagttggcattggcatcgcccaactctgtggttggacctggcattttcgtccccccccccccactatgtatacattctcaagnggggggggggg

SEQ ID NO: 41359 - DNA, 110 bp, Heterodera glycines
tctagagtcgttgcttacagctgcagcaggcggaacagggcgatctggttgatctgcgtcagggcttccttgaattcggcattggcatcgttgtggatgcgcttttcaaa

SEQ ID NO: 41360 - DNA, 922 bp, Heterodera glycines
cgaaatgaagaatgaaaaaatcgaatgaaaatggcaaagttatataaaaaagggtaaaatattaaaaaaaaaattttttgattaaattaaattagaagcgaaaattaatttaattggcatttgctgtctaagaacgcttaaagaaatgccaggatctgcaaaattttggtaattttaggcagagaatttacagtcatcctttaaattttgtattataaaataatgatggaatttgcgagttttggtaccatgaaagcataatttgatacaaaaatttacgaaaaagtatacggtattacaattttgtaaaatttcattttggattattttcagagcaaaagtagaaagcaatcggcgggatcagccttttttcatttgaattataataaacaaaataaatggggctggctaaaaatgtggagaaaataccgcgcgcagattgtgaagaatggggggggggaggcttagggagccgatcaactcgagagtctcgaggaaaatcttcaaattttgggggtgaagcatttcggctggcaacgcagggctttagctgctgatgaaagcccaaagacaaacattggagaaccaaccgtgcaaaacggacagaagaagaagaagaagaagatggaacaataggaggaattgatttatggaattttaaaaatgggaaatttaaaaccaaaaatttctttgtattaaaataggaaatgttttttagtaatttaaaaaataaaaaagagttaaaatcaaatcaaaaatttctttgggctaaaaataatttttttttttaaagaagcataattctttgaattaaaaaaggaaaaaatggaaatgggaaatttaaaatcaaaatatttagagctaaaatttgatttttaaaataaaaaaatgaaaatgcctatttaaatcaaaaattttcata

SEQ ID NO: 41361 - DNA, 1122 bp, Heterodera glycines
  unsure (1)..(1122): unsure at all n locations
atgtatttgtatatatttatgaaataactaattttctctactatacatcgatttgtgtagtagatttagcacattttttattagtccatttatgttcggttatttaccttaaattgatgaacactttaaattaaattttaaaattcttgtttaccgccatcattcaggggtgccccgtcgtcagtgtctaaaaataatgaatttcatgaaaaatctatttttaaaattaatccgaattggcaatgatctcagatctcttttttatctttgccagcgtcgacttttcaacgttttgcattggcacaatgggggcgcaaccggactgaactgaagcagcgtgttggttggcagcgactgctcgtcaggccctctctgacgaaagaagaattggcggctgagcgggagattcgtgaacagaggcggatgaattatgaagaaagcaaaaacaacgaaatggtgacgacgcggcgtggaggcaaaatggaaaaaaactttttaggtcacaaaactttctcaattgtttttactttaactcaagaagtttagtaaacaagatggatgagtttaggcttttacttttagaaaataggtataaaattatcgtaataaccgaaagctggttgaacaataaaataagcgacttgcaaattttaggaaattttcctttttctttaataagaaaagatcgaaaaaataaaaagggaggaggggtagcgtttgtcatttctaatgaaataccgtttgaaattataaaaactccaaaaatacaaaattctgatatactttgtatcgatgttttttcgcccattaccgaatcaaaaatccgtcttattttggtttatagacctgtaactactgaacactcgaaaattttatgcaacttgtagaatcaattttgtcactaacagtttcaactgaaaattttgtcattcttggagattttaattttactaatattcactggaacaaaatggccccttctctgntcaaaataatttgacaaaatatgaaagaaaatttccttggtttttgttgaaggttacgacttaatcaaatgattaaagaacccaccagggaaatggaattttttttggatttatttttaaaaaataataaaattct

SEQ ID NO: 41362 - DNA, 1064 bp, Heterodera glycines
cacggggagtgccatgctatttctaatttaaatttgtctactaattcgttttctcactttccaatctctgattaattttggaaaaaattaactttgattattttaaatgaaatgaaattattaattttttatcaatatgttattttgctctttttttctacgggtatttgcttatttatttatttagcgataattttcagaaattttatataaattcttattgtttttttcaataaatttgtaaaaagaattaattttgattattgaattaatattattttaaaagtttagcttatttttgattttatttactaaacaattatttatcatttaaaaacaattttgacactaataatttatcaatttttgacttcaaatccaatttttatttgatataatctctttaactgttttattgttgaaaatttgaaataataataatgtatgttattttttaacatttatttaaattcaattttataattcattgatataatttttttcagcttacaaaaatttgtttttacttctattttaaaggggttaagttgttattcaaaaaacatcaatttttgccaaaaaagtttttgaaaagtatgtccaagaagttaaaaaccgttttttaaacaattttggacacagatttttgaaaattaatgaaatatttgaaattttaagttaacaaaaaagttgattaatattatgttctttaatctttaatcaaatttaattgtaactcattggcgaggcatttattgttttttttgctcatttattatttcacttaaaaatttttcatctgtcgagcggacccgaattgctttaattttttattttttaaatatgattaaatgcaataataatttattactttgtttctttaatttaattaatttaaaataaaattatttagtgtctttatctcttttttttaatctcatgacgcataaactcgttttgaggatttaagtctccaccttttcgatttttttagattcgctttttattaaaaaataaaatgatatgaagaagatttaatatgatagattttttgatttattcat

SEQ ID NO: 41363 - DNA, 867 bp, Heterodera glycines
tttgagtacaccaaacggacacttgaaaaaatcgattttttttgttttcggggcagtccccccgaaccgatgcgcccagatttatggggagaccgaatccttcgggagtagcttccctatagcctgtactttaattctgcgttggatttttgctccccataattgtttgagtaccccaaacggacacttgaaaaaatcgatttttttgttttcggggcagtccccccgaaccgatgcgcccatatttatggggagaccgaatccttccggaatagcttccctatagcctgtactttaattctgcgttggatttttgctccccataattgtttgagtaccccaaacggacacttgaaaaaatcgatttttttgttttcggggcagtccccccgaaccgatgcgcccatatttatggggagaccgaatccttcgggaatagcttccctatagcctgtacattaattctgcgttggatttttgctccccataattgtttgagtaccccaaacggacacttgaaaaaatcgatttttttgttttcggggcagtccccccgaaccgatgcgcccagatttatggggagaccgaatccttccggaatagcttccctatagcctgtactttaattctgcgttggatttttgctccccataattgtttgagtaccccaaacggacacttgaaaaaatcgattttttttgttttcggggcagtcaccccgaaccgatgcgcccagatttatggggagaccgaatccttccggaatagcttccctatagcctgtactttaattctgcgttggatttttgctccccataattgtttgagtaccccaaacggacacttgaaaaaatcgattttttttgt

SEQ ID NO: 41364 - DNA, 1045 bp, Heterodera glycines
  unsure (1)..(1045): unsure at all n locations
tttaaatacatgagaaataattacagaagttaacgaaatctttttnaatgaataaaataaaataaaatctttaacaagcatgggtatacaaaataagtttcagaaagctttacatgcttaatcacaataaaataaaataaaaataataatcaaataaattaaaattaaacaaaataaaatttactgaaaaattctaaacatatacttaaagtgaatattctgataatattgttaaccaaataataagcattattttttattattcttttataaaaaagtcatgtttgaattaaaattttaattcaataaatgttgttttaattttttacaaataacagaaaaccctaattaaaatacatagaaaaaattcataccgcaacattcgctctactctgtttaaaacaaatataaaagttcaataaatattaaaggaaaccaaccatacattgaattatataagatagaataatatatcaaattcaaaacaattgtaaaaaatacaaaaattatttacaaaacattttgggccgactagcaagggtcaacgtggccctatcgcgaacaagacacgggctcaaggtgttttgcaccaaaggtgcttattaaataaaatatcatatgctaaaataaatgcagagaacaaaatatgaataaattagttcatttaggtagcagaataaataattgttaaacctaaacaggcatgacattcaaggaaagaataaggagattcataattaaattaaataaaaaattagtagtcatttgcattgttcaaaagtaaattttaaagttaacaaagaaacaaaataactgagaattaaagtactttggaacgttaataattaaatttattaaacaaggaaaatgcttttttattagtaaatagattaatatttacaaaatattttgggcagactcagcacgagcaacagttgcattaagtaatgctcggtttaaatcacatgacagtcaaaaaagaccaatgaagaactcatatttttataataaaataacataaaaaatacttattcttttgtattgt

SEQ ID NO: 41365 - DNA, 735 bp, Heterodera glycines
tttagaacgtgctctgaaacgcaccaaatgttaattaaaagttaaataaggctctctgatgctttcactatcaaaaagggagatgaataaaaaatctaaaaatttttaattgactttttaaatttgcgaaaaattttaggcttaactttttttttataaactgatcagaagcgaaccagattttgcgagggcatcaaaaagacaaggaaaagcactgctatgatgctaactccagtaattctgaatttaaaattttttattaatttttaaagcttcactattttattttttttgcataattaattcataaatatttttttcagaaactgctctgaaacgcaccaaattttatttgcaagttattttaggcactcagatgctttcactatcaaaaagggagatgaataaaaaatctaaaaatttttaattgctttttaaatatgcgaaaaattttaggcttaactttttttttataaactgatcagaagcgaaccagattttgcgagggcatcaaaaagacaaggaaaagcactgctatgatgctaactccagtaattctgaatttaaaattttttattaatttttatggcttcactattttatttttttagcaacattaattcataaatactgtttcccaaactgctctgaaacgcaccaaatgttaattaaaagttaaataaggctctctgatgctttttctatcaaaagatagacgaataaaatttttaaaaa

SEQ ID NO: 41366 - DNA, 1176 bp, Heterodera glycines
gtggtgattcattctttcctggactgtgttcacttcttcaatattttacgtttggcggagggtcaatcagccggcaatttccggatcaactcccaggttgtcagtgggttttacgcaaaaaagggaaattcgtccatttcccttttaggctcgtctacaaatactttttgttcatgcataaactcagttacatttttggtattgtcggttacttttcactcgtctttactgtcattggaataaattcggtgttcggtaaaattaaattttctaaaaattcaaaaaaggctttttaaggaattagcagtaatctgagcttggattttggcgtgcatttgttgttttattgcctttattacggtgtgcttggacgtgatttggcacattcatccgcggatggtgtgtggtgggcaaattgcagacatgcccttactgtgagtgttggaacaaatcaaattctccacgtttttttaatcattaaatttaggcagtttggcaaccgatcattgtggctgttctgcatttgatcaatggttaccttggactggaatgagcttatttgatgtatatgcacgttaaagatgcaataacattatttattgttttaatgtattagaaatatatgtgtttgtgaaagacaatttttgagcaaggaatcacttatgtgcataaccggaattctgtgatatttaaaagtgccggagaatcactcatacacaaagacgtgtttgaacttcgtcatcggttccatggcattcgaccgcttctttgaactcctcaattttccatttccgaaagggcggcgtcgaaagcttcccacttttataccaatcgttaaagactgtacatattcgaacgttccttgagaaaattccatcgtttcggtcatcatcttttattctgttttacctccgaatgtccacaattgtaccatcgcgacatccaaaagccgtgcaaagtgatttcattgaaaatcaacgaggaagtgggtactaaacggtgtaaatgtggtaattaatatcggggtagccaatttcttttttttgtgccgttaggcgtcgccggggaaattttgaaaatttgagcttattttgttaatagattttcagcaaaaagtgacaaaattttttgcgattttgaacatgtatttaagaaaaaaattggggttttagggcg

SEQ ID NO: 41367 - DNA, 990 bp, Heterodera glycines
  unsure (1)..(990): unsure at all n locations
gggctgtttaaataggggcagaagaagacagatgggggaggagggggagggcgagagacagcctcaaacacacaactcaatacctaactaattggtgtgcccgtgttctcgacccaacttattcccttccccctcccgccactctccgaccattgtgctattgcactcatcatatgttttatgtgagactcataattgacgacccaaaccatccaatccctgataagcttctcgaggacgtgatgttaaaatgcgaatttctcagtcttggtggtctaaagatcgtcgagactgaaattttggcactctgtgccaagcaaaaatgaattctatcagcaaagaaaaccgagaattgagagtgatttttggaggataagataaatttaaaaaaattcctcacataaaatcttatatgccgagagtgttcatcaaaattccaaaccaaaaataattatagttatttttaaataagattatttcaaattcttggccttcgtgccaaccaatcagccatattacaaggttcgagactgagaattttggtattcatgacttcaacatttcccgtggcattggtccatttgcattttaatttgtccatttgcacattgttttatttgccaacaaccaaccagccatttgttctattgcttttgccctcggcttggggttcgagtttggcacaaaaacaaaattggccaaaaaaaccaaattggtaaaatgtggcgcgcgccaaatgggccatggatgagtaatggccgtcctcatccgtccccgtccgcttttccggccccaaattacccggcggtcgcgtcccgtcatctaactcgaccccatcgattttgggcctggcgtgcggggggngggggggataccaagcccacactgttagatgtggaggaggaggaggaacaagaagcacaagctaaagcagccaccagctaagtgagtgtggcgtaaatggccagccccgggctggtgtcccccggg

SEQ ID NO: 41368 - DNA, 1088 bp, Heterodera glycines
aaaataaatatataaataatataaattaatttgagacaccgaacatccgccgggggcaaggaattttggggtcggggaaaggcaaaaaaaaaaacgagtcggggtttggagtggaattcagcaatgctaattaatcgagttataaatataattaatgtaaaattttaattaaatacaattaaaatagaaaagaaacaatgacttaaggaaagaacaacaaaaaaaaatgaaaatttataaaataaaataaacaaaaataaatactaaaaataataaaaattaattaaaaatgttaaatcataaaaataaatgttttaaacattaaagaaataattttgacaaaaactgaaaaaatattaccctgcttgtgtaaacacatgccttattaatagagtagagcggcgggaccgtgaattttgggcaaaaccgggacagggggaccttttcgggttgaaaaactggtaatttttggctcgaaaaaccggtaaaaagccgggactagtcccggtcccggtcaaaactggggcttaggtactactcagttgtaccgttttttcagtaccaggtcccggtcccgctctactatacttattaacaatatttttaaatttaattcttttaaattaaaaaattgtcaaattactattagatataataaaaagaaaacaacactcactaaaatatttgatgctgtagtcttttattttgcttgagtgttttgaaggatgtgcaaaatttggccactttttatatttttagtggggaagaaagaagccagaatgaatgttatattatgtgtggtggctgaattggggtgggcaaaagatcaccaccaaaacaccatttaatggatgctaatggatgaatgggggagggacgaactgaaattggccaaaatttgggccaaattctggaagaagcggcttaattgcttcttcccaaatgagcattttgggatttaaaatagaaaatatttttacaattaattaagagccaatgaaaatataatttaaaaattttaaatatatatcaattttctgtaaaaggaagtttccataatttatgttaataaatcatttttataaata

SEQ ID NO: 41369 - DNA, 979 bp, Heterodera glycines
ttcttgtgacaaaaatttagcataatccatcgccaattcattgtcaccaacaatatctgttaagggaaataatttaaaaataattcggtaaattattatttttcaataataatcaccgaaattcatctcaatcggtcgaattaattccaatttggtcataaaaaatgggccaattaattcccttaatttgtccttcattcgaatcattaatttatttttgtccattgaacgtaaatgtcgtatttgaaaagcaaaattcgactctttttccgcccttttatcattgaaaaaatttggcaaatctctgaaaaataaagaattacggaatattaagcgcaaatttgatgtatgagccttttgtcagcgaatttaaataaaaaatttatgcataagaaagggattttatttttttgccaaaaaatgttttttaaaactttttatgaaatatctaaagccagaatatggcaaaaaaactacattaaatttgtttaaaaaactagaaaatgtgtgaaccttgtttttgagttgaattgatatttttaaatattaaaaattctgataatatgataataaataatttttccacttttaagcctaagtaattattaaaaacgccaaaaaattggcatgaaataggtacaaaaaagcggaaaaaggcacaaaaattcgaaaaaatgcatttatttttcaaattccatacatcattcgaaattcctcgtcaattccaaatttaattgtccgtttgccattttgaagttgcaacagtgcgataattgcactgaaattcgcaagtgccgtgtctctgacaaaaactcggtttcggccaatgctttcatcacattccacgccgttcaaatcaatttggtcgcgatttttcaaataattttttacattctttggaattttgggattttccacttaaattttcaattaaaagattttttggcctatccaaagggtattttcaaaaaataaaagt

SEQ ID NO: 41370 - DNA, 1422 bp, Heterodera glycines
  unsure (1)..(1422): unsure at all n locations
ttttcagtgtccgtttnggggtactcaaacaattataggggagcaaaaatccaacgcagaattaaagtacaggctatagggaagctattccggaaggattcggtctccccataaatctgggcgcatcggttcggggggactgccccgaaaacaaaaaaatcgattttttcatttcccactcccttctcccaggggtattattttgtaaagtctttttttccccaataaacttttcaaaccccatttttcgcaccgtgaatgttatttttatcgaattctgaaccgttttgagtagattagactagaaaaaattgaaaattttgaaatcatgtttcccactcccttctcccaggggtattattttgtaaagtctttttttccccaataaacttgtcaaaccccatttttcgcaccgtgaatgttatttttattgaattctgaaccgttttgagtagattagactagaaaaaattgaaaattttgaaatcatgtttcccactcccttctcccaggggtattattttgtaaagtctttttttccccaataaacttttcaaaccccatttttcgcaccgtgaatgttatttttattgaattctgaaccgttttgagtagattagactagaaaaaattgaaaattttgaaatcatgtttcccactcccttctcccaggggtattattttgtaaagtctttttttccccaataaacttgtcaaaccccatttttcgcaccgtgaatgttatttttattgaattctgaaccgttttgagtagattagactagaaaaaattgaaaattttgaaatcatgtttcccactcccttctcccaggggtattattttgtaaagtctttttttccccaataaacttgtcaaaccccatttttcgcaccgtgaatgttatttttattgaattctgaaccgttttgagtagattagactagaaaaattgaaaattttgaaatcatgtttcccactcccttctcccaggggaattattttgtaaagtccttttttcccccaaaaacttttcaaacccccttttttccccccggggaaggttatttttttttgatttctgaacccggttttgaggaaaattaaaaaaaaaaaaaatttgaaaaattttgaaaatcatgtttccccactccctttctcccaggggtatttatttgtgaaaggtttttttttccccaaaaaattttggcaaaccccctttttccccccccgggaagggattttttttttgaattttgaaccgtttttggaaatataaacaaaaaaaaaattgaaaaaatttaaaaaattgtgttccccccccctctttttcccaggggatatattttttggaaagagttttttttttcccacaaaaactttttataccccccttttttcccccccgggaaaggttttttttt

SEQ ID NO: 41371 - DNA, 1146 bp, Heterodera glycines
attaaaaatattcttaatgcaatatcggggagattaactcacgcactaattctactcacttttaattttttctgcagcacaattgattcgagaaaagtatttttcaaccgaaagtggatctgttcactttttttgtcaaaggaaatttgatagactcttttattctcagaatttttctatacaatttagttcaatattttgaatgagatcagatttggaataaaggaattaaacaatattgttctattcaaattctgaaattatttcccattcccttcgattaactccaaacgcgatggagaaatactcttttcagaaaagccctttaattgaattaaaatctatattttctggacgacaaaaatgcgttggctgaattaaaattattcttaatgcaataacggggagattaactcacgcactaattctactcacttttaattttttctgcagcacaattgattcgagaaaagtatttttcaaccgagagtggatctgttcattttttttgtcaaaggaaatttgatagactcttttattctcagaatttgtctatacaatttagttcaatattttgaatgagatcagatttggaataaaggaattaaacaatattgttctattcaaattctgaaattatttcccattcccttcgattaactccaaacgcgatggagaaatactcttttcagaaaagccctttaattgaattaaaatctatattttctggacgacaaaaatgcgttggctgatattaaaattattcttaatgcaataacgtggagattaacttacgcactaattctactcacttttaattttttctgctgcacaattggtttgagtaaagtatttttcaaccgaaagtggacctgttcacttttgtagtcaaaggaaatttgatagactcttttattctcagaatttgtctatacaatttagttcaatattttgaatgcacaaatagagatcagatttggaataacggaattaaacaatattgttcgattccaattctgaaattatttcccaatccaaatcaattaactccaaacgcgatggagaaatactcttttcagaaaagccctttaattgaattaaaatctatattttctggacgacaaaaatgcgttggctgaattaaaa

SEQ ID NO: 41372 - DNA, 755 bp, Heterodera glycines
ttttcggtagatttggggcagggtaggaaatccaaaaccccttttttagtgttcactcaaattttttgtctaataaatcgggtctttgcgtggcattgccgaaattaattttggagttttatattttggcatctttttgcgggaccataattaaaaaaaacaaaaataaaatttcaatagggatggagggtagcaaacccaaagaaacttttttggttttccccgaaaaattattctgttaatggaaaattggcgctgctgaaaactaaatggaatttttattttttgggatttttggattaaaaaattttctttttcatttgtggggctctcttttccccgtgtcgtgggcttaagggggcctatgaataaaatttttatgaaagttctttttcgtaattatactggtattattgcttagtcaaaaaaaattttcatcaaataatttgtagaaacattgttgtgattaattaaaatgaaaaatattaaaaaattgaaaaactacgacgataaatgtgattatttagaattaattttaatttaatacaaaaatctgccccaaatatagataaggtaacatatatttgatggacccagcccttgctgaatatgggggagaggaatgcggatttgttcagctttgcttctatgagtgcaaggcggcgacgacggatttgttggggataaatattggatgcatttgggggagggacttttgacgaaattttactaccgccttgggtatacggtagaga

SEQ ID NO: 41373 - DNA, 713 bp, Heterodera glycines
atactgataatgaatctgatcaaagacataaaatgatcaatcgctttgatgggatccactaatggaaccaaagccgaaaaataaaataaataaacatattggcgccgcttccccgcagagcaaagggcgggcctataaaaaggagttgctctccaatgccatcatttcacacgcaccacttcaactcatccaaaaattgaaccaattcagcccatctcccccccccccccccctcagtcgggttgctaaacagcaaaagttaatttgcttatatatttttcatttatttaatgcaataaaaatttcaaattaaaatataaatttgaaaacaatttcgcattgacaatcgtttttggaagcatttttcgaataaggaaaattttctgttttaagagaaagaattttttcataaaattttcatttcttaagggtctattttctgaatgcagtccctaataatcatagccaattatttatttaaatccgccaattaccactaaaattggctcattcttcgaataatttcagcatcaaaaaacaattttaaatttttattttgtagcttgcgctttgatcgaccgcgcatccgcgcagtggggcccttggggcggaaaccgttggggcggcggatggggcggaaaccgctggggcggcggatggggcggaaatcgttggggcggcggatggggtggcaacggatggggccgaggtga

SEQ ID NO: 41374 - DNA, 623 bp, Heterodera glycines
tgcattccccgttccgttcctcgtaaccctccggccatacacagtaaccgttgaaacagtacgagcctccggtacaaacacttgggttatgacgacaattcagtcccggtgattctgggataataaatattaaaaggtgatatatcaacaaaaaaacacacttgaatatcaaacgaagaaattacagtagtctaaaaattttgacaaaataaagtacagtaaccgagaaaattttgacgagcaaattcggtattccagaaaactatgataaacaaaatatgatattccagaaaattttcctaaatgaagtacggtagtcagaaaattcagaatacagtagtaaataaaattataaaaaatacagtaactcaatatattaatgctctcacttttaaccagcctttttgttccaagaccagcaactgtgtgcccaccattttccgaaggtaacatgcgaatgctatataaaaagttaaaaatttagagaataaattaattaaaattttataaaaatttgaaaataatgaattaaaatttatttgattgattagtgaattaattaaatttgggaattattcatcatacattttttagggggggtcgacccccccccccccccctcg

SEQ ID NO: 41375 - DNA, 1311 bp, Heterodera glycines
aaacgatcatttttttaaagccagcgaaatgaaatcttatatatatgaagctgtaaaactgtggaacgacaacacttgtttgaatattgttgagagtgacaaagtttctcctagaattcaattcacaaatattgtgggcaggggatgcaaagcaaatgttggaatgcaatcctcgaaagcataccaggaagttgatcttgaatacccagattgttacgaagtaagtaaaaatttgtttacaaaaactatatttaatattttcaaaagcttggattaattgcgcatgaaattgggcactctttgggattttttcatcagcatgagcgatatgatagggattcctttgtttggttttaccctgacaatgttgaccctgaaaatcattacgctttccaaaaggaaacaactgagtctactgataattataaagtcccttacgaccttggctcagtgatgcactatagcgcaagtaaacacaaatgcataaaacaaagcacggttttatgccgtcttattttccagaagcattctcaatcaatgggcagtataccttggtgcctcgagcgggtgcttcgtatataaatacaattggacaaagatttggtcccagcatcagtgattatattgtgataaacaagcattactgtggattagagtttctcccagatggatcaaccataaatacaggcacttagaaatttctatactgtgcattgtttttgtaattaagaagcatgtcgtgttacaatgaactgtgacaatgatgggttccagaacccggacacttgctcaacatgcatttgcccacagggttatatcggagcgaaatgccaagatgttgacactgttggttatgcccctgtcggcattgacaatacttgcgaaggaaatattttatttgcaacaccaaattggcaatatgtaagcataaattatgatgcacatttttttacttttactaattttccatgtctcggtcgcaaaagttttaatttggcgaacccaaaaggtataaataatataaaaactattattattttaaatatagatggtttcattatttatggaaattcctatgtttcgaaaaattatggccttgatttttcgaacttttggttttagcttgttttttaatttttgcaaacttttcgaaattaatgatacttaaggagcgtgatgggtcgttccttaaattctactattatggccgtttcttaaatctgccaaggggtagggaaaaaatatgacaaataaaatttaaactttttcacaaattcaactaaattaatatttcatagtagcattcaatag

SEQ ID NO: 41376 - DNA, 1655 bp, Heterodera glycines
  unsure (1)..(1655): unsure at all n locations
atagaggggggggggaccggaattttgtgactcaatngtcaataggatgataatgattgtgattgtgcgccaccgcgacgacccgtaaaaatgagtgggtaattgtcgcgcttttgcggggaccactccggcggcagcgcagcagacggacggacggacaatcgacgcgtttcattgcgtcgcgtgagttttgggaacacaactacagtcattcaccagagacagattaacagcaagcacaaaggaccaatttggacacgtaaacaaatgccaaaaaatttaaaaattctaaataatgtccaaaattgcgtggcatttaacttattagtcatccgccgatgaaaaagtttgtccatccatcactttcaattccggtaataggtgcttcccaaaatgatcgatgacgattggctgggcccaagcacaagcccatcgaaattggccaattcagacaacggtcggcgggtactgcgcgcgatacgccattttgtgttgggattggccaaattttgaaatactatgagattttttggcgttttgatgattctgagagaaggcagaaagagaagtgaattttgaatcactttttgccggggatgggagagagattataattgggcggcgatggcggacggctcaaccaaaaacgccgcggggaaaaataatcaaaataataataataataatgcggatgaatgactgacggaatgaatgaatgcgttgttacgattattcgccactgctcacaatgaatgaaagaatgaatgaatcagttgcccaccgaataaaataaaaaaataatttataaaatgtgcaaatccccccgggggacggcgttttatgaaacactcaacagcagaaaattgtgggggaaattagtgaagtttcggtcaggaatttgtgcacagatgagcaaccaaaacaaacagcaaatgtcgcgattggctgaggggggggggagtttaattcaatgacacggatgaatttttttggctaatttaaaatcatttttagaaaatttttataagctaaatgaattggaatctgcacaatcttgaagcggtgataaaatgaacttttccatttgacttactctaaaaattgtattgtaatttgagtgggcttaagtccagagaagtgccaatttatattttaaattattttcattttgttaaattaataaattggcctgcttttcttcaatggaacataatttgttgacaatttgccgaattctgcttctaatctctcgttgttcgttatgcctttttctattttcattttgccaaattatttttagtataaaaaatcctttttttatttaaaaaaaatttcaatgaattctgaacaatcaaaattgaattagtgattttgttcatttaacggtccccgtccaattggtagtcaacgtgcagaaacacgcggtcgacaaagtccaaagttcgaatctaaaaggtaaatttaaaaaatagaatttaatcattttgtggcaatttgaccaaatgccaatgccaaaccttccgttccaacgcctcgcaaaggtcatgtgtgacttttaacgtcaacgtttcgtccagcaccacgtgaagttcgaccagtgcccgctctccaagatataagccataactgaacaacacaccaaatagtggtgccgt

SEQ ID NO: 41377 - DNA, 755 bp, Heterodera glycines
  unsure (1)..(755): unsure at all n locations
ttgttagttctttcgccaatttacattattanagtgaacatatcgtgacaaaaaatacaatacaatatgaaattgagtaattggtcaacaaaataacaataccgaggaaggaacaagcattcgccatgataaaataatttaaaaagcattgacgaataacggcgacacttttttaaggcgagatccaattgagcatacatttgcgtctcttttttcaactcgctcatgggctttctcgagtggtctatctcagcgcgggactcttttctctacttggccatttgtctgagcatcccttcggcgctgctttacgtggccgaaattgtcaccattctgcggcataaacaattccacaattcattctacgcactgttcatcatccgtgccgtgccggtgattgttgctttggttgtgcagtttccattcgtttggatgcttccccttaggatttgctgtacctgctcgactccttctactgcttccgcttgcccattctgttcggctccgtccttttccctctctattctctgttgcccaattggatgatcggcggattaacttttttcatcgccggttacactttccaggccaacaatttagccaccgctttcatccttctcaaccgacttaccgcgattgccgtcccattgaaacatgacaaagtacaggacttgtcccaagtctccccggacatacatatcttgctcataactagagcaaagatttttaggagcgacaaagttgggggggggggg

SEQ ID NO: 41378 - DNA, 1528 bp, Heterodera glycines
tatatctagaaaacaaagaattactttatttaatcttctttgtttgtaattatttaattatttttaaatatacgtaaaaattgcttttttaaaatgttgtccgattaatgactttcaatttattttcatttattcttttgtttaaatatgactttaaaagctttttcatatcttaaagagaattaaaatttaatttttgcaaatatattttactttataatttatctctttattataaattaatatttttttgattcatttgcagcagatcatgccgattatatgaaaataataattgatctttgcagtaataaattattttttaattctgtttagacaacttcatgtacaataaaaaaaaataacttttataatatttaaaaattattagtcataaaaattcctaaaggatgacttttttttgtatatttaaaataaaataaatttaaatacataaaaataaaattgagtaataaatgtttgaattgataaagcacgtgccattcttaaagagtagaagcccaaggcctgttgttgatcttaacctttaaaaatatgacaataaaattaattagaaaataatgttaataatgcatatgaacaaccatccattttaataaaattatttctttttaaattaattcgaattgaaaaaataatatttatggcacaatcggtcccttttggcgatggcattttattatgtttttgtgtagtttactgaccatgagaataacaattattaaaaaataataaataattaaaaaattattatagcacttctacataagttattaaaaaaaaaaacttaaatttgatttttatatagaactgattaggaaataattataatacaaattaatataatttttttaaaaatataatattctatgaaaattatattcaaatgttaaacaaagaaataataaattctataaatttatagagagatattttattattatatgatttctagaatgaacatttattaaaattatgagatgttgaaaacactttatattaataaaaaaagatggattatttgcttttatcaggtaaaaaggaaacttaaataattaattaacaatgttttaatgcactgtcaaaaaaagtatcaataaaatgatttttattattttaaaacaataaatctaaattttaaataagtcagaagaaatagaaaaataaatgagatgaataaaataataaaataattaatttcaattaatatttattagaattaattatttgaaataaaaatctcgtccgtccacaaagaattcacagtcacagtcgaatgcatgaacacaagagattatttatgattaattcataataaatttctttttggtttttagaaaatgttaaaaaatgattttaaaaggaatatagtaatatttaaaaacacttttaaataatataagaaaatttagaaaaattctctaatttagtaatgattttccaacaaaataaaacttatcatattttacgatgcaaagcgtctccatctaatattgaagtgaaaaca

SEQ ID NO: 41379 - DNA, 918 bp, Heterodera glycines
  unsure (1)..(918): unsure at all n locations
aaatgggatcgatttacacnattgaaaatataaaaaatatttatagaatgtaggcattcatccattcatgtgattgaatatattttttaataattttttttgccgcaataatgaaagaaatttacaaaataaaataatgcaaattgaaatctaaaaataatacatcattattaataatcaaagtgaaaattattattatttagctaaaaaagtggcatttttcaacaatgggactttgttgtggccagagcatctctcgcgcccggacgagtgctgtgtcgtaggagttccccgactcgaatgctggccaattcttagaaattcctttttatcataaaaattaattaattctaaattgtatggaaatctccatttttattttcagtatcgttttatccttctttcttttcttcctctttcttttcctcttcctcccatttttctcagcccctttaattaagattttcctcctccactgctcttcttccgatgcccttaagcaagtttcatggaatttcccggcgtctttttcatatttattttccatataatttgccgcttcttttccctttattttattccctttacccctctcccccgtttttctccccacctttcaaatccctttggctagagcaaattaatttttgcataattaacagaaaggtcgtgtggcaaagtttgacgccgattttcctcccacaattacactttgctgcgctatgttatctaaacttctcgtcattttgcgcatacatctgctgaacctgacagaaaactttgtcaaaatgccacagtaccattctcttaattattttgcccattttttcacgcaataaaaaaataaaagtaaaatttaatcattttttattatcatttttttatgaaaattgaacaaaaatttataatttacctata

SEQ ID NO: 41380 - DNA, 1006 bp, Heterodera glycines
agttgttttttgtggttttttaggtttagttggtattacgtcggattggtctttgtcgggttggtttttagtcgttttttataggcgttggtgttttgtcgtttttgggtgagttggtgttttgtcgggttggtgttttgtccgcgcgccttccttccttctcttcccattcccaacacctccctttcctcccctcccattcgtcgattaacgattaacccactttttgctttctctcctttccacatgtgctagacatcgctgcatctctgccttaacatttattcagcgcttattctcctctgagtttcatttctaattttctcggtctttccaatttcatcactttttctttcccaatgtaactgtaatgtcatcatttttatagtggccttaatacataacatttgaattatcttttagcgatcgaattcaacaccctttcaatttggcgatcatgcaaatcttcgtcaaaactctcaccgggaagaccatcacccttgaggtcgaggcgagcgacaccatcgagaacgtgaaagcgaagatccaggacaaggagggcatcccgccggaccagcagcgcctcatcttcgctggtacatcgacttttgatatgccgaaacaatcatttttatacccaacccttattttcagggaaacagctcgaggacggacgcaccttggccgactacaacatccagaaggagtcgacgcttcatctcgtcttgcgccttcgtggagggatgcagatcttcgtcaagacgctcaccgggaaaaccatcaccctcgaagtcgaggcgagcgacaccatcgagaacgtgaaagcgaagatccaggacaaggagggcatcccgccggaccagcagcgccttatcttcgctggtacaatttgatgtgccgcaacttttaatcataaacccttgttttcagggaaacagctcgaggacggacgcaccttggccgactacaacatccagaaggagtcgacgcttcacctcgtcttgcg

SEQ ID NO: 41381 - DNA, 1281 bp, Heterodera glycines
  unsure (1)..(1281): unsure at all n locations
ttttattagaataaccctatgcttttacaaattaaaatttttgatataattaaaaaaaaattgcttgnccagaaccgataaaaaccgatcactttttctttgcagggttaaattatacctagttcctgttccggtgttaatttattcggatttttccctgaaatttggctgaccaaatttagcacggtatgcaaagatgacatccgctagggatgcgcgagaaatgatttttacagagaatcgagaaccgagaccaagaagacaaaaacccgagaaatttctcgggtcgaaaactgattaatgaaattaattaaaatgtttatttttaaatcaaaaacatacatgaaaaagaggagggggggggggaggttaaccaaaaattttgagaatgactttaaacgccggatttacgacattttttaagaaatataggagtttttggaatccggcagtgtctataggcgccaccggggaaaaattggaaattttgatttatttattttggacaaattttttgactaaaaaaataaataaaattaagcatgatctattaatccttataattaatcgcaaatatgcaccaaatatgcacaaaaaaacttgaaaattaggggtgcaaattaattaaaaaattttattcctcataaaataagttgtttttgcaattgcaaatcaaaaatttctcaaggttttcggcagtgaaactcactgttgatccactcgcgcatccattcaaatttggatttaattttaggcataatcaaaaaattttttcctaagagatattcaaatcggaaaatatttgaagaaaaatggcaaaatatgaaaaaaatctgaaaatatgtacaaaaaattggcaaaatatgcaaaaaatctgaaaatttgtacaaaaaatggcaaaatatgcataaaaacccaaaatatgcaaataaaagtcccaacttttgttcgcaaacacaaaaaagaaagtgtttttcctactatttagagcatggagaagccaggaaaaaaaatatgaatttgcatattttttgcagccctgataataaccattttgaggcaatcgcacttggtgactgtgcattgtgccgacagtttatgccattattctgttattgtacacgccgcccattctgttctctggtctgtacatgttgtgattcttcaacccatacgtcggttatgtggacaattttggcagaaatgtaaagatttttcaataaattttaaacatattgtaccgtatcaatttcacaattacagtaccacagcccaatgcac

SEQ ID NO: 41382 - DNA, 956 bp, Heterodera glycines
  unsure (1)..(956): unsure at all n locations
ttgcccgagaattaantttaatagtnnttgtttggctcatcatatgctcataaatggcagacgcataattcccaggctcatcacatcttattgcgtaaaatttcgtctgttagaaatatatattttttaaactgtagcctggtgtacaaataaatgtaaaaaatttcaaacaatttttttttaataaatattttcgttcgcggttgtttggtttttcggtaaaaataaattagaaacgccgtaaaaaacacaatatgtttaggttaaaattctttgtgatttcacttatttcccatggaaaatgtacaacaaaaatttataagggtaactgcttgtatatttattaattttgcctctatttttaaatatatttttttacaaaattccaatttttatattgaatcacaaaattaaaaaaaaattctcttaaatccgctaatattagtctttttatttatttattttttttggaataaacgaggaatgtttcaaaattttcatcaaaaaaattggcaatttctatttaaaaagtttgtccaatattttataaaatttcccagcgcttatcggtgcagccgaactctaaaactcataaatttctctttatttgaaattcaaatttatttaattatttaggtggatatttaattcaaaatttatttattaaaatatttaaggtattattattcatccgaatttccacaagtgtagcaagtaatttattttgtgacattgaacataccgtaatctgttcaagaagtctgttttcctgtatgtatagtgaccaatcactgccaatttccgcaaattcaaacgtttctagcagaatcatttcaccgtatttatacagtacgcaaagcaacaaaactgngtctttaattgtttttaaaatgtttatttgtgcccattttgaacgatgatttgctagtctggcctccaatttgttcactgatgaa

SEQ ID NO: 41383 - DNA, 895 bp, Heterodera glycines
aaattttgaagaggctctccggaacggattagcatcggggttacgagatagaaaattgtcctaaaaagagatagccatttttctgagaattaattcacaatttccgcagctcttacggtaatggaaaaaattttgaagaggctctccggaacggattagcatcggggttacgagatagaaaattgtcctaaaaagagatagccatttttctgagaattaattcacaatttccgcagctcttagggtaatggaaaaaattttgaagaggctctccggaacggattagcatcggggttacgagatagaaaattgtcctaaaaagagatagccatttttctgagaattaattcacaatttcctcagctcttacggtaatggaaaaaattttgaagaggctctccggaacggattagcatcggggttacgagatagaaaattgtcctaaaaagagatagccatttttctgagaattaattcacaatttccgcagctcttagggtaatggaaaaaattttgaagaggctctccggaacggattagcatcggggttacgagatagaaaattgtcctaaaaagagatagccatttttctgagaattaattcacaatttccgcagctcttagggtaatggaaaaaattttgaagaggctctccggaacggattagcatcggggttacgagatagaaaattgtcctaaaaagagatagccatttttctgagaattaattcacaatttccgcagctcttacggtaatggaaaaaattttgaagaggctctccggaacggattagcatcggggttacgagatagaaaattgtcctaaaaagagatagccatttttctgagaattaatacaaatttccgcagctcttaaggtaatggaaaaaatttt

SEQ ID NO: 41384 - DNA, 945 bp, Heterodera glycines
tgaatagtcaagtaaatggccattgatcagagcattcgttcattcacttggcggagttttgaacattgcgagccgccgaaggcgacgtttgactctgagcaaaagccgctaacgcaaatttggccatttgggcagtcttgcatcagagagcaggggagaaggccggaggggcgccctttggcaacaaacaaacgattggcaagagaaacgaatgaatgagcaaatgatgacccaaaagcccaccgatcgatgagccgaacgaatagccgccgtagccgtaaggcgagtacggagaagagaattcggcacccatgccgagcccataagtgccgagtccgccgcccatgccgtaccccgctgcaccaagcgttgcgcctgcgtatccccccgattggaaggtgcaccgcccggacaaacacacttggccactgcattcgtttggcggaaatttgaaaattaattttattcacctgtaacaatccacggtatccgcacacactgaaaaatgccgaattaatcgaggctaataaaaccgaatttgcgctaacatttgttcgctgcgctgttcagtccgagcattccgcccgccccaccgtacagcgcactaccgtaccctccaccgtactgaccgctggccacagaattcatttggcaaacgccattaatgcaccattggccgagagggcaagatacgaaacggcacaaatcagtggtgccatagcctattcaagaaaataaaagcgaacaaacaaagtgatggcaattaccacgaagggcagagagaaagttactcccataaaattgggcaaaactaaaaattagcgaaaaaacaaattaattaaattctcaaaaataccccaaattaacggaaaaaagaaagagcaaaagggccaaagggaaagacgacggaaaaagcattgacagcgaaagcggaggagaaagtcg

SEQ ID NO: 41385 - DNA, 1165 bp, Heterodera glycines
attttcacccgaacatttacgcggacggcaaagtgtgtatcaggtgaggggaaagggcctccattttgtacatgtacacaacaatgtttgattctggctgacatttggcatttcatttattcaacaaaatttaagaattatacacaacaccacaacaaaatttattaattattataaaatttaatcattgaacaaaaaagcaagatttttttaaaactcagaaaaattatttaaattttatatattttttaaaacggaaatccacaaaaataatttggttgtattataaaaaaaaacaatttcaatttttttgcatatgagttagttgcctgtgtaatatttctatgggaggattcaacctcataaaatttggtttcaatttttggaatttctgcgcttttttcagcattttgcacaccccgggcgacgacccgaccggttacgagacgagtgccgaacgatggtcccccgtgcagtcggtggaaaagattctcatctcggtggtgtccatgctggcgggtccgtcccttgccaatttgatttggcgttgacattggcttttttcatggcattttgcccatccatcctttgcagagccaaacgacgaaagtgcggccaatgtgaacgcggcaaaaatgtggcgtgacaaccgtgcccaatttgagcgaattgcgcacaaactcgtgcgcaccacactggtaaaacaggggaaaacgtgtacaccgcaaaaatgttgtcggcacacaatttcgccgcaattttaaatttaaaaaaaaaatttagtttttttccaaagccttggtttactgaaaacaatatttgccgattttccagggaaaaaaactagtatttttatttgtttccatgaattttcttaatacaattttttttttcgtattgggctaggtagccaagaatttttgattattttttcttgaattttacaaattttgtggcgaggtttcgacggcattgttttatcctgctcctgggaaaaacaatttgcaaattaattaattaatttaattgatcattgtaattaaatcagggtctgccggcgcaaaaaccgggcgacaacactgacgaaacagcagcgacaacaacggcggcggttgtgcccggcccaagctcatcatccagatccagataaatgctgacacatttt

SEQ ID NO: 41386 - DNA, 604 bp, Heterodera glycines
ttatccacatatacatatgcagcaattattcgttctcctctaaatccaaagatgggatcatattttgttaaaaaataaactcacatgaatatcattttatcttcatctagtttgataggcattttctcctttattaaatttctgttaacaaatttggccaattttagggaattccactttttaagctcatcttcgttttttttattaatttttataagaagtataagttttgctaagttctttttttgggttattccaactaacatatctagcacagaaggttgttctgtaatccaaccagttaatcccgattttttggacatgactaaatcggcgtcttggctttgagatattacaaaaaagtttctttttccaaatgctctattcgtaaaatcacatgaacatatgacttctgcattgttttcgttaattgatttaagaattaaaagcccataatcattcagctcgggtattgtatttccacacccgcgatgagtcagctcaataaatgcgctcgaatcgtttttcgtaatattattattaatttcattcaaaattacgcggcatgtgaatgaaatattaaataatggcacaagaaataata

SEQ ID NO: 41387 - DNA, 1200 bp, Heterodera glycines
ctgttgaaagcgatgcagaaggtggtgagaactcccgggtgtcaattgctctacactgataccgactcgctgattttcgtccatccaatcggcatgtgtccactgaaaacagggccacacttgggacagttcaccgatgaatatcctgagcacgaaatcgtcgaattctgcagtggcggtgcaaagcagtatgggttggctctacggcgtaaaaatggccaagctgatgcggaaatggaatacgtgcttaaactccgtggattgacactcaattatgatgtgatcaacaaccaaggcttaagatacgaaaccttcaagcagcaagtcaaacgttatgctcaaacaggagagattgaaccaattaatgtaatgtacccaaactttattagacccaatattcgtgatggtggatctgtaatatcaagctctatgcaaaaatgttatcagccttatgttgggaagggtattgtaggagccgattataatgttctcaattttggacacactttgtaattgctcacccattataatgtcttttcaccattcattgtaattgttcacacattgtaataccttcttcaccaatcattgtttctctctcatatacacatgtacccttttatgttttttcgcctcttttgtatctctctctcatatacacatgtactcttttatgttttgttgatctgttattgtatctctctctctcacacacacacacacacacatacacacacacacaccccatacacacgtacacacgcatgtaccacctttgtttttcatgttttataccaaaaattgtgtaatttttcattttatttgcgtttttaataaaaatacatgtataattaagcaatggaagttacaatttgtaaattattaagcaattgggaacgtcatttttaggtagaaaaatgcataattaagcgaaagaagttacaatttgtaaagtattaaggagtggaagatacaatttttattatgtgcacgaacttgtcgtttttaggtagaaaagtgcataattaaacacattaaaacacatgcagaattaagcaatggaagatacaatttgtaaattattaagcatttgggaacgtcatttttaggtagaaaagtgcagaattaagagaaagaagacacaatttgtaaattattaaggagtgaaagatacaattttaaaaagtgcacgaacttgtc

SEQ ID NO: 41388 - DNA, 1175 bp, Heterodera glycines
attgaagaagaaaccgaaaatgatcaataggaaaatttaaataatgaaaacatcgctttaaaagtgccaaagcctttcgaaccaacagggataccaactctgatggtttatcatcattttgatgattttaaggtgtgtgtcgccaattttttcattggcgacgagaaggcgggtcaatccccgccgactgcacgaaatggacgggactggactcaaccgaagcaaaaagaatgagggacgtacttggagacggccggggcgaatcccgattcatcaatccgctaaaattgatcattcctaattttaccccttttttcatccaatttctcatttgcatttttgctccatttcgtaccattcactttttgcccgtttctttgtcccatttttgcccaatcgcatccctttcacaattcaaattcttttctcatcggctggctcatctctggccaactttgtgcttaacaaattgcacaaagatttcctttcaccattttctatctttcccatctgcctatttgcattttgtgttcctgtgtgccatttcctttgtgcccactttcgcttctagaattttctgcccatttttatgtccctctcacaatttgtccacgtgtattcccttttgcccgcccccttcgaaaattgtctatttaagcggccccgaccaaggggtcgcgttctctttcttctcttccttccactcccctccgcttcattttcggtctgcctgtgaccaatcctccaattcccccgtcccatcgcccaattcgatcaattcgtcgcttttattcattattcgttttgctttaataaattcgtgctgaaacggcttggaggactcggaaaggagggaaaagcaccctccacactccatcacattcggcaaattctcgtgtgtggccaaacgaaggcgcccatccccgtcttgaccactccctttcccgacagcgccctcgtcgttctcccccaatcctcccgatcccaattcctttccttttggcattggagaatccgggaattggcccggagcatcaacgaatttcaagcagttcaaactcccgcagccggagtctcgcggatcggtatcagtctcccgccagccggagcaaccgtagggacggggcgaattcccgtcgtcgacgaatccaagcagggcagtgaaggaaggaaga

SEQ ID NO: 41389 - DNA, 1046 bp, Heterodera glycines
cagagtttcctctggcttcatcctgctcaggaatagttcaccatctttcgggtctcagcgcatacgctctgtctccgccccatcgcatgcgatcgagacgggactatgttgcgccccaacaccgcagtgccagggatcacacatcagctccgtaagaagccttcactttcattgcgcctttgggttttgaacacccaatgacttgcgcatacgctaaactccttggtccgtgtttcaagacgggtcgaacagatgaccggcttttacaccgagaacgcacaactgagagcccgagctggaccgaactggttgctggtacgtgtcgcacgcgaccgccaccgacccccagctcgagtcaacacggacccgaaaccattgcacaattcacccagagtaaacagcactcccccgatccgggtaccagaccccgaaaggctggcctcaagaccgagctcacgcagctactccgagcatctcagcgcactccgcctgcaaatgccccattcgccactgaacagaaggacagcaaaccccagtctggaggctagcaggccaacgtacagcaacaaacgggtgaatgcagaccagatacgccagctctgtccgtttccacctcatcggtttcacgtcctctttaactctctcttcaaagtgctttgcaactttccctcacggtacttgttcgctatcggactcgtggccgtatttagtcttagatgaagtttaccacctgatttgggctgcgatcccaaacaacccgactccaagacacgtaaagatgggtaggcaccgccagttggacaggtcttgcaccttctctggagccccggtcaagggaaacttgaacaagcgggccaacccaagctcacggtctatacgctacacctcgcaaccccagaggagctgcgattcagcgctggactcttcccagttcactcgccgttactacgggaatcctcgttagtttcttttcctccgcttactgatatgcttaagttcagcgggtggtcacgtctgagttcaggtcgaaaaatcaaaagcaggaa

SEQ ID NO: 41390 - DNA, 906 bp, Heterodera glycines
ttttatcaaattttttgttgtcttttgaaataaattgtgaaaaaatatacgaaaattattttcgcttttaattatgatgtacaatgcttttaagccccgccgtgaggcggcttctttttgtgcactattttcgtttttaaaattggatccggattttttggcttttttaaataaattgtgaaaaattcaaaacaataaacttttttattgcgctacaaatgcttttaagccccgccgtgaggcgggacagttccaaaatttgcaccacattttactgtggaaagtccaagtaccttaattggacaactacgcgtcaatgagcacagtcgcctctgacctcttatggagcagaaaagggtgaatatcagatggggtgcgtcccatcctaaaaattcctcttttcgtctaaccatccctccctttttgtgcactatttcgtttcaacattttatcaattttttgttgtcttttgaaataaattgtgaaaaaatatacgaaaattattttcgcttttaattatgatgtacaatgcttttaagccccgccgtgaggcggcttctttttgtgcactattttcgtttttaaaattggatccggattttttggcttttttaaataaattgtgaaaaattcaaaacaataaacttttttattgcgctacaaatgcttttaagccccgccgtgaggcgggacagttccaaaatttgcaccacattttactgtggaaagtccaagtaccttaattggacaactacgcttcaatgagcacagtcgcctctgacctcttatggagcagaaaagggtgaatatcagatggggtgcgtcccatcctaaaaattcctcttttcgtctaaccatcccctcccttttgtgcactatttcgttttcacattttatcaatttttt

SEQ ID NO: 41391 - DNA, 777 bp, Heterodera glycines
attaccgacatttgcggcccgacttttgcggcgcgacatttgcggccccgacatttgcggcccgacttttgcggcgcgacatttgcggccccgacatttgcggcccctatcttaggggtcctatcttgacagttcccagccccttaccaatctttgtgttacatacttttgcggcccaacttatgggggcccacaatttgcgatatagatcttgttcgtaactccattagctttttttgaatgaatttctcggcgcggatgtgatctctcatctgcaagcgcaataatggttccagcaattccgggcggcgagaaacaccaccaaacgcaagcttggctctggaaggccgtcgacagtgaacaaaaacgttttgacacgacggttgcgacgacacgcggaaagttcctgcgcataattgtacgatgggacattgctataaaacaacaacatggcgctggcttcgcaaatctggtcgtcgccctatgatgagcaaatgggtggcacaccgtctgactgatcagcagaaacagcggcggctaaatctgtgtctttcgaacatcgcaagacaccggagaggatatgtgctgacccggctggtgacatgcgacaaaagctgcatctgttacgatggcacagcacagaaaattgtattgagaaagaaggaggaagacccaattttggtcccccgacccaacctgcaccaaaaaaagcgcatgttgtgtatcttttggtcagtacatggcccactgtactgggaactgctggcaccttgtcgg

SEQ ID NO: 41392 - DNA, 1126 bp, Heterodera glycines
tacggtaggtgcagaaacatactgtaggaaacatactgtaataccatgcaataaaaggaagaaaaacatttaaataattaattttgtctgtcatttttttcttcgtgggcgtttttcccacgtaatctctcagactttgtcagctgtgtttgggcaattaggggcacaaagctcaaaattgaactgcaaagttgaaaatgttagccatcccatggcaaccaaaatgacaattaggacaattttttaacaaaatatgtgaatttttattaatgcttttcattgtttctaagcatattgaacgaataatgtcgcattttccagtgaaaacagaggaaattactgtaattcccattttcagaagaaaaaaaaatcgaaaaattacggtttgaaaaatcgtttatataaacactcaaaacttaattaaaaatgataaaatagtgaatcactactcactattcaatttacatttgtaaaaccggcacacctaagtgaattgaatagatttccatttcattttttaattcacattgatgagggttaattttagggggtaggctcataaatttctcctcctcccattggtgggttaattaagccacaattttttagcctttataatttaaaggctctttcaattaccgctgaaaaaagaatttgcagctgcgattttgatttacaaaatacagctattaccaacaaaaagtatgcaattatcgccaaagttataattagatttatacgcacatgattctttgaaaaatcgtcccaatttaatgccgaattatgggtgatatctaaagtagatccaattcatcaaacattgccaataatgtgctcaaatttcattttcctatttttaaaatttccaatcaaattaatttaaataaaatttcagctttgtttctttgtcccaaattttctccgatggcttcctccaattcctcgtcaattccttcgctcgattccgcggtcgtaatttgtgccattgttttgtcagccatcgaattggtcgttcaattttcggcatttctgatttcggcactaagcttttccattctgtgcacatcgtcgctgcttcatcccaatttgaagtgcattttgctgatccaaagtgtcgtcattggct

SEQ ID NO: 41393 - DNA, 728 bp, Heterodera glycines
cgaaaacctccaggaaacagttttcatgattttttcaaaccaaacgaatgcctaaccgttgatcttttcggggagcaaaaggacacccactcagcaaaagccaacagattttaaaaaggaaatgctgattttcacataattttttcattatttctaagccatttaaatccgacgaaaactgtctgaataatttccgctcaacaaaatgtctgacaaccgaaacgaagcggaggaaaaaatggcgaaagcaatataaaattaaaatgccaattttcaatttcaatttttaaattttgttttcccttttttcagttttatctccgccgattgttggctttgtgtgtacgatctgctcccggcttcacaacttggccttggaattgcactgatcagccaccgttttgacttttatgtggatgaacatttcaagactcgtcgctggactctgagatccatggcaattaaatccaaatccaaatcggatggaaccgtgggaatggatattgtcaattacgctggaaaagcattgccaattccgcaaaatccgttgccaaagaaagtcgtcggattcaaagccatttcaatgaagtgaaattaatgattctttttttctggttgtaaaacaattccatcatttttcacagatacttcaacaacaatgccatcgcttttcccggcaattttcgccaactttttgccaaatgtccaattaatttgaccatcgatac

SEQ ID NO: 41394 - DNA, 588 bp, Heterodera glycines
atttcggcactgaactgctccgtaaggatggccatcgtgttcttttgaatcattcccatccatttcagtggacgacattcaggcggcctgctacaaaatcctcgactcgctttacatggtctcccgcctggccaacagttgcgcgtcgcggcagagcatccaaattgaagtggaaaagcatcggtcggcccttggccaatgtctcagtgccttttccgcctgtttccccgtcgctttcctcgaggccgaattcaacgccaacaacaaattgtccgtgctggccaaaagccgagaccaatctgtgcaagtgcaggaaatgttgcagaatttgtcccagcacattcccatgttggacaaattgttgcaggaaattgagcaaagcgcagcaaaagggtcagtcgggggagagggggagaaacggtgtgggggtggggattgagactgatcaggccgatctaaaacagacccaatcaaaaggactacacttggggagagggggttggggagaggggggggggagaattgaggattgatcataacgatcccgatctcaccatcccacactaactacgctcggtttgattagag

SEQ ID NO: 41395 - DNA, 521 bp, Heterodera glycines
atttttttcctgttatgaatttggtacaaaaaaataataagagaaattctgagtactaatttgaagtttgtaacttattggtcaaatacaactcaatccaccaacattccaatcaacgggactcaatcctcaagcatttcaatcagtgggactcaaccctccagcattcaatcacttggactcaacccaccaacattccaatcaacgggactcaatccaccagcatttcaatcagtgggactcaatccaccaacattccaatcaacaggactcaacccaccaacattccaatcaacaggactcaatccaccagcatttcaatcagtgggactcaatccaccaacattccaatcgccgggactcaatccaccagcatttcaatcagtgggactcaaccctccagcatttcaatcagtgggactcaatccaccaacattccaatcaacgggactcaaacggaacttatatccaccagcatttcaatcagtgggactcaaccctccagcattcaatcactggga

SEQ ID NO: 41396 - DNA, 921 bp, Heterodera glycines
ttttatttcacagaggatttttatatttatactctatcccagaaaaatggctatctctttttttgagaaattttatacacatacaaatgctctcgagcatgatagggagggcggtgcgcaatagaccttttatttttgagggaatttttaaatttatactctatcccagaaaaatgtctatctctttttttgagaaattttatacctcacaaaagcgcttgcgtatgagacggagggctgtgcacaatcgccattttatttcacagaggatttttatatttagaggttatcccagaaaaatggctatctctttttttgagaaattttatacctcacaaaagcgcttgcgtatgagacggagggctgtgcacaatagaccttttatttttgagaggatttttatatttagaggttatcccagaaaaatggctatctctttttttgataaattttatacacatacaaatgctctcgagcatgatagggagggcggtgcgcaatagaccttttatttttgagggaatttttaaatttatactctatcccagaaaaatggctatctctttttttgagaaattttatacacatacaaatgctctcgagcatgatagggagggcggtgcgcaatagaccttttatttttgagggaatttttaaatttatactctatcccagaaaaatggctatctctttttttgagaaattttatacctcacaaaagcgcttgcgtatgagacggagggctgtgcacaatcgccattttatttcacagaggatttttatatttagaggttatcccagaaaaatggctatctctttttttgataaattttatacacatacaaatgctctcgagcatgatagggagggcggtgcgcaatagaccttttatttttgagggaatttttaaatttatactct

SEQ ID NO: 41397 - DNA, 934 bp, Heterodera glycines
gtatatgattaatataaaaatatattttaattatgtagcggaatttaaataaaatatatattataattaaatttatttaacataattatttgcttttcatttttaaaataaataattcgttctgcttttaatttgatcatttgcacttttcggacttcgtctcagcacgagtgattttctccctttttaccgctatattatttattatttgttttttattaatttaggttccgtaatgagccgaagtgacaaaagtatcaattaattgaaatatttaaattaaattattattttaattttatttgctaaataataattcataacttagctcaagcttaagtgattattcattttttttattaaaatgtagctttacgtatcctctattatttgtaattttactagcaaaaatttacaaaaagttgtggtaaaaaaaacttccaaaaatttagattcactaattttgtccctaattttttttaaatcattaatattgttgaaatttgacagaataatagagaaatatttgggttacctaatgaattaattgaagtttgaacaattttcatgcataaacaaacttacattttttatgaccataaaaatattatgacacatttaattccttacaattagtaagttttttttcagaaacaacaaaatttaaattttcttttctcaattattctgttgatttgaaaaaattttataaattgtaggaacaaaggttgggctagtctaaattttttgaacttttttaagttacaatttttgtaaaatttttttgctaaattttttagcaaataaaattaaaataataatgaaatttcgtcaatttcataaaacaattcaaaaaaaaattacgaaattgagtaacatttcgagtcttaaatgctcattgttagcctgcaaaatttcatgaaatttcttaact

SEQ ID NO: 41398 - DNA, 632 bp, Heterodera glycines
aaatttggagagattatatcgattttagtgtgctaggttcgatgaaactttttaaaatataagcctaaactttttggcctgtttaaaaaggaattaaaaatttttaaaaattttattcatctcccttttgatagaaaaagcatcagagagccttatttaacttttaattaacatttggtgcgtttcagagcagtttctgaaaaaatatttatgaattgattttgctaaaaaaataaaatagtgaagctttaaaaattaataaaaaattttaaattcagaattactggagttagcatcatagcagtgcttttccttgtctttttgatgccctcgcaaaatctggttcgcttctgaccagtttataaaaaaaaagttaagcctaaaatttttcgcatatttaaaaagcaattaaaaatttttagattttttattcatctccctttttgatagtgaaagcatctgagtgcctaaaataacttgcaaataaaatttggtgcgtttcagagcagtttctgaaaaaaatatttatgaattaattatgcaaaaaacaaataaataatgaactctcttccttaataattttcctgcaccgaaggacttcacctcggccgcttcgcggcctcggggtgggc

SEQ ID NO: 41399 - DNA, 1265 bp, Heterodera glycines
aaatttatactgtcacaagtcagacagaaatttaaggaaaaatataggaaaaaagtatccagatatgaagaagaaattggcacgcaccctatgttagcaaacaagaatttaaataattatagaataaatatgatttaataaaattttcttcaaaaaattgaaaaaaattcaggtgaagtcaacagaaatgaaatagcgaacctacttaacaagtcattatcacttctcgccctcccccccccccatcgcccgctcaatttgcgcgtttctcctccgtttgttctgccactgtcccttccttcctcccaccaccgccaaacaaaccaaccattttcgcgcattccttccctgtcatttcctttactcccaaaaaaatcatccgtctttcaccgtttcttttggaatttccaactatccgagcttcggcaaaaaccaaacagaattgttttatccctgttttttcaatcgtttcatgaacagaacataaagccaattctcacaaaaaaatttcattatttgaatgtttgtcccccaaacgaattaaagtgaaagggaatgggcaaatgttgcgacaaaatatcacattgtgcagcagagcaacaaatttttccaacaaatgtcgagacgagaaaaaaaggcggagataggaagggagcatggatcagcaaaagaagcagggggactgattaaccagcagcagtggacacagagggtggggggggggggcgaccggaagtgttttctccggcacgtgagacggaaggaaggggaggagagaggggaagatgggcataggaagggactcatccgggggaggggtccacggggcaggtacgcatcccccagagcgggatgagggtgggcggaagaaattaaaaaacgaaaagatgaaagtagtcaacagacgaggcaggggggagaggtgatcatcggttaaaccgggggatgacaaaaccggggaccctgcatatgcaactcgggggactttaattttttttccattttatactttcaacagaaattgttaaataaaatatctttatgtaaattgtgtaaattttattcaactgaaaataccactctttctaaagcattctgctggggcaaattcaaaaatcttgtccagtaaaaagcggggtcccaacacatcacaatttttggctcttattcagtttgtcccccataatttttttttaatttctaagaaaaaaagacaaaatataggttttcagggtcgctgatcacgaatccgatatccatttcga

SEQ ID NO: 41400 - DNA, 1458 bp, Heterodera glycines
  unsure (1)..(1458): unsure at all n locations
aaagattgtgccattggcgttgtttgacacttttgtcctcctccgccttcttgcgctcgcgctcctgcgtttngaaatagtggagtccattctaaaatanaattaagaatgaatttggtgtaatttttttaaattgttaattaaatctgaatcatgctgatctgatcggataagtggtctccacctttccttcgtccttctcctgcgaatgtaccagaaaactgtgcaccgttttgccctccgactcaatgtcaacctttggcgagcagtaattgtcaagcatcacaatttggaagcctgtgaaaattataaattgaataattgatggggtgaaagtcggaaatcgagcggaactgataaaaaatccgcaattgatcattgggtggaaaatttataaattattttaaaaaatgcttaattttcatgcgccacacatggcaaatccacttacagtattccgagagtgcgtcgcaacagttctcctcaatgtccgggagcagattgacgcgtgccgcacgctcgcgcaacacttggcgaacatacaacgcgcactctttgcccaacgggtccgcctcatcgaagcctttgaatttttcaaattatacagtataaaatcaagtgtgtacggtaaaacaatacctgaatggtacagacaagcaagcacctgaacttatttgtaaaattaacggcaaagtcagagcatgagccgcgattgtcggcttacctgtggtcctgggtccaccaccactttttggtcctgtcccggcaatttgttggtattttcgtgccaattgtctgtggcatggcaccgcgtcactgcctcttggtggcacgcctcgtactgttgagtgtccacgagtgccatgtagtgtttcacctgcgaataattaaaacagtagtagtactccattttttaaaaatatggcttttttctttttgcaatgcgtatgccgaagcattcgacactttccatagtgataggatttttagaaaataagaaacataaaatgtccctaatttttggatcttcaaatggaaagattgaattaaatgtcacaaatttagaatgtttagccaaaaaatgaaaacgcattcgcattaattgtgtcatttgccgcccccccccctccctcgaatttacaaaataatttaaaatgggggagaaatttagagagaattgaggacgacataatgttttttaataaggaaaacgatgaatgattaagccaaacaatcgaagaagcgagggngggggggggagaagccaaggccaagttgggcgagggaacggaaggaaggtggaaaaataatggcccccccccaatcatcccttcccctcccctgctgtcctccctctttctcctcttttccagcagggcaccgctttaagcgtgtaaaattgttttttatcaattatgaaacggtatttttgcctacagtatcctgctaattgcgtca

SEQ ID NO: 41401 - DNA, 1383 bp, Heterodera glycines
tttgagatttattgagttgaagagttgcgatcccaaaatttaaaatcctcatttgagcactaaaaatatttctttatcacataaactctcaaaaaaacccatttagcataaaaatttttaaacaaaaaatttacaatagttaacacaaatttttcgttagaaatacaattaattcataaaattcttgccctagggaattggtaaacgtgaatggaaaatattgttttttaaaagaggttgaaaacaaattactcagattttggtcttatcctcatgctgaaattttcgtaatccctaaaattttgcaaaaaatttctcctatttatttaaaatattttcaaaataccaatctgtaaagatataaactcagattaccctcaaaaactcattaaaaactatggtgacctttttttttcttttgaattattttagctggggactgaatgggctattcaaatggcgtcgaggaacggatgaatgccgcattgagtcatggaatatcaaattcggcaccccccccccacatttgaacttgaaaataaaaagaaacaagcaaattcaaaaacaattcagaattcaaacggttttacaggcgctgaaccaatctacgaatcattgtcagacacggaggaagttgaactgaaggttaaaaaagtggaggaggcgaaagcaaaacgcttggaagactcgcaaaaaatgctgcaaaatgaggtacaaaagttaaaaaaggaaattggttgaattgaaaaagaaggaagtgtcaaggaagagaaaaagattgatagaaactgaaaaagtggaagggaataaagtgccaacaaatgtaaaagaagtacaagagacggaggatggagaaaagaaggatgaaaaggaattaaaaggaattggaaatgaaagagatttgaaggaagttaatgaagaggaaaaagaaaagaaagacaaaaaaggaaaagaagaagcaaaaaagaaggaaattgtgttaattgattcggaagaagattggaaaaaagtgtcccaacatgaagacgaggtttcgttaggtcctgaggaggaggacgacgaggagcgaattttattcccaactccaaagggtgcagaacttcagaatttgagtttttgggaatcgtgccataataaagcaaaaagtagaggcgaaatggaagaaaagtcgagagaaaaggaaaagagggaaacgaacgccttgcgtttggcacgagccgaaattcgatcggcggaattaagcataattgaaaaaagagacgaagaaattccgccggaagggaagagaatcagaaatgaattggacattaattgcgaaacggaagaagaggaaaggaaccgaaaaaaataccgagctcatactcccggtacgggaatggcgat

SEQ ID NO: 41402 - DNA, 153 bp, Heterodera glycines
ttgatgacgacattaggaatattaaatggttttatatttgaaagaatattaaaaatcaggacatatttaatgcttccgattaattgcttaaatcaggacaaattcaaaaaatcggtatatgataatttaatatgtattttgaaaatattttgc

SEQ ID NO: 41403 - DNA, 1238 bp, Heterodera glycines
  unsure (1)..(1238): unsure at all n locations
gggattcggtctccccataaatctgggcgcatcggttcggggggactgccccgaaaacaaaaaaattgattttttcaagtgtccgtttggggtactcaaacaattatggggagcaaaaatccaacgcagaattaaagtacaggctatagggaagctattcccgaaggattcggtctccccataaatctgggcgcatcggttcggggggactgccccgaaaacaaaaataaatcgattttttcaagtgtccgtttggggtactcaaacaattatggggagcaaaaatccaacgcagaattaaagtacaggctatagtgaagctattccggaaggattcggtctccccataaatctgggcgcatcggttcagggggactgccccgaaaacccaaaaaaaaattttttggataaaaattatttaaatgaactgactagataatatttaaaataggttatttctcttcctttcagtatccctgcaaagtttggtgcgcttctgatcagtttctgaaaaaaaagttaagcctaaactttttggcctgtttaaaaaggaattaaaaatttttaaaaattttattcatctccctttttgatagaaaaagcatcagagtgcctaaactaacatgtaaataaaatttggtgcgtttcagaaccctttctgaaaaaatatttaagaattaattttgcaaaaaataaataaaaacgaaagactcagattttcgaaaatttttttgagccagctagctcggcgctcatttcagtgtaagttagtcctttaccggggagtatccctgcaaagtttggtacgcttctgctcaattagcaaaaaatatgagtgatcgaattttcactaaaaaagttaagcctacattttttggcatatttaaaaagaagttaaaaaatttttaaaatttaataattttcctgcaccgaaggaactcactcggactcttcgcggactcgtggtgggccttcgttcaggttaagttagtcctttacaatggagaaggcctgcaaaatttggagagattatatcgattttagtgcgctaggttcgatgaaactttttaaaatataagcctaaactttttggcctgtttnaaaaggaaattaaaatttttaaaatatttattcatctcccctttgatagaaaaagcatcagagagccttatntaacttttattaacatttggtgcngttcagagcactttctgaaaaatacttatgaattaattttg

SEQ ID NO: 41404 - DNA, 998 bp, Heterodera glycines
  unsure (1)..(998): unsure at all n locations
aattactttttatcggcaaaacatttcagattcaattgtttgtcaaaggaacacactttggccgtgtcgtgccatttttggtccaatttcacaagcgtatggttgtcaagtgctgtgtgaattttaaaaatttatatatttctaagatttgtaaaatgaaaaattgccaaactattaaaaatattttatttttcaataataaattccaaatgatttcctctctctattagttaattaattcaaaaagaatttgccaaattgtttcactaccgtagagagggtcaaaacgctgtgcaacattttcgttgagtctttttacggattaatatttaagctgtgcaattaaagcaagtgaaaaggaagtggaaaaagcagtcgatgagtgctacatggagcacaatgtggtcaaagtttatttgttagcacaatcgttgtgaatgcatggaaaacaatgtgccatggtaaaaaaggcaatgaaattatttaaaaatataattaaatattaattattatgtaaaatgatattaagcaatggttacggtattgagaaatactgtgagaaactgaaaagcgaaaatgttgtccgacaaatcatttgttaatgaaaagttatgaagtgaattagcaagataacagccgattaaccttgtcagaaaatgtgtataaagatgaaacttttaaattttgcacaaaatctgaacgaacttttgtataaattatgaaaatcaaaaatatttattaaaattctgatacttttgtagaagcacaggaaaacaaggattagaaatagtataatcaagatttgaaattttaaattgattaataatttaatgtaaatccatgaattttaatttctttactttttcaaagcacttttgttttactatagctnttaagaatgagtaacaataatgtataaatgaggtggataagaagctttaataaaaactaaattacaaaaattgccaataatcatataaaataggaaaataattact

SEQ ID NO: 41405 - DNA, 1264 bp, Heterodera glycines
  unsure (1)..(1264): unsure at all n locations
tgcactgagcagattcncagatacgcaaggaatctgtgtaaatacatgtaaaaattgtttttgaggtttttcaactttntcgggaatgataattttctttntaaagatatcaaattcgaatttcaaactaaactntaattttcaagggccaaaaatttaaatactttcaaaatatacaaaaaaaattgaaaattcctgtaactcaaaataatgtgcatatttgtgatcagcagcccaaattacgtttgaaaaatatgttttgaaaaatttagagttaaaaaatgtgtgcatgaaatactttcaaaatcagttttattttataacttttttaaaaaagtgataaaaatcttggataaatacgtatatgattttaaaattaaataaattaatttacagcatatgaaaaataatctaataaaataaaaaaaataattttgacttaataattagccttaaaaatagctgaaaataaatcaaaaattgatttacaccgtccggattcgaacttcgccccagaccccctcagaataatgctcagaatccccaatcacacagggattctgaggccttaacgatgtcatatggctaatctgatttcagattcgtgatcagcgtcataaaatatccttaaagacatttttttgaaagatttttgatgaaaaaattttttcactcaaaaatactggtcagaccccttttgtcccgaagccaaaaatcacttttatttttataacttttcttaaaaaaagtgataaaaatatgaaataaataacttcttgtagagcaaaaaattgcggattttatcactattttattataccttagcgccttttttgaaatgagatatgcattttttagtggaaaattaaaatttttggctttttcaggaataacttttttccttttaacggtataaacactcgaataaaatatataaaatttgcccgatttttctctattatttaaactttaattgagcagattttgacctatttgaggggagttgtaaattttcaaaatttagtttaaattttaaagggcaaaaaattgtaaaaattcaaaaattcaaaaaaaattcaaaactccctgaaactcaaaataaagttcatattcatgatcagcaacccaaactacataagaaaatgtgtttttgaaaattttaaagcaaaaaaaatgtgtccatgaaatttccaaagcggtatccctttggattttagctacaaaatcacttttattttttaactttttcaaaaaagtgatgaaa

SEQ ID NO: 41406 - DNA, 940 bp, Heterodera glycines
ttcatctaaaaggtttttcataaaaataacaaatttataaactaaaacttattatttttaatattaattttgatttatttttattttattatattaaaatatttcagatgtgatctgtttctatttaatgaaaatacaatactaaatttgaattacagaaatatattaaaaaaaaatttaatatatttttattcatattgaaaaacagagaatttcttagataaaaaataaaaactgatttaagcatgaaatgatttatgcggctttatggcttatctttaaaaatgaagaaatttggctacaccttatgctgctggtcatgaaaatgtaaattttttattaaataaaatttagcactttgtcatattagtgaatcgcattaaatacatcacgcagaattataaaaaaaatatgattatgattacgttgtttaatgatgtcatttctcaaacgcagcatctcgagaaaattgccaaatttttaattgattattttttaataaaaaaattttaataataaaaaaatatttgaattatataatttaattcttattttatttttatattcgaaattataaacttggatgtatattaatttaattttagctggaaaaaacacaaaaaaagaacaacaaaaactgagtgaaaaagtctaaaaatttcattacaaaaaattgcccttaattttaaaattataatttttggatcaaacgtttaaccggcaaaataaatcaaggttatctcgaatcaaagcataattaaaacaaattgtgtgcttttggttgatggagttgaacatctttcactaatcagcagaagtcagctgttcctccgaaaaagcgagattatttaccaaatgagagatcggaaaaagaaacgagagtgactgcgaaataatgggcactattttcacttttttggatgtattttaatctaatttt

SEQ ID NO: 41407 - DNA, 994 bp, Heterodera glycines
  unsure (1)..(994): unsure at all n locations
agcagaaaaagagatagacgttttttcaaattttcagagccaaactcgcccagaaagaaaatccagaaaaattagggtcgtcgctattattccgaaaatgtggttggagttcatttgagcgttgagcagaaaaagagatagacgttttttcaaaattttcagagccaaactcgcccagaaagaaaatccagaaaaattagggtcgtcgctattattccgaaaatgtggttggagttcatttgagtgttgagcagaaaaagagatagacgttttttcaaaattttcagagccaaactcgcccagaaagaaaatccagaaaaattagggtcgtcgctattattccgaaaatgtggttggagttcatttgagcgttgagcagaaaaagagatagacgttttttcaaaattttcagagccaaactcgcccagaaagaaaatccataaaaattagggtcgtcgctattattccgaaaatgtggttggagttcatttgagcgttgagcagaaaaagagatagacgttttttcaaaattttcagagccaaactcgcccagaaagaaaatccagaaaaattagggtcgtcgctattattccgaaaatgtggttggagttcatttgagtgttgagcagaaaaagagatagacgttttttcaaaattttcagagccaaactcgcccagaaagaaaatccagaaaaattagggtcgtcgctattattccgaaaatgtggttggagttcatttgagcgttgagcagaaaaagagatagacgttttttcaaaattttcagagccaaactcgcccagaaagaaaatccagaaaaattagggtcgtcgctattattccgaaaatgtggttggagttcatttgagtgttgagcagaaaaagagatagacgttttttcaaattttcagagccaaactcgcccagaaagaaatccagaaaaattagggtcgtcgctattattccgaaatgtggntggagttcatttgagtgt

SEQ ID NO: 41408 - DNA, 1319 bp, Heterodera glycines
  unsure (1)..(1319): unsure at all n locations
gctggtgggttgaatcccagagattgaaatgctggtgggttgagtcccagagattgcaatgccattgaaagttggtgggttgagtcccagtgtctggaatgccggagatttgagtcccagacattgaaatgctggtgggttgagtcccagcgattggaaagcctatgaattgagtcccagagattggaatgacattgaaatgctggtgggttgagtcccagtgtctggaatgccggttatttgagtcccagagattgaaatgctggtgtgttgagtcccagagattgaaatgctggtgggttgagtctcagagattgaaatgctggtgggttgagtcccagagattgcaatgccattgaaagttggtgggttgagtcccagtgtctggaatgccggagatttgagtcccagacattgaaatgctggtgggttgagtcccagcgattggaaagcctaagaattgagtctcagagattgaaatgctggtgggttgagtcccagagattggaatgccattgaaagttggtgggttgagtcccagtgtctggaatgccggaaatttgagtcccagagattgaaatgctggtgtgttgagtcccagagattgaaatgctggtgggttgagtcccagagattggaatgccattgaaagttggtgggttaagtcccagtgtttggaatgccagagatttgagtcccagagattgaaatgctggtgagttgagtcccagcgattggaaagcctgagaattgagtctcagagattgaaatgctggtgggttgagtcccagagattggaatgtcattgaaagttggtgggttgagtcccattgtttggaatgccggagattttagtcccagagattggaatgccggagaattgagtcccagtattggaatgctggtggcctgattttcagtgattggaatgtcattgaaagttgttgggctgagtcccaatgtttagaatgccgcagatttgagtcccagtgtttggaatgccggagatttgagtcccagtgtttggaatgccagagatttgagttccagtgattggaaagcctgagaattgagtcccagagattgaaatgctggtgggttgagtcccagtgtctggaatgccggagatttcattgtttggaatgccggagaattgagtcccagagattaaaatgctggtgggttgagtccaagtattggaatgctggtggcttgattttcagtgattggaatgtcattgaaagttggtgggttgagttccagtgtttggaatgccgaagatttgagtccccagtgtttggaatgccangagatttgag

SEQ ID NO: 41409 - DNA, 1068 bp, Heterodera glycines
tttatccaaaaatttttttttgggttttcggggcagccctcctgaaccgatgcgcccagatttatggggagaccgaatccttccggaatagcttcactatagcctgtactttaattctgcgttggatttttgctccccataattgtttgagtaccccaaacggacacttgaaaaaatcgatttatttttgttttcggggcagtccccccgaaccgatgcgcccagatttatggggagaccgaatccttcgggaatagcttccctatagcctgtactttaattctgcgttggatttttgctccccataattgtttgagtaccccaaacggacattgctttttaaatatgccaaaaaatgtaggcttaacttttttagtgaaaattcgatcactcatattttttgctaattgagcagaagcgtaccaaactttgcagggatactccccggtaaaggactaacttacactgaaatgagcgccgagctagctggctcaaaaaaattttcgaaaatctgagtctttcgtttttatttattttttgcaaaattaattcttaaatattttttcagaaagggttctgaaacgcaccaaattttatttacatgttagtttaggcactctgatgctttttctatcaaaaagggagatgaataaaatttttaaaaatttttaattcctttttaaacaggccaaaaagtttaggcttaacttttttttcagaaactgatcagaagcgcaccaaactttgcagggatactgaaaggaagagaaataacctattttaaatattatctagtcagttcatttaaataatttttatccaaaaaatttttttttgggttttcggggcagtccccctgaaccgatgcgcccagatttatggggagaccgaatccttcgggaatagcttccctatagtctgtactttaattctgcgttggatttttgctccccataaatgtttgagtaccccaaacgacacttgaaaaatcgattatttttgttttcggggagtccccccaaccgatgcgcccgaattatggggagaaccaatcctccggaatagctt

SEQ ID NO: 41410 - DNA, 1358 bp, Heterodera glycines
aagataatccataaaacaacaccgaatttagcctcccaaaatttcaaaacttatttcgaaaaaatatcaaagcaacaaaagaaatctgttgcaaattgcaaaaacaccaacaaataagcgtacagctaatgcattgtctattttgcaagaaaaccattcgtttttgtatctcacaaaaaatggaatttctgctgattttatcttacttaagcaaagctaatagaaaaaaagaaagaaaacgaatcggaggggagagagcacagaagaaaaggacaaaatgacaacttctgctggagaatggaagaataaacagaaagtgagaagatgaaagaccaacgaagcgtgggaggaaatgtgccgaaggcgcggattgtccatcgacaaattaccgtggcgcctgatcgcgatcgcgcaagaaatatcggctctattgtatgcagttcacacgaccataaaaaaaagacgcgaccataaaatatttttgtaaatttaatgcaacataacttcttcaagaagcacccaaattaaacattcttggtatcattcggtagccctaagagtcctttattagcttgcttgaaaaatttcaaaaaatttcgttggggttcaaaaaagttgtgctcaaaagtactaaaaaaccagttttttgaaattttctagccataactttttgaactccaactaaattttttgaaattttacaggctaatagaggactcttaggggctctcaaatgacactaagaatgtttaatttggatgcggatgcttcttgaaaaaattatgttgcattaaatttgcaaaaatattttatggtcgtgtgaactgcaatagagcgccgaaatatcacggtcgcgttctgtaaatctctggtattcattgcacgtaatttcagtcagttcattgccggtcattgtgcggaaggatgagaaaaattttaaaccacctatggacctgccgttggatgcttcaacaatttaatttataagcataaactaatgaagaaccccacccaaaaagattggagcccggggcaattgtcaaaatgaaaagcaaaatttttaaaatttggactatttgttctgtccccattttcctcatcaatcgcacactttttgtgagcggacttgggtcaagaaatggttagctgtgaagatctgatctaatacccaacctatacgaaagtccaaaaattatcagcaaattcgttcctaaatcgtttatctttaagcattaccaaaagttgaccgaatgagcaggacagttgctgctgactgtcttacaattagtcgcgagcggagaaatttttgcgttcttatttgcggagtccatttcattttaaaataacattttttatac

SEQ ID NO: 41411 - DNA, 1223 bp, Heterodera glycines
  unsure (1)..(1223): unsure at all n locations
cgtccaaatcggccccataatcctctctttcggccatcactatccgtctttgcaaccaattgataagttggtccgccttatgcataaattggaagtagcgaagggaatcgcctaaattcagaggtcgtcccatccgtcgttcgtttggcttttcctttggcttttccttttaccgatttgtgcctttctttgttggcattggtcactcagctgacaaaacaaattgcgaatgtgattcatgcgggttttgaggtttgccgagtcgaagtgctcctcgcggaccttcaaattcggcgaatttccccaccaatcgctttttttcgccattttgtaccatcgtttcgcttttctctcccaatcgctttaactgatcaccgaacgttttgatttcctgctccattactccgagtcgacgaagttgcacttcggctgtgttggctgagtcgggctgagctgacgaggacaaaatgggcgacctgagcaaagggaggcgattagaacaatgaatggccgaagagaagcgaggcgagactctcgagaaacacaccccataattanatgctaattaatggtcagctaatgaccccctcccccgcttcacctctcgcgcatccaatgttcagcttccatcgcttccgagtaaaacacttgcgactgcaaagactcggacaagcgctgcgcacgctgagaagcgatttcacggaaagacgcggacgaatccttcgaaggaatgaaactgtccattcggactgggaaatgccaacctgaagtcgtgccaatcggtcggtcagctcgcccttcgcgtcgtcgccttgctctctcagcattcgttctccgtccgttaccaatttggcaatggtaggttggcggacgacgaattcttgctgcagaatttggtgtttttggatcagagattgggccgcgtggaaggaacgaccgtagtcataactgaaagtgttagggattggcatatggtatcatactgtaattgctatacttttcagcccattggcccatcacttcatcccattcttcgctacctttgcattgagctcagcttggctattagccaccccaactgatcgtccgcctgatcagcccatgcgaaaaatctgatcacttcgcgcaaattcgcctcgcggatttggcacggttcgcccagtgcttcccatcgcttgtgcagtgattgcagtcgttcgttctgttctttttctcttcctttg

SEQ ID NO: 41412 - DNA, 1108 bp, Heterodera glycines
  unsure (1)..(1108): unsure at all n locations
gcgataaaaacatccgaatcaattaatagcttttgagatataagttttatcatataatttcatttaaaaataaccctcaaattatnggtatgaacgatactttccaaacatgcacgcgttttgcgctcgagctatttatcatcgggcttgtcaatccaaagcgaaacaacaaagatagtgttttgaacaaataaagggcataggttattttgaagaagtgtcaaagaacatgcagcaataagcctgcaaaatctaataagtggaaaatacatgagtatagaatttattttcagaaagtgtccacagacttttggaaaaatatatttgcaatttatcaacaattttgagaagtgagatagaaatgataaacttcacgattcaaaccaattttcggtgctctaattaaccgcgataaaaacatccgaatcaattaaatagcttctgagataataaggtttatcatataatttcatttaaaaataaaccctcaattattggtatgaacgatactttccaaacatgcatgcgttttgcgctcgagctatttatcatcgggcttgtcaattcaaagcgaaacaacaaagatagtgttttgaacgaataaagggcataggttatttgaagaagtgtcaaagaacatgcagcaataagcctgcaaaatctaataagtggaaaatacatgagtatagaatttattttcagaaagtgtccacagacttttggaaaaatatatttgcaatttatcaacaattttgagaagtgagatagaaatgataaacttcacgattcaaaccaattttcggtgctctaattaaccgcgataaaaacatccgaatcaattaaatagcttctgagataataaggtttatcatataatttcatttaaaaataaaccctcaattattggtatgaacgatactttccaaacatgcacgcgttttgcgctcgagctatttatcatcgggcttgtcaatccaaagcgaaacaacaaagatagtgttttgaacaaataaagggcataggttattaagaagaagtgtcaaagaacatgcagcaataagcctgcaaaaaaaaataagtggaaaatacatgagtatagaatttattt

SEQ ID NO: 41413 - DNA, 584 bp, Heterodera glycines
  unsure (1)..(584): unsure at all n locations
ttctttcggtaactgtggtctttccggaatcaatccgttcaagatattcctgaaaaaattagncaaatttaccaccgccttgcaaaaactgttctgaccaacattccgtattttctgaaaagcattctttaaatagttaaggatttatgaaaaatacctctgctggtaaaacattagcataggataacaaatctggtttcaaatttttgtctgctgatgaataataacggaattgagtaaatcgtaaaaagtttatacggctattcaatactttgatcattttctaaacttttgaaaaatatatgtgcatattgaaaattataaaaacataaacagaattcgaacccgtgaacccttttttccagtttaatatagcagcaggggttgtgtgtttgacagctcttttcaactggcagctatgtcaattcgtttcatttccattgttcctccaatttataattatttcaattgtttatttttatttttttagtattacctaattaagcaaacaaccacataaaataattggcgctatatgaaaaaaggcatattttttgaaaattttttcaaaagtgggggaccct

SEQ ID NO: 41414 - DNA, 1391 bp, Heterodera glycines
agcatctgtttcatcgcagcaccggcggattgacaaatccaaacaatttatctccctgcgagattattgcaagtattatctcgcaataagggatgaaaatgtggagttgcaataccaccacattctttcatgtggtggaggacttggtcagcgctggatccttgaccaggctgcaaaaattgattggcaaatagcaacatttttgcgtagacctgacatggatctgcggatcagcactccaaaaaatctgctgcagtatttggtcaaccaatacaacaggcagcaagcacggcaaaaccccaatgcccaacagaaaactgttgatgacattggcagtgttgttcggctttccgaacacaacgtaaattctctccaatattggaagaaaatgtatgaggattgcaacaccgtttttgcacggtgtcatgacgcgaaaaaggcgcgtctcttcatcacattcacgaacaacagggaatggcctgagttcaaagagaatatatataaaaacggtcaagtatttactgaccgttttgacatgtggatgcgtgtctggagcagcaaaatcgctgagttccgagaagaactttatgacaaaaagttcttcggaacaatccttggttacggtgaatcaatggagttccaaggccgaggaggcccacatgcccacattgtggcgcaaacagacctggacgcagttccatatgtcattcaggaatacatatgggcgcacattccatctttgcctgataaagatgacgacacgcccattgcaaaaatgcatcgcgaaatccgcgaaacaatgcatatgcaactgcacagatgcagtgacagttggtgtggtcctagcgacccaatttacgggcggtgcaagaaggggttcccagccccttactcaaaatgtacgattttgcgcccggacaggcccgcgatgtatttccggccttcaccatctgatggtggtgcccaattagaggtaaacggcttaatatacgacaactcacatgtcgtgccgtataatccttatattctgctgcgttaccgagtacaccataatgtactgtttgcatatggtaacaaagcaaatattaaatacgcactcaagtaccctttcaaagggccaggacattgttatgtcgagtgcaaagaagagtccggcaataaaattggaattgatgagccggctcaatatgccaagatgaacttccgtggtgcaacggaagcatatgccattgttcattcaatgccatttgcccgtctttcgcatcatgttgtcaaattggcaattcatttgccaaaccaacagcccattgtatatagggcattccagctggtgagcaaagctcaacaaatccagcaaggcgaactgccagaaacgcagtgttcagcctatt

SEQ ID NO: 41415 - DNA, 994 bp, Heterodera glycines
acacccatatatcattgtcacttttaggctcaccattccggcttagaagaaagtatccattaacccatgcccttggtcatttcgaccgtctaatgaatgaattaccattttaataaaataaatttacaaaaaattcctctccaaagcgcccaattttatttttatggttttagttgttaacttcatttcagtaatcgtgatacaagcatcgtatattgtgaatcatatgaataaatataaattttttattatatctatctattaaaaaatgtttttcttttagaaatacaattttttgcaatattcttttgcctctcatcaaagccaccattaaaaaatagaaaaattttttttttgctggtatttgtcgcgttgccatccacgttgaacatgtgttattggcatggcatgcatatatggatttatttatttattattgtcaatctcattcattatcttttcaaattattgcattttaatttgccaatttgtaaaaaaaaaaattggatttttacatataattaaagtttcacaatcattaaaaatggacaaaaattcgctgatcatcactgttctgctggtgctgatcactggtgccgtgatgatgatttgccattgtgtgccggttaacattggcccaaccataaatgccaatccgaaatttgatgcaaatctcgctgtagcatatgcagaaattttgcaagctgcaattatgacgaagaaagaggcacaaaaaaaaattgtcaaaattttttgaaatttttttttataaattaaggctattgttactcaaattatctgctccattgacaaccaacaggtgggatgctgaggacaagctgtggagggagttcagctatgcctattatgcctaaaaactcgggcatttaacagcataattatgctcctaatttcctcaaaaatggccattttttgtctatatacagcaccgccgaccccccaaattcccctaaaattacaaaaattttgacta

SEQ ID NO: 41416 - DNA, 973 bp, Heterodera glycines
taaatagattttatagcaataaaatatttattttaaagaaatagtttttatagcaataaaaatattaattttaaagaaatagtttttatagcaataaaaatattaattttaaagaacttaagtttgtaacttttattacatgtattttaaatattcactgactcaaacaatcaaaaattattttttaaatttaaagttggtgtcgggttttccagtgtcggatttaccgctagtgtcggattttccaccggtgtcggattttctgcttgtgtcggattttccagtgtcggattttccggtgtcggattttccagtgtcggattttccggctcccgggggggcgaaggcccaccacgaggccgcgaagaggccgagtgagtaccttcggtgcaggaaaattattaaattttaaaaattttttaattgctttttaaatatgccaaaaaatgtaggcttaacttttttagtgaaaattcgatcactcatattttttgctaattgagcagaagcgtaccaaactttgcagggatactccccggtaaaggactaacttacactgaaatgagcgccgagctagctggctcaaaaaaattttcgaaaatctgagtctttcgtttttatttgttttttgcataattaattcataaatatttttttcagaaaatgctctgaaacgcaccaaattttatttacatgctagtttaggcactctgatgctttttctatcaaaaagggagatgaataaattttaaaaatttttaattcctttttaaacaggccaaaaagtttaggcttatcttttttttcagaaacttatcagaagcgccccaaactttgcagggatactgaaaggaaaagaattaacctgttttatcacattagcttgtcatcagtttttataaaaaattttcaaaattctgagtctcctattattttatttatttttcaaaattttgaaggcgggggggggggg

SEQ ID NO: 41417 - DNA, 897 bp, Heterodera glycines
agacaaaagatggtgtccaattcccggtagggatttaatatgactttcagagatagccattttttgtcaataactatttttcgtgcgttttcaaacacactattagtgctttattcaccgctacaatagaagacaaaagttggtgtccaattcccggtagggatttaatagtgactttcagagatagccattttttgtcaagaactatttttcgtgcgttttcaaacacactattagtgctttattcaccgctacaatagaagacaaaagttggtgtccaattcccggtagggatttaatagtgactttcagagatagccattttttgtcaagaactatttttcgtgcgttttcaaacacactattagtgctttattcagcgctacaatagaagacaaaagttggtgtccaattcccggtagggatttaatagtgactttcagagatagccattttttgtcaagaactatttttcgtgcgttttcaaacacactattagtgctttattcaccgctacaatagaagacaaaagttggtgtccaattcccggtagggatttaatagtgactttcagagatagccattttttgtcaataactatttttcgtgcgttttcaaacacactattagtgctttattcatcgctacaacaaaagacaaaagttggtgtccaattcccggtagggatttaatagtgactttcagagatagccattttttgtcaagaactatttttcgtgcgttttcaaacacactattagtgctttattcaccgctacaatagaagacaaaagttggtgtccaattcccggtagggatttaatagtgactttcagagatagccattttttgtcaagaactatttttcgtgcgttttcaaacacactattagtgctt

SEQ ID NO: 41418 - DNA, 859 bp, Heterodera glycines
caacaaccgtcgaatgggtccctacccttcggcacaatggccccgtttgggttttgcctgcgggtatgccatccctttcgttttgcttctctccccacagttccatcccttcgaaagttttgtgccccgtcattcgttatttggaatgcgtgttccttttcacttccatcctcacccaacttgtcgtttgcgtggaacggtcggtgatttgagctcggaacattcgccttttgatcagtttttctcctttttctctctctctgtctctcattctctccctttctctctccttttctctctctctctctctctccctttcatctgtctctcattctctccctttctctctctctctgtctctccttctctccctctttctccttctctctctctctctctctctccctttctcaatctttctgtctctcattctctcctcctttctctcaccctctccctccctctctctcattctctctctcctttctctcaccctctccctccctctctctcattctctctctctctgtcccgtcttccgttcattccgatcactttcacttcctccccccttagatttattgccattgccgttccactccatgcgcgccgtctctgttctcgcaagaacattctgctcacaatttgtgccgtttggtgcgttgtcgctttggccgccttgccatatgcgacgcataacaaaaaggcggaaaactgtaagagacggcacgcgttttgagaaggcaatccgacgattgaattgttttccgtctttcagcttttgcgtgcacaaattttcacaaggaaaagctacttttggcacttttataaatttgccgaggcccgtcccccccccccc

SEQ ID NO: 41419 - DNA, 1113 bp, Heterodera glycines
tttcccgtcagaaaattagaatttttttaatttaatattatattacatttattttttaagagtttgataatattaaacatttcttcgagcatttaatttttattaaattgggtattggacctttcggcatatattttgggcatttcaaacagttgacttattattaggcttataagttgtatgcactaaatgccaaatatgcacataaaatatgtactaaaaaccataacaatgcctaaatatgcacttaaaaatccaacaaataagctctaaaaacccgaacgatgcttaaatatgcactaaaaatcccgaaaaatgcaccaatataaaccaatgcggaccccaaattacctaaatttctaaaaattatccaccgacaagtgaaaaagcatctaaaaggccccaacctgcgttaccaaattccctgggtattcaacagaaaaattaaaattgtttgcgtaaataatttcttcaaggtttttggctcttcactggcagcactcactcatcacaaacacttgatgtttttcaaagtatttgctccgaaatttgtttttgaagctgcagattttattttttgttgtgctcttatcgtcttttgggcgattttacgggtgaaagaaccgatcaaataattttaatgtttttatttttgcaatttttaggtctcgttttgtacctatttattttagataaataaatcgaaaagctaagaaaagtaggatatgtttagaatatcatatatgaacgcggggagagtcgacattgtatattgaatagcaaaaagaatacaccgggaaacattttttataaaacgcttttactaggtcgttgcataaaaaagggcgcttttttataatggcttataaaaaattttgttgttaacataataaaatgttttatatgccgttttgttaagctaattgttgtctacaaaatagtatattgattttgttcatatctcaatttgcaaattttttatagctaaaaaaatgaacactaataaggagcacgcacataagctattacaccagcaatttaaaaaaggcgaaaaagcggcgcctgcggcgcgaaaagtgaatgaatttctcggcgcggatgtgatctctcctc

SEQ ID NO: 41420 - DNA, 1469 bp, Heterodera glycines
ttcgaaagctcttgatggggagaagctttttctaagccaatgctaagcattttgacgttatgtaaaaaagttcgaagacttaaattttcataacggtctcatgcaaaaatgggatagaaaatcgtaaaatcttatagaacattcgatgcagaatttttttctctatcgacatgcaaaatttgaagcggatttaacaagcaaaaaagttaaacaggatgaagtaaattcagtttttctctattaacagagataaagaaatagtacgccaaaaagagagatgtttttttctctgcgctctctctttattggttcatctctcgttttttgaaacggtgtgtatattaatttaaatttagtggattttgggactaaatttcggaaattttggggcttaatctgttaaacgattttgcacctaaaaaagaacgatttgctgatttttaggcaagtttatgtataaagacatatttaaattttattatttttaattataggaaattacaaaaattaattgttttaaagaatatttaaaatatatacatataaataataaaaaatttattgtgcggagatcagaggtggagtcgcggtcgcactccacccctgctgctggtggagatcgaacaatggcagaaattctgaaggtttagccacaaggctacagtaaataaattcaaataaataccgtatttatggtatttgaacccccctcaaaaggggggttctaattcaggggggggggggggggggtcaaaaaccgtaaatacggtatgtaacattgtttgaattaaattcaccaggatttaaaatttctgtgaaatgaaatgaaattaatttaaggccgtggagcggccgccaatggcgagcttgagtcgattgataaataattaggtaatacattttcaatcccggcattttcttcacttttcccttaaattcaaaagcaaaattgtgagatgctggttgaattctagggtcgggctcgtttctcgtggccgagtttttggaccataacttttttaattgttgactatatttaatatcctcgcctaatccaaaaaaaatcattatctctttattatgcttcttatacatgacataggttgggcactaaagcaactccgctgtgcttgaccactgaatttcaaataactggtaatttttatttctccggcctaatccaaaaaaaatcactatctctttttttggaatattttacgtgtcaaagggtgtgcatttaagcgactcgctgtgcttgcccactgcatttcaaatagctggtaatttttatttctccggcctaatccagaaaaaatcactatctctttttttggaatattttacgtgacaaagggtgtgcatttaagcgactcgatgtgcttgcccactgcatttcaaatagctggtaatttttatttctccggcctaatccagaaaaaatcactatctctttttttggaatattttac

SEQ ID NO: 41421 - DNA, 1145 bp, Heterodera glycines
tttttttatcaaaaagggaagatgaaataattttttaaaaaatttttaattcctttttaacaggcccaaaaagtttaggctttactttttttttcagaaactgatcagaagcgcaccaaacttttgcagggaaactccccggtaaaggactaacttacactgaaatgagcgccgagctagctgggtttaaaaattttttcaaaaatcaaagtctttcgtttttatttaattatttattattttttgcaaaattaattcataattattttttcagaaagtgctctgaaacgcaccaaattttatttacaagctattttaggcacgctgatgctttttctatcaaaaagggagatgaataaatttttaaaaatttttaattcctttttaaacaggccaaaaagtttagtcttaactttttttttcagaaactgatcagaagcgcaccaaactttgcagggaaactccccggtaaaggactaacttacactgaaatgagcgccgagctagctgggtttaaaaattttttcgaaaatcagagtctttcgtttttatttaattatttattattttttgcaaaattaattcataattattttttcagaaagtgctctgaaacgcaccaaattttatttacaagctattttaggcactctgatgctttttctatcaaaaagggagatgaataaattttaaaaaatttttaattcctctttaaacaggccaaaaagtttaggcttaactttttagtgaaaattaatttactcatttttcgagtagtgatcagaagtgcaccaggttttgcaggagcctaaaaaggtcaaggaaaggcgtctctgcgttgatttagcagtagtacctatgaatttaaatttcctatgaatttttaaaggttcacaatttatttattttttgcaaaattaattcataattattttttcagaaagtgctcttaaacgcaccaaattctatttacatgttaaataaggctctctgatgctttttctatcaaaaaggaagatgaataaaattttttaaaatttttaattcctctttaaacaggccaaaaagtttaggcttaactttttagtgaaaattaatttactcatttttcgagtagtgatcagaagtgcaccaggttttgcagg

SEQ ID NO: 41422 - DNA, 1181 bp, Heterodera glycines
aaaaaatatttaggaattaattatgcaagaaacaaataaaaacgaaagactcagattttcgaaagtttttttgaggcagctagctcgccgctcatgtgaagagtaagttagtcgctttatgaaggagtatgcctacaaagtttggtacgcttcatgctcaattagcaaaaaatatgagtgatggaatgttcagtaaaaaagttaagcaaacataataaggcgattttttcaagtgtccgtttggggtactcaaacatttatggggagcaaaaatccaacgcagaattaaagtacaggctatagggaagctattcccgaaggattcggtctccccataaatctgggcgcatcggttcggggggactgccccgaaaacaaaaaaatcgattttttcaagtgtccgtttggggtactcaaacaattatggggagcaaaaatccaacgcagaattaaagtacaggctatagggaagctattcccgaaggattcggtctccccataaatctgggcgcatcggttcggggggactgccccgaaaacaaaaaaatcgattttttcaagtgtccgtttggggtactcaaacaattatggggagcaaaaatccaacgcagaattaaagtacaggctatagggaagctattccggaaggattcggtctccccataaatctgggcgcatcggttcagggggactgccccgaaaacccaaaaaaaaattttttggataaaaattatttaaatgaactgactagataatatttaaaataggttatttctcttcctttcagtatccctgcaaagtttggtgcgcttctgatcagtttctgaaaaaaaagttaagcctaaactttttggcctgtttaaaaaggaattaaaaatttttaaaaattttattcatctccctttttgatagaaaaagcatcagagtgcctaaactaacatgtaaataaaatttggtgcgtttcagaaccctttctgaaaaaatatttaagaattaattttgcaaaaaataaataaaaacgaaagactcagattttcgaaaatttttttgagccagctagctcggcgctcatttcagtgtaagttagtcctttaccggggagtatccctgcaaagtttggtacgcttctgctcaattagcaaaaaatatgagtgatcgaatgttcactaaaaaagttaagc

SEQ ID NO: 41423 - DNA, 1006 bp, Heterodera glycines
cgccgatctctaattgctccacaatttgaaacatatctttatatttaaactaaaaaaatgatcaagttttcataaaagcattataattctgttttgcctcatttttagcttgctaatattatcgttttcagcttgctaatattataccttttttattaatttaaaattaattacgagtggatttatgtgtcggccaaatcgttttctgccgttaaatgtgtggcatttgggctgctcgtatttgctgatcacattcacttcacaattttccgaagtgttcaccctaattttcgtgcctttctgtcctatttttcgcaaaatggccacacccatcaaccaaaagcctcaatattcctccagaaaagcaccatttgcaatttgtgattcaaattctttgccaaatttcgataaaatcgattctcctaaatttaatacgaattatccacttaattttacctctagtttgttactatcatttgtaattatttttgcatatgaagattccattgagcttaattggattaatatctccgacaaattattgccaattcttttggaaaaataatattaatattatagtttgttcaaaattattcacttgaaatgctcagttccaattgaaaaagtcccattttgtattgagacttggatttccttttcatatttggcacaatttgtattttgcaaattagacaaatcattaagccgaaaacgccgtgccactttccaaattgaacttttatttgcaccgaataattcatcctgatagcatagaatcactctgaaaaaagtttatttagtttgattttattttatttacgcaaattaaatatatatattttttaagttaaaaagtaaatgtgttatagtaatagaaataattgcctttgacattcgccacttagcttaaattggatggttcttttgtttgtatttgccaattcaacttcacttgttttactaaattataaagaaaattcatttattttatttttttaaaaacctt

SEQ ID NO: 41424 - DNA, 1541 bp, Heterodera glycines
  unsure (1)..(1541): unsure at all n locations
ctttttattagttatttatatttcctcaattctttgtccttcttattttcaattttttttaggatttttataattcaaaataattgttccccatggagtgtgcgttgaatatgtatgcgttcgaaatatatatgaataaaaagaatttaacaattcctatatttcttcagaaaattataaaattatatcaaatttaataaattttgtttacataaataaattttggttttttctataacctgccaactaaaagtcatttaaatcagctagaatgcagtaatattaattagatcaacgttatgaatcataatgaacagacaatcatatttatttctcatattaacttatatctttattggtttttttttaaataaaacatgaaatgctaaatttatttatttatttctcaaaaaaatttcattttgatatttctgaatttttcgtattcctaatttccatgattgcatttatttttgtatttttaacaaaaagcaactgtaaattaaaccatttgttgcactaaaaccagcgtgctaattaatattcactttacttttacaaactccaaaaggacatgtaaacaaatattgttatagcattgagcaaagttacataagtgtattgatttaaattaaaaagtatttcgtgtaatttcgaaataattttaatatattcgtgcaattttttattaatgtaattataattcattacgaattttggtttgaaatttttatatttaatttaaaaaaaaatttcttgaatttggtcgcgttttagtaaaaaaataaataaaataaattaaaatggtgaatgaatatttaagtttattttaattttatgttaataaaaattgttaaattaaaatattaatggatttttaataaattctgcttttataattatttttatctaccacggattataatgatatttctgtcttttttgtatgttttaccaaataaagaatgattataataatatttttaataatttataaattaaatatgtaatttttgatttattcgctttgctctttgtaacatttatgattagttttgacttattacttacttaattatttgttgaatttgtttcatcaaaaaatttccctttaatttaaaggtaagctaactttttaatttatttttaatataaaaagttttttcgttttagtttaatttggatatatttaattctatatattaaaattaaatattagtattttttagtgtgaaaattttttatttatgatttcaacagaaaaagagatcggtagactgtgagttttatgaatttatgtggtcttttatttaataaatttttctcaaatatttatacattatccaagagtctttcgttgacactttttaaaaaagtaaatatgtattatttcgagttcatttttanaagtattttttaatgcttttttggtgttanaatcaggaaaatacacccctaaaaatgacttgaaaattttcanaaaatacaccataagaattgaaaattttcagaaattttattttttttcttgataaaaattt

SEQ ID NO: 41425 - DNA, 1175 bp, Heterodera glycines
  unsure (1)..(1175): unsure at all n locations
ggatcattggacctcaattagtcgataattctaacgaaatattcttgatttaaattgccagaaagagaaaactatcacctaacaaataatctgaaaattgagccaagccaaacaaatccaatcatttttctcgggtccgatcactttgcatttgattcgttcaatatttatctccaaactgatcagccaaattactgattgataaaccaggtttcatctaaaggattagacaattgattaatgggttaattcgttgatcaacaatattaatactgtcaatcatgcaaaaaatcagatcatttctcgtcgataacctctaattctttcaatttcaattaacactcaattaatgacaacatggggcagcactacagatcagtaaatttgtgctaatcacagcaattgtccaccaattttgcgtgttccatctcaatttgccattcattcccccccccccccctcagacgcgttgggcacccgcggcgttgcgccatcttcggacattgcgctgaattgtgccgtgatggccgagtactgccaggacaacacctaccgcgcgtacatgcaacgctgctgcgccaccacgtgcggcaacgcgggccaacagacgtgcgcggatcggctgggccatctgtgagaaaggcgaaataatgccaaaaatggaaacggcattttgaaataatgggaactaagtaatatgcccgtggcataatggcttaatcgcgccgatgcttcgcgggaacaaatttggggggataaaaaggcgggaaaaagtcacacgcaaattttttggtcgggaaacgttatcgcgactacgtgaaatagaaaaattttgtgcgctatcgaaagcgtacaaaagtttcgggaaaggaaatgggcctattaagattttcaagctaattacccatttaaataccataaatccaccgaaaaaattaactcattttaactttactatagaaattccccaaaagctttaattaaagcaaaattattggcgcattaattatggcacaatactgtagattccattanaaggcgatgttttanaagattcgtaagcatatgcaatttgtaagcataaaataaaagccactaattagtcgctaattgcgtgtgtttatttgccagantgtccatttggaatgcgcgggcctccttttgccaaagtcagt

SEQ ID NO: 41426 - DNA, 1628 bp, Heterodera glycines
  unsure (1)..(1628): unsure at all n locations
gattagtggcgcttatcagttcgagaaagcattgatcagcgagaactgttcgggaaatgccaacactggcaacaattaaaagcggaaacaaatggggggttgtgggcttctcgacccgaaattgcatctttattcggaacaaaattcagcaaaaacacccatttcattagcattttttgatagcaaaacaaaagcatagtccattagttatgttaaattcactttgtctatattgaaaaatgtttcttcatatatatccatccattgatccaatttcccatcgtatttccttgtatttgttggctttaacaaagtaaaatttttcctttttttactgaaatagcaaactttgcttacgccttaacgatccgttgaaattgggcacagaaataatcttaagatggaagttaaattgtttagttccttgagttttatttgtctccttatttctttttgagaaggacatcaatgcttcattttgcagctaaaattgatttttttttttaaacaaatttttgctaaattttttaaatgtaaattagttatctaaaaggcttaaaaactgccaaaataggtaggtctgagatactaaaatcccccccccccccaacataggcacaaaaaatggaaaatatgcactaaaaagcctcaaatttagcgtataaaatggcaaaatttttgtcaaaaagcaataaaattaagccaaatcagtgttgagtctatacaatttttaaaattaaaaattattgacaaaaaaaaaataataaataaatttcaaaaacgccaaaataaattaaaataggtttttcaaaaaattttaggctttttagtagagtagagcgggaccgggtccactgcgtttcgacaatcccgatgctgcatgatgattatcagcactgtgtagactacaccccttcgacttcctccacaactgaagaaattttgccaaatttaaccagaaaaaccaaataagtacgtgatagtatgccgccccagtggagatttttcatgggggactccttggacatctcactaatgaccattttgtatccgctgaatacacttcctgacccaacggttgtggtatcgtcaccggcgacgatactctgtggcaatccgaactccacaatttatggccggcttgggatggtagcacttcatttccccagcccacaaaatttttaaaaaatctttttatatattatctgcttaattcaaaatgaacaattctgataaagacctatcaccagaagattcttagaaaatctgcacatttttttttgcttttttcttactgaataaccttgggttaattaaattattagaatttttctctgtagaaacggagcgcaaaccgatactttggcagagactgctggcaattagtgaatagcttacgtaatacattcaagcacttcatcgccatgttcacttccgnntacccctggaattggcaaaatctacgctgacgcttcgcgctcggccgaacgccgtcagtcgcctgcggtggcgccgccctggcgcgaaagaaagggcggcggaccacacagcctattgacgccaccaaaattaaccgcccaaagtctccggcatcggccgctgaacgacaaattgaaaaagggacagac

SEQ ID NO: 41427 - DNA, 638 bp, Heterodera glycines
  unsure (1)..(638): unsure at all n locations
cttgctgcttcgctatcccgcgcgaccgacacgacacatatggttcatcnggagcgcaaaagtaaaagcagcgactagcccgtttaaatcaccaattaattaattggatacagcttaaacggcaaagaagaggaagaaggagaagcaagcaagctatgtgtgctcgaaaatgtacaaattggtagcggtgaaagcgcatataaattttttgaaaatcgtgacaagaggccgaaaagcaaaaaaaaaaaaggtcgtcgctcggaggggggggggggggggggctagcaaagggtctgaggttaccccttgttatacatatgtcattgagataggttcactgaaagccgaacaatttttatacaaaaaaaaattgaatcaatatttaaaaaatttaaaatgaaaatttccccgataatttgctgctatccataggtttggaggcatttgttttgatttgaacaaagggtttaagccaacttacaatttttacagttttacgtaaacaaagcatttttcttaaacgttaaaattttttttaaaaccgactaccccaccctcgaaaacatttgtcgggggggggggaggggggagaggtgtgcagcaacaccaccattcatctgtccgcctgctgcaattga

SEQ ID NO: 41428 - DNA, 1322 bp, Heterodera glycines
  unsure (1)..(1322): unsure at all n locations
agcatgctcttaccgcttctgatgctcggctggcaaatgctttcgcagtcgcttttggtcaggaaattgttgccactgccaccgcaacctgacaaaattacaaaataagtgagtgagtgatcgacataagcggggtaattaaactgattactctaagtggaaataattaatctctttgcgcctaagtggagaggggagtaattagcttatttcagctggttaattaagcatttcaataccgtaatattggaatggttcgcactgcgatttttccgggttgtagctccatcggtttatctttgatgctttttattggcctttcgtctcattttcaaccaaccgtaacgaatccaccaaagcaggcattgccagcagaaacgggctcctttttcaaaagaatttcagtttaaaaagtgccaatttggatttgttttcattcacccggcacacttcctccggatttgaacagcacacgaaattggacccaaaacggggctgagagcagccgtactgagatgggcacgagtcatgcgcatttgacagggcatcccccggtacacacgtggccaatgcgggcccggcacgaaggccaatgccaccctgggggcattgggctaaaaggagggagcacaatggacgaaatgccagaaagggaaattaacttactctcaaagcaaaagccttcgcattgctccaacgaatcgaaattatttgcgttgccaccgcattgcgaaaactgagaaaaacaatttaatattgaagatgcttagctctaaaaatgtacctgaaatgaacggcaagagccggttgagccgtcgaagtaaaagcgcgaaagtgccggcactccgcgcgcttggcagggaattcccgggtcctttggcagtccgcaaacgtggtctgaaatcggagggaaaatcaaacaaacggacagatcttctgataattcaggggctaaaatcgcaaattgagtgatcagccgaacagtgccaaactttgactgacctggcgatgggcagcagtactggtgcccattgttcgtcacgcattggaaattgttagggcacgggtttccccgctcgtttgagcactgagtgatgccgcccagcggactccccgccgggcacacgcctttgctggggcagcaacgcccctggcgacatccgtagcccgtaggacataaaaagcaaagcgaactcgtcaattaattaactaattaatcaatcgcatttggcatcgaaaactcacatggatcggatgctgagcacggatttggctgcatcaaaggagcttcgccgccacaaacgtctgaanagaaagctttt

SEQ ID NO: 41429 - DNA, 1398 bp, Heterodera glycines
taagtaaaaatggtcattttagaggtaggtatttttgatggctgatttaaagaaaaataaaagagatacagagccagagaaatagtgattaaatagagcaaagttaggactataagaacacaaaaacataaaattttaattacaaaaattgaattattggagagccgagactgaaagtggtctccaaaaacggcatttttcaagaccaccaagtaacataatgttttaaaagtggttttggaaattctgaatttaattaaacaaggtaaatcgggtatgttgagtttgaatatggtcttagatttggtctctgggatcgcaacaaacctatacagctcgaaattcatgcatggagttggtgaagtacaagctcaggttgaaaagataggtcccatttaaggccatattcggattctactggtctaaattgtatagaaaaactaagattttgttatatcagctttggtttttgaccataaaaaattcgagaaaaattagtgggccaattttcaattttggcatggtcgggaaaaaaggcagaaaaatctatcaatcaaataaaaagttaaacgatagtaagatattaaagaggacaccatgaagaacaaaataaaaaaagaatcatttaaataggcgcagaaataacggagttatgaatttttaaaaattggaaaaaatttgggtatcaaaaattatgttccaccctaagtattttaatttttatttgttgtagaaataatttcattttaaattttttaatatactaaatatttataaactgaaataagcttaaaatgttgaataagcataaaaaataatacagaaaaagcaattacttcacctgattcaaaccttaaattctgtaattcctttgctttttatcttggatgggaccccagggaaagggtcgttttggcacccaaattttacggatccctaaaggtccggtatttaaatgcgggtctccaaatgtcgcgccatttttgaaaatctgctcataaatttgagcttcttttttttcgttgccgagtttcgtaatcgaagttgaagagaagaattggagaaatttttattaaatttgtaaaattattaacaaatatcattcattaggtcaaattaattttctccgtctcccaaaatcaaaaatgaacagttttgggataaaattttctcgtaaaatcggccaatattggcgctccccgctcccagagaattcttccccgaggtgttgaggtgctacctacgctagatcaacctcaactgaataaatatttaataaataattgaatatctttaataaagttacttttacgaatattttcaaaaaaatttccctagcagtgaattggtaaagcatcgatttttttagaatattcctactgatgattataattgttg

SEQ ID NO: 41430 - DNA, 1355 bp, Heterodera glycines
  unsure (1)..(1355): unsure at all n locations
ttattaatttatttatttatcgagcaaaccaaaggcacatgagtgctcttatatggtgccaaaaagaaaacaacaaataaagttggtcaaataaaaaatacaaaatgaataccgtaataaaaaaaatgaataaaaataaatcaatcaaatgttaaaaattcacaggtgataaaaatatagtgtaaatatggcaacatggaaaatcctactcagaactcattgcttttagtaaacccctgaattcctttgccttattaatttgcaccgctaccactggaaggttattccagtttcttactatcctatggaaaaaattattttgagttttgtgcgtgtggcgctttactcgcaaaagtaaaggcctcctgggcctttctgagaaaaagaaattttgctcagcctctaggctggtgaacccttttataattttaaaagctgttgttaaatcattgatttttcttctttcttctaatttgtgtaaatcagtgatttttagtctttccatatattttttgtacacaaatccacattttcgaaaagcttttcttgtgaaaaatttttgtacccgttcaattttgtctatatctttttttaaatttgggttccacacttcggtagcgtattctaattgaggtcggacaaaagttttacaagctgttgttagagtctttatttccctggtttttaagactcttaaaatctggaaaactctaagataagcgtttcgtacaattttgttaatatgttctgaaaaatgcagtttcgagtcaattataatgcctaggtcacgaacattatccgattctgaaatcttttttgagttaattaaataatcttttttcatattatttttccctaaataaagaacaaaacatttcccagttgaaatttctaacccatttatttttgaccatttttccttatcttcagctgtctattgctttatctaaatgatttgttttatcatcattttcatgggcataatataatttaacatcatcggcatacatttttatgccaactgatgatgcttcatttgcaaaaggacggcgatcttttaattataaaattaaaagaggagtggccgcctaagacacttccctggggcactcccgaaaatatgctgaaacttttttcaaatccctctcatttacttccttaattaaatacctttttttaaaagtaataaattataattttccttattcatctttgttttgaaaataaacaatggaaggnnnnnnnnnnnnnnnnnnaactgaatcaaacgccttgacaaaatcaatatagataatgtcaatttgttgattcttttgtatagaattatatatatcgtccatcgtttttaatatttg

SEQ ID NO: 41431 - DNA, 1158 bp, Heterodera glycines
  unsure (1)..(1158): unsure at all n locations
atgtcgggccgcaaatgtcgggacacgttcccatccaaaattttaaattttttggcttcaaattctaaattttttctttaaatttaattataaaaatctgtttttttgaaaatcttttacataaaaaaatcgcatgacggtagcgataacggttggggatagtgatgaacccacttgaacaccctttgattcacgtaaaaaattggcaattgaaaattgggcctttgattttttgtgccaaaaaatgtttgtttgtttttaaatgtgccttttcacagaacaccattcgtcgtcctgcttcaacttctgctgtccctcctgtgccgctgaagatggaggaggacgaacgacggggcgaagtcggcacagacacacgacgacgacgacacgacggagggcacagcggaggaaagaagaaaggcacggatcggtcgcccacttcccgggcaaatgttttggacatggagcagctgcaggacgggggcaatcaggtgcagtttgttttttgttcgttcctttcatttaattcttcgtggaataatttgttttttcacttaatcataagtggacaggggggggggtcaattgcgtaaacagtacgagggtccgagcaatttgtaaaatttttaactaaaatcgaaaaagcacggtaaatatgggaaaattttacgaaattggaaaaaaagtcaaaagtttgtgcaaaattttttacgattttgaattgcattagttctatttcatcttttaaaaatttccatcgattttgcgtttaaaaattttacctgcttttttttcttcctcattttgcagcagcagcagcagtcgatgaacaacacgcaaatgcgcggtggtggcattgcgcagcagcaagcggctggcaatcactcgcagcaaatgctcgcctcgggcagcggcactggactgccacaggacccggagaagccgcagcagcaaccgttcaaacttaagtgagtctggtagttgggaaaatttttgaagatttgagtaaaattttaacaaatttttatcaaaaaagacaacctttcaatttttgatagtatttttcgagaataaataaggattttaggcgccaccgaagataaattttcgaatttatagcaatttgtttagacaaatttgttcanntagtttagattt

SEQ ID NO: 41432 - DNA, 1000 bp, Heterodera glycines
tccattaaaatacctatttgagtcattttttattggttttacatctttgtaaattcgcatgccaaaccttgtgatacgcggccatcaccaactcaaacggatgtttgtacacgcggaccggactttgataagtttggaccatgttttgacaataaaacgaaaaaaggagaagttcaaaaacaaaaaggaagcgaagttatgaagaaaatttacaacagaaaaaaacggaatttataaatctgattgaaaaatgatgaattaatgtttgtggatttgcaaaagcgcggtttttggaaaaatctggattgaccggtgttctggattaccggattttgagagatcggacccggaaaccggtgatttttgaaaatgccaatccggtccggtccggcgagtttttgaccggttctttccggattatgaccaagccaaaatccttcacttttgttaatcttcctttgaaatatctctttggcataatgttttaattttttttttttgataaaatccttttatcaattaaaaaattttctccggcggtgcctatcgaaggtgcacttcgtcccttccaaaaatctttaaaatttttcaatttttaattcttgaaattttgtttaaaaattttcttttttttgaaaaatttaaattctctgattactcgttgtttgtctaattctctctcaatcgtaaagtgtttttctgttttacatttttatgcatgttacaactcagtaatggattctcgcatgatttcaattgaataattatttaattatgtggcattattattcgatttttcacactcgccgcctcatcgccatttttccgtcatttcacattttaatgtccaaaataaaaaatattttttcaatttttgtagtgaatagatttgccaatttttacctaaggcataaggctaaaaagaaaatcttcgacctctaaaatttcgataaattaaaaaatatgttccatgacggatttgaatttacaaaatattttc

SEQ ID NO: 41433 - DNA, 1158 bp, Heterodera glycines
acaccctctgatcagcgatcactttagctttctcgtccctacatgcagaattggcataaaattggcggtggttggatactgaataccgaatgggtttgaaaaagtggtgcttataattcctttttaattgactgcgccaaaatagtcagttaccaatcaaattgaaccgaacgcaaaattggattggcatttttaaaaatcattttaaatacccaaattttcaaattcacaatttgcgcacaaaaaattcgtattttccggtcaaatgatggtcaagccgcgtacatgaacattataccaacggagcaagtgaatttttaaaatttaaatggcattttaaaattaaatattttataaccgtgaaattttgggagtaaattcgcggaatcgccagggaccctttggtgattttccaaagcttttagtttcgtggggacccctccaaaatcccatgcctattgaaggggtgtaatatccttttgaagttgccgccccggatattttaggtgcggcgcttgattaaatcctatgaatgggatttctgtccaaactatacaatattgagttaaacttttgccccctcccttccgccggcgttccgtcggccgcctcgcggcggtaattaatcatcatttgtcagcctaatgatgcaaaatttaaaatcgatttaaaatgcatttccagattaatgtgcaaaattttacctttgttgtgacagaatttgattttactttcgtacgttttgtttatggtagtcgtacagtaacgaatgtattgccaggctttacagtaaattttatcgaattaattcgaaataaaaatgaatataaaaaaacaaaaccaattaaggtttttccatcctttaaaatatttaaatttacatttgatgttaaaattgtggccaaccaaattgatgaaggaacaaaatattttttcaatttgtgttgcgctgaccgtgaaacgaacaattattatttcgaaacaaatttgggccaaaatgagggacagattgaatttttggacaacatttgtaaatccaataattacagaattggtttggtggtcacccaaaggaccgcagattcaaccatttttttaattaggtaaaattttgcaaaattttcgttcgaaatttttattaaaatatatttaaatttt

SEQ ID NO: 41434 - DNA, 1015 bp, Heterodera glycines
  unsure (1)..(1015): unsure at all n locations
acggtatcaaattgccgactgaaggagaccatcccatttcgagagtaggaatgagaccaattccattaaacgcagtgttaattaaggattggcgttactaccaaaagttggaggaggagccggactttgacaaaccaaactacccgaagaaatggaacgaaatggccaaggcggccaaagaagccaaagatcagctgaaaatggcaaacaatggcaccaacgaaaacaacaaaaatggcggaacaaatggcaacggtgccgccaatggaaatgccaaaaatggaagtggggcgaccgaatgaataacggacgattcgcaagtgacaggcggaaattagggaccaatgcttttctgtttgttctgataaatgttttatagcaacatttctctgtattctccttttgtccaatgagttgttctctctgtgaatgatttatttttgttaattatgagcattttatatttttctctataagaaaaagggcatcgagcaatgatcatcaaagaatagtgagtttattatgacgactttaatttatcctttcttttcagtcggctcgttttacctatgaccgtcgatgagtatcaaatcggtcaactgttttccgtggccgaagcatcgcgacaggttggcacttaagcagacgaggagtgtgaacaatttatacgacttttaaggagacgggcggcggagaaggtgttcaggtgttgcgcaacgaaccttttgaaggggagagtctgttcaatggccagttctcttccggacaatatacgcataaaatttaccatttcgattcgtgagtttgggggaaggggaagtggcaaaatgtacggcaactaatccagcgttttcaagaaaagtgccgtctcttctgagagcgattatgcncaaggagttcgatgtcggtccatgaacacgcgtggaatgcgtatccgtactgtaaaaccgagctgaccaacccggacttcatgaaggacagctntttcattcngatgaaactattcatctgaacg

SEQ ID NO: 41435 - DNA, 1072 bp, Heterodera glycines
aaaaagggggtttgcaagtttattggggaaaaaagactttacaaaatatacccctgggagaagggagtgggaaccatgatttcaaaattttctattttttctagtctaatctactcacaacggttcagaattcaataaaaataacattcacggtgcgaaaaatggggtttgacaagtttattggggaaaaaaagactttacaaataatacccctgggagaagggagtgggaaacatgatttcaaaattttcaattttttctagtctaatctactcaaaacggttcagaattcaataaaaataacattcacggtgcgaaaaaaggggtatgaaaagtttattggggaaaaaaagactttacaaaataatacccctgggagaagggagtgggaaacatgatttaaaaattttcaattttttctagtctaatctactcaaaacggctcagaattcaataaaaataacattcacggtgcgaaaaatggggattgacaagtttattggggaaaaaagactttacaaaataataccctgggagaagggagtgggaaacatgatttcaaaattttcaattttttctagtctaatctactcaaaccggttcagaattcaataaaaataacattcacggtgcgaaaaatggggtttgacaagtttattggggaaaaaagactttacaaaataatacccctgggagaagggagtgggaaacatgatttcaaaattttcaattttttctagtctaatctactcaaaacggttcagaattcaataaaaataacattcacggtgcgaaaaatggggtttgacaagtttattggggaaaaaagactttacaaaataatacccctgggagaagggagtgggaaacatgatttcaaaattttcaattttttctagtctaatctactcaaaccggttcagaattcaataaaaataacattcacgttgcgaaaaatggggtttgaaaagtttattttgaaaaaaagactacaaaataatacccctgggagaagggagtggggaaacatgatatcaaaaattttcattttttctagtctaatctactcaaa

SEQ ID NO: 41436 - DNA, 1023 bp, Heterodera glycines
tccccccccctttttttacccatttccttttttccttctcctgtcggtcatttccctcgtgtcccagcatttgcgcccatttttgcgcttatcgacacaaaaagaattcaaaatacatattattttccactcaaattatcattaaaaaatactgcgcaaagccaaccgaaaagagagctgaacaattctaattggcacttcgatttcctaaaaggacctcactcggcaacttatctgccgactttttccggcgaaacttgagaaagtaaaagctggcactgaccgtgccaaaattagggaccaatctgaagcggctctttcccaatgcttaatccgtgctcggcttgacttgctcccaaaatgcttttgctcgtttgtctcttggctgactttgccctttttgagatgtccgtcgacacaatggcaatcactgcgcttccgctcgactgttggcttaaggaacggctcaaaaattgggtccaattgtccgggcacgaaggtttggaggcccaacaccgccggacgctctcacagttcaggaacgattgtgcccgcctcaaatcacacgctttggaagaagcagccgaggggaaatcgggcagaggcccatgcttatgaagaaataatgagaggtggggacaaaagccgaacgatcgaattggcattcgaactcatttcagactcggaattgtgcggaatcactcccaaattttacaaggaaatcgctcacaacaacgaaagtcagtgggtcgccccatttgaccttttttctttctccgcttttcccacgccttttctcccttaagcattcatcgaaatccaagatttgctggcacaattcccaaacacaaaaagtcgtgccattatggacatcaaaattggcacacgcacatttatggagtcggaagtgagcaacgacacaaagcgagtggacttataccaaaagatggcaacattgtcaccccgacgaccccgacgagaaggaaaggccggaggggcaagtgaccaaattgcgctacatgc

SEQ ID NO: 41437 - DNA, 1009 bp, Heterodera glycines
  unsure (1)..(1009): unsure at all n locations
gagagaaagggaaatgaaatgaccaaagaaagagaagagagagaaaaggaagaaagagagaagggaaaatgaaatgaccaaaagaagagaagagagaganaaggnaagaaagagagaaagggaaatgaaatgaccaaaagaagagaagagagaganatctcaaaaaaataaataaaaattagctatcggagtttctttatttccccttacctccgaaaaccatttggagaagagactgtgactattcacttccaccaaaatcgcccttttataccgttttttgcgtccgaatggccaatttttgtgccaatgccttgcaaagtgtcgttttgccagtgcccggaggacctttacaagcggaacattttgtgccaacaaaaagcaactgtttaccgtggaggaggacgagtcggttgacaggcaaaatggataaatcggcaccggcataggaaatttcaagcagagaaccctccaattttggtaaaactgtggcagagtccgaatacaaacagcgaacactttcagtcaaaatggaagcgatgtttctgcaaaaaaaggggggggggtcgaacgaaccgacggacgaacggaccttccaaagtaaattttggccatttcgattcgcttttcctcgtccatttccaaactttggccccaaaaattgtgcccattcgtagcagaaaaatgtcctcgtcaatttggttaagcaaaacaaacaaaaaaggggccaaagtgtgcgcaatttgcaggcgaaattggctatttttggcaaaatacggcggaggagcggcgaatttgtcgaacaaattttggacggaatggaaaaattcatcaacaggcataaaacaaagaatgaattattaagaggtatgaatatgtataacaaaattcaccggaaaacggtgggagaacaaacgccaaacagaaaagtgaacagaaacatttccgggtccaatcggccgaattcgacgcattcattggcaaagaattgncgaaagagtgccaatgg

SEQ ID NO: 41438 - DNA, 886 bp, Heterodera glycines
  unsure (1)..(886): unsure at all n locations
atggatagctttaaatctgcaagaaattatattggcaataagtggttgtaaaaaacttttagggtaatgaattattttttgaagttagtcaaacaccgtattagtgctttgctgtgccgagaaccggcaggcaatggatggctttaaatctgcaagaaattaaattggcaataagtggttgtaaaaaacttgtgtaaggaattattttttgaagtgaatcaaacaccctatagtgctttgctgtgccgagaaccggcaggcaatggatagctttaaatctgcaagaaattagattggcaataagtggttgtaaaaaacttttgggtaatgaattattttttgaagtgagtcaaacaccctattagtgctttgctgtgccgagaaccggcaggcaatggatggctttcaatctgcaagaaattagattggcaatatgtggttgtaaaaaacttttgggtatagaattattttttgaagtgagtcaaacaccctattagtgctttgctgtgccgagaaccggcaggcaatggatagctttaaatctgcaagaaattagattggcaataagtggttgtaaaaaacttttgggtaatgaattattttttgaagtgagtcaaacaccctattagtgctttgctgtgccgagaaccggcaggcaatggatagctttaaatctgcaagaaattagattggcaatatgtggttgtaaaaaacttttgggtaatgaattattttttgaagtgagtcaaacaccgtattagtgctttgctgtgccgagaaccggcaggcaatggatagctctaaatctgcaagaaattagattggcaataagtggttgtaaaaaacttttgngtaatgaattattttttgaagtgagtcaaacacc

SEQ ID NO: 41439 - DNA, 981 bp, Heterodera glycines
taaagaaaaattacaacagaaaacatatgacgaaatatttggagaaaaatgggaagaaaaagaagaagaaaggcgaaatgaactcaaaaaaagagaaataattcaaaaatattataaaataaaagagaaaattaagcaaaaaggaagaaaatattcaacaaaagaatggaataaaattgaacaaaaaatagcgaaaaaattgggaacaaacaattgttatattaaaaaatggattaaagaatttggtcttcaaaaacaaataaagaaaagctacaaatcaaaaactgatgaagaaaaacgtcaaattattcaaaaattcattgaaatgacaaatgaatttaaacaaaaaggaaaatattctttaaaagaatggaacaaaaattatgccgaaatttgtaagaaaattggagtaagcaaagggacaattatcaaatggaaaaaacagtttggcattagtcttaagagaataacggaaaaagaaaaaatggcaaaaatgaaaatttattggcaaataaaaagagaaaatccaaaaataagtgagcagaaaattgccaaaatgaccaacactcggcgaagaacttttggaaatggaaagccaaatttggagaagcgaaataatgaggaagaaatgaaagccaaaaaagaggacaaagaaattctcgaaattctcgaaaattcggaaaattatattttatgtgacttttgtttttgttcattaacagggctgcaaaaaatatgcaaatgcataaaaaacactttctttttttttgtgtttgcgtataaaagtcgggacttttatttgcatattttggctttatctgcatatttcatgcatattttgccatttttcgtcaaatattttccgattttttgcatattttgccatttttcgtcaaatattttccaattttttgcatattttgccatttttcgtcaaatattttccgattcgaatatctcaattttttaaatattttgaac

SEQ ID NO: 41440 - DNA, 932 bp, Heterodera glycines
actcgaactcccattcataagatgaaatgattaaactcgaactcccattcataattgcggcgcgcttttttggaaaaaaacgcaagagaaaaattctcacaagtcgcgtttaatcggtcgcaaaaattttgtcgtttctcttgcgcgctttttcttatattttttctccttctctttttttctcgaccccaccaccgtttcgtgcgaccgacgcccgcctgcaatcggcgacataaccccacccctgaatcccccccccccccctacacagatctgtaaaatagaatgggcataaaaggcgcctcttaagttaccagattcttttctgataaaattcctcgcacgtttttcgctctgccctttctcagattcagcatccgtttctctcatcccatcgaaggacaaatcagctctaaaatgaagttgaataaaaaaaacaaagcactaaaataaaatgatttgagaaattagggaaaaagtcgagttcgtactttcgcttccgtgttttcggcttttccgtaggaggggtggcggcgacttgcattcgtggcatccgctgctgttttgtggaaatgtctgtcgcttctgccggtccagccacgggctttatgacctgttttgcatctgaattggaaattattcaagttaaaaaagcgaaatgtaaataccaatgccattttcccgacccttcgctataatcggaatgccattttctatgctttccattcgccgaatcggaattgtgtgttctttaaattcttcgggtccggacttggtcaataaacatttttcgtttgcttccgcgtatttggccacacgcgttctcagtccaatggattcgaattgtggcaatggcctcaagtttaccctagcttcggattccccaaacagttcttttgatttgtccaaagaaatgtacaacgaagtgaatg

SEQ ID NO: 41441 - DNA, 1078 bp, Heterodera glycines
  unsure (1)..(1078): unsure at all n locations
tgcgatgtgtgacagaatcttccgttttgtggttggactgctgaaggttggcattttgaagatcagctgatcgtgtcttggtttccattcgatgcctaacatctttgtgttttcgaggtcttgggccaattcggatgagtcaagagctcttttagcccgtcgatgtgactcccgaaaaattcgcggatccgcattccggctgattcaaaaatgatttttgcttctgtgaccagttgattgctgttttcacttggtttgacttccaccatgatgttgtccacataaagattgtcactgatgcgttgtgcaacatccgtgtcgtgaagtgccaggtgctccctgatcgtggcattgagtagaaatggtgacacggttaatccgaaactgactcggcagaatcggaaaacgcggaagtcttctcgtttcagctgttcgagatttgcttcctttgggttagcaagccaaaggaatcgtgtggcatcgcgatcttgttctctgacgcccaattgtaggaatgccttttcaatgtcagcaaggatgactttttccatgcgtctgaaccgaaggagaatgccggtcaggtctttcaaaagtagcgggcctgtgtgcaggcattcgttgagtgatggtgccgacggagtggatttgggttttgcagaggcatccatcacgatgcggattttggttgtggatttgtcggttcggatgactgccctgtgtggcaggtagtggactggaccacaagaatgatcagaattgaccagttcgatgatggaattctgctgttgttcatccagaattgcttggtattcgtcgaccaagtttattgtccgaagctttctgatgaggcttatgagccttgcctttgcttgatggtaattcgttggcaattgtgccactctgtcgttccatggcaatgcgatttggtatttgttgttgacgaacgacaagttttccttgaaatttttcatcacttcatcccggtcgattagcgttgaagagtcgtccatgccaatgatgttgaggccgtagaactagttgagttcttcgttggccttcaagtgnttcttccgttgtg

SEQ ID NO: 41442 - DNA, 917 bp, Heterodera glycines
acgttcgtcagatggccgatcccacttcggcggtaaacatcaatatggggacgttagtcggttcttacgccagtgtcgcgcgcatgttagatgaagtcgcaagcgtgcctggtgccgaaggcgtgctgttaaccttcgacgattttctgtcgggaatcgaaaccttcggcgagcgcattcaaccactgatgcaatgccgcgcccatctacctgcgctgactcaggaggtggcatgatgacgaccttaaccgctcgaccggaagccattaccttcgatccgcagcaaagtgcgctgatcgtggtggatatgcaaaacgcttatgccacgccaggcggctacttagatctcgccgggtttgatgtctcaaccactcgcccggtcattgccaacattcaaaccgccgtgaccgcagcgcgagcggcagggatgctgatcatctggtttcaaaatggctgggatgaacagtatgtcgaggctggcggacccggctcaccgaattttcataaatcgaacgccctgaaaaccatgcgtaagcagccgcagctgcaggggaaattgctggcgaaaggctcctgggattatcaactggtggatgaactggtgccgcagcctggcgatattgtgctgccgaagccgcgctacagcggtttcttcaatacgccgctggacagcattttgcgcagccgcggaatacgccatctggttttcaccggcatcgctaccaacgtctgcgtcgaatcgacgctacgcgacggcttttttctggagtatttcggcgtggtgcttgaagacgcaactcaccaggcggggccgaaatttgcgcagaaagccgcgttgttcaatatcgaaaccttttttggctgggtcagcgacgtcgaaacattctgcgacgcgctttctccccacgtcctttgct

SEQ ID NO: 41443 - DNA, 697 bp, Heterodera glycines
cttcagacaaacaaattaccaattaaagccatagaatattctctcagaccaaaagtttgcagtcggaacaattttccaagctcatagggcaacactcgaagttggttggagttcaagtaaaggtggcacaacgaaatctaaaaatgtttatgtgtttgaaaatggataacccgcaattggtaatccttacaaattatggttccagtggaaaataaaatgatgtttttttctggatttaaaaaatgctattcgcagttctgattgtgagcttaacattaaatttcgaaatattttagaatttctcttcgggatcgaaattgtaaaagattgccaacaatttattgaacactaaccatgtcaccaatttcggatggcaaactgcgcaatttgttgtgcgataagtccagtagtgataaattggaaagttttgctatttcgggaggtattcgctgcaacaaattgttgcccaagtagagcgcagtcaaatgacgcaaatcgaaaattcctggcgcaatattctttatcatacctaaaaaacacaagaaaattcaagttattatttgttggacaaaccgtgcacttccaactcgttccagcgagtcttacaaccgcgactttgttcttcgtcggtcagaattcggtggattcgtgcgagtccgtttgatatcacctgtgatatgcaaaagagttgtcttct

SEQ ID NO: 41444 - DNA, 861 bp, Heterodera glycines
tttatgaaaatgcaatgcgctacttgtcttttttaacaaactttgcaggtttcgtatttcgtattcaattatagtattgctttcgatattttattaaagattcacactaaagaaataaaacatgtattttgatcaaaaaattgtttaattatttaaattattattttttaaatttatttcatgctaagtcgatttttttttaattatatcgatttgacctgcagtcggttcttcaacagatgctcagaactgtgattgggcgccggacttttcaacagaggacttttcgacagcaagaaaattcgacagaaatattttaaattttaggagtgggctttcgacagtaaagaataagaacactgggagtttaggaaaacataggtaacaaagctaaaaaaacgtatccctagtaatattgatttagcaatacatatttatgtaaattaaactaaatttagtaaaactaataaacaatataatttattttaataagaaaaattgtttttattcttcgaaatttccgatgtcgaaaagtctaggagcccctgtatatatatatatatatatatttcaatcaaagttgtaaagattagtttacttgggattgtatttagcccttctcacgtctaattatttacttaaatttagaaatgaaattcaaaaatgaatatggggaggttttgtaaaaaattatttttatctttcgtataaatctaacaaagaagcggaagattttccactgcaatgatttatgttgaataaacctataattgtttttatataattattatttaacatagatttagtaaaaattagtaaactatttaattgaaaattggatttcagctagtcttaaaagta

SEQ ID NO: 41445 - DNA, 945 bp, Heterodera glycines
  unsure (1)..(945): unsure at all n locations
gatttttnaataatttttttccgttgcgattntcgcctttaaaatcgctttttntaatttattctnttattgtgnnaagtgttcttttgcacgaacgcaaactgtgcttataaaaaaagtccgggctgtactttttattgaaaaattccttaataacaaatatttgagaatttttgcaaaaatgacatttattttactaaatctaacctaaaatcaacaaaattgaatatggacgaaatataaacaaaaattttcaatgattatgccaaacactcctcgcgtcattcagagttcgaaaaaaaatgattaagaaacgaaaattataaaattaaattcaaaaaaggaattaatcccccgaaatctcgaaaaatatttctatgattagagtttataaagattaattggattggtttagggtgatttgggggaatgttttcaatcattcattgatttttgctttttcaattcaaaattggaaatccttctccgcttttcgtcgtttgttttgttcattaagaaaagggctccgcggtcggccgaaggaaaagcaaagcgaagttttatcgttcgtttcggcaaataatttaattttgagcagtgaaagtgccgcagcgaaaggcattttgttgagcattggcaaattccaagtgcttttcaccttaaattgtctgaaagccaaactttcattggctttttatttcattccttcgaatttttcgctgatcgctttgccgtccctttgctttttaaattccgcccattcgcagaaacattccgtcatcgctcttttgtgtaaatttgcgtcaaatatttcacacctctcggcttacccattcattgactgactatttatgttctcgtcgagagaatgaaaggatcaatgaatttaccctcgaggagaacgcgaaaatgggcggggaggggggggggggaagggggagagca

SEQ ID NO: 41446 - DNA, 924 bp, Heterodera glycines
tcccgtcagtatttctttacttataccccaaattgcttacttcactgatttgttgcgtcccattttggttccaatgccaacggacaatttgtgccaatggctccaaatccgacggattggaagaagcattgccaatgtccgcgatttccaatgcttggttaaagtcggttgtcacactcgtgaactcactaaaaatgggtttataaatgaaaattaaaaaatgaaattacagttcaacaaattcgatcatttcccaatgtgaagattttccagtaatcgcgaatttaccgattgctttttcgccaataataataaattcgtcaaagatttccattgtatttgtgtttatcagtcgaattttttaatttaatttagaaaacaaattttctggtgtcgttgcgtcataatgtcgccgcgtcgaaatgtcgccgcgtcataatgtcgccgcgtcgaaatgtcgcccaagctaaaatgagtcaaaatgtcgccaagccgaaaattagtgaaaaagtcagaaaattacatttttaaggctgcacaacacataattcactaactatttatcagaatagcataattaaataactaagataataaaatttgcaggaaaaaataggtatttcaaaaagtgaataaaaaaatattgggatgaattctaagcgatattcatgattgaatcttccgggttttcgtagttattcaattttcctgcgtattcttcgacctgcagaccaagagccgtcataaaatcatgaatttcggcataattgttgtatgttgcatccgtcaaaattctcatcagaatgatgacaaagacccttataaaattgaatttttctgggggtttcataagtgaaaaaatacagagaaatggaggtgcgttgcttcgagtcaattgttggtcctcgcgagcgcagtaaacgc

SEQ ID NO: 41447 - DNA, 1001 bp, Heterodera glycines
tcgttttggcgccgacgttttggcgccgacgttttggcgccgacgttttggcgccgacgttttggcgccgacgttttggcgccgacgttttggcgccagggtcgttttggcgccgacgttttggcgccgacgttttggcgccaagccataataaaaaaaagaaaaacacccaaattaaaaattttgtaaaacaacaaaaaaaacgtatttttcgcgaaggtaatactgccgatgtttggttgccctccttttttgaagaaaatttttttgttttcaaagtcatgaaaacatgcttccaatggttttcagggtcgctgctcacgaaccaggcatccatttcgaccaattcggaacccggagccgaaattcgaacaaaaaatcgaaaataaaaaatttcaaaattctctttttgtttctaaaatagattaaaacaaccgaaaacgttttggagccaacgatatgacaacatgaatattggaataaatgatgataccttaataatttatctgacaaacaaaatatcataaacgaatttaattcatcatttactctctaacgatttggctaatattctcttaatattgtactaaggatacgaatcattttgatgataggaaatacactaaaactaatttaacgcatgaatgcttaataatcctattgtcgtgatctacagaaataatgcttcaattacatttgattgatcattgtcagcgctaatgattctacacttaatttataagtaaggtgagcaattacgacatttttatatcgagaatcgataaacatggtatatttttaaaaaatcttacattatattaaatttaatttaatttttgacgatttttactgaatttccttttcaccttaacactttcccacttttgccagctgatggcgccccatcgggacaaaagcagagaaacttttgcccgctcttccgttatcatttttagcggtttccctgtaaagctgccaggaaatctccttcccttcttctg

SEQ ID NO: 41448 - DNA, 941 bp, Heterodera glycines
ttgggggaatcatcggaatacccatccatttctgttgagatttcccctcattttcatagttttcttattggtgggattttttcaagtgtttttggccattttcccacaacaaatgcttcctccgtaatgcgatgattaattgcattgcgttgccttatacttccgtgtccatccatcttcgttcgatgtcttccgaccagtaaaagtcccccctcgtctcccatcatcagtcattcaatttgtcaattgctcccccccccccctatcgcatcaatcggcgcatgccttgggcaggcgatcgccgcgcgtctcatcccccgggggacccttcgggcgatagtcgcgcgaattgagaagatcgcgtcgggtgataagcgaaggtcccccccccccgcgcccgcttctgtttagatgggcgcctcgcccataaatcaatcggtccgaccaatattcaactattccccagtttttgtcgccgagaggcaatttgtcatccctaaaatgacaaatgggaaacggaaggtgttgaaaaagcgaccggcagaagaggggggaaacccgggaaacggtaggcaaaaagcaaagggcaaaaggggacaaagagaggccgacggcactaggcaattacgaagcactccctttgaagacgacgagcagaagccgccggccgacccggcgacgatcgtccaacaagcgccactgcctcacagcagcaccggcacggacgaggaggctcggatgcgactgaagcgcaaattgcagcgcaaccgcacgtcattcactcaggaacagatcgaaagtttggagaaaggtgggcgaaaagacacacaatcattaattaattggtcaattaacaattaattgatcaattaattagtaaagccgcaattcttaggcacaaaaatcgcgaaaaaggaatgaattattgaataaaaattcat

SEQ ID NO: 41449 - DNA, 1097 bp, Heterodera glycines
tttccctcaaaatcctggtcacccccctttggtccctaatctcaaaatcacttttatttttataacaattcgcaaaaaagtgataaaaatgccaaataaaatttatttaatagagcaaaaaattgcggattttttaagtatttaaaatttcaaaaacacctttacagaaccgagttctgaatttttttctgaaaaatcgaaaatttccagaatttctggaataactttttttgtttttgtgctataaatttcaaataaatctcataaaattttcccgattttttgctatttttaaagctttaattcgccaaaatagacctgatctgaactgagttatgaattttcaaatattaggccaaaatcccgagggccaaaaaattgccaaatattttcgaatttttaaaaaattccaaaaattctgaaacttaaaatagacatcatattcgtactcagcaccttattttaccccaggaaaatatttttcacccccattttcgtccgaaaaaaaatttccgaaaatttctagggggcctagctcgaaaatttttgaaaattttacatcatgtagtacaccgttcgatagagcttaaaaagctctacaattttgctcaaaggcattttttggctaaaaccaacccctaacgagttatggacccgggactcaaatgtcccgctcaggccaaaaaatttttctatttccgggaaaaaatcgaaatttttccgaaaaaaataccagtcgatagagctcgaaaaactatgttttggaagtggtctccgtttttctgggaaaattcgttaaaaaatcctaaaattcaaaaacccaaaaaccgttttttaggcctagctcgaaaaattttgaaaattttcgaaattttaaaatctgaaaaaatcgagcttattgaactctacaataagtctgctggccaccctgcgctcaggtcaaaccctaatgagttattcgcctggtactgaagtgggaaaaaaaaattaactgagtctccgtgtctgtacaggtccgggatttggtctgatcaaaaaataaaaaatactggattatagaggacacttctgcggagtgccctcacagcgggaatttt

SEQ ID NO: 41450 - DNA, 620 bp, Heterodera glycines
ataataaaattctaataaaaattttttaaagatttttcaaattaaaaaaatgaaaaaattatcgaaatttttttcttggaattttcgtatcaaaaattttttcttataaatgtgtttgtaaatttgaaaaaaaattccttgggggaatcgatgcgtgcggggggggggaggaaagggaggaagagagtatcaaaacaaaaaaaatgagagtgaaggagagagagagagtgaacgagaggataaaataaaaaaactttggaaatgaaattgaaccaaaaaaacttttttatacccggcaaaggcgcagcgaggtcctcggcacccactggcggcacgttcgggatgacaccatcattgactggaaaatttaataaaactggtgccctccgtttttgaaaatttttttttgttttcaaaaaacgtgaaaacaggtttcctgtactattaccgaaaaaatgtgctaaaattgaaaaaatttttttgttgttgctattattaaaaaaattgtggatatacgagcaggatatttatgaaaatgctaataaaaaaaataaaatttgccctgcctctaagctttatgagtttttttttgaattttttttcgggggagaatgacgggg

SEQ ID NO: 41451 - DNA, 1402 bp, Heterodera glycines
  unsure (1)..(1402): unsure at all n locations
taaggtagccaaatgcctcgtcggctaactaccgacgcgcacgaatggatcaacgagattcccactgtccctatctactatctagcgaacccacagnccaagggancgggcttggcaaatntagcggggaaagaagaccctgttgagcttgactctagtctgactttgtgaagaatcatgagaggtgtagcataagtgggagccgcaaggcgccagtgaaataccactactttcatcgattccttacttaatcggtaaaacgggagtgcgcccgaaagggtgtccattttggtgttaagtcgggccacccggtggcccggcgacccgcgccngatgacagtgtcaggcggggagtttgactggggcggtacatctgtcaaagcgtaacgcaggtgtcctaaggcgagctcagagaggacggaaacctctcgtagagcaaaaaggcaaatgcttacttgatcctgattttcagtacgaatacggaccgcgaaagcgtggcttatcgatccttttgaatgtgtaaagtttccagcaagaggtgtcagaaaagttaccacagggataactggcttgtggcggccaagcgtccatagcgacgtcgctttttgatccttcgatgtcggctcttcctatcattgcgaagcagaattcgccaagcgttggattgttcacccaccaatagggaacgtgagctgggtttagaccgtcgtgagacaggttagttttaccctactaaagacctgttgctatgatagtaatcctgcttagtacgagaggaaccgcaggttcagacatttggttcatgtgcttggtcgatagaccaatggtgcgaagctaccatctgagggattatgactgaacgcctctaagtcagaatcccgcctaggcaagatagcaatattcttgctccccggtgtcgggaggcactacttatgcgccgcttgcggtgcagcacaaatgccccagcatctggcccgatgtgcgtgcttaattgctcgcacattgccaaagccgtagcactcgtgtgccatggtggaacgtcggggcgcaaaatcacttgtatacgacttgactactggtcagggggttgttagcagtagagcagcttttacactgcgatctgttgagacttagcccttgatcggatgatttgtcttctttttccccctttactttttgtgccaacaacattttaggtacaagtacatgagaaggaaggctctcttaagggagtcaaatgcctcgttgccaccatgaaattaggtaggataagttcttgactttgcttttttgtccatttattccaatcgcctattgctttaaggttttgtctttgactttgcttttttgtccatttattccaatcgcctagtgctttaaggttttgtctttgactttgctt

SEQ ID NO: 41452 - DNA, 933 bp, Heterodera glycines
  unsure (1)..(933): unsure at all n locations
ttttctgtcataaaaatagctcatgacaggatggagttacgcggccctaaaaaactagaattaaaaattcgtgcacttaaaaaatttggaattcggaagtcagaattccggtagtcaagcaaagtgatttacgagcccaaaaatttatggaaggttgggcgtgaaattttttttatttccaaaaactttaaatgcaaaaaattgagaaatttaaatttacctaaattttcaagtttttctaaatcttttatttggtaagatctgtaaacaactttattaaaaaaaattttgccgcacttattctacaaaaaaaaaacaaatgtttaattttttgaaattattattttatgagacagtatgtcattagaagccgaccggttactgtaatttgaaaaaaaatccaccggttcattcactgtcaataacttttagaataattttagaaatttcaacaaacattaatattgtaataatcaatcaggtgacagacggagtaaatcatgcgacaacaaatctgagtgttgaagttttggatgtgaatgacaatggaccacaatttgttcaaccttacatcgaaattgaacggtcaatggatgtgccaattgggcacattttaacaaaggttgaggccatcgacggggacatgtccaagcacaattcacaaattcgctacacattggaaagtgctgctgcttttcaaaatttgagcactgctgatttggattggctttcttgcggccaaaataatggtaattgaccgataatttaaaaaattttaaccgtcattaaagtaattaccagtttaaccgactanaacattttgacggtaattagagtaattactggtttaactgattaatttgaaatattttaacggtaattagagtgattacttgtttacttataaaagntttgccaattctattctttttt

SEQ ID NO: 41453 - DNA, 902 bp, Heterodera glycines
attcccgaagggattcggtctccccataaatctaggcgcatcggttcggggggactgccccgaaaacaaaaaaatcgattttttcaagtgtccgtttggggtactcaaacaattatggggagcaaaaatccaacgcagaattaaagtacaggctatagggaagctattcccgaaggattcggtctccccataaatctgggcgcatcggttcggggggactgccccgaaaacaaaaaaatcgattttttcaagtgtccgtttggggtactcaaacaattatggggagcaaaaatccaacgcagaattaaagtacagactatagggaagctattcccgaaggattcggtctccccataaatctgggcgcatcggttcggggggactgccccgaaaacaaaaaaatcgattttttcaagtgtccgtttggggtactcaaacaattatggggagcaaaaatccaacgcagaattaaagtacagactatagggaagctattccggaaggattcggtctccccataaatctgggcgcatcggttcggggggactgccccgaaaacaaaaaaatcgattttttcaagtgtccgtttggggtactcaaacaattatggggagcaaaaatccaacgcagaattaaagtacagactatagggaagctattccggaaggattcggtctccccataaatctgggcgcatcggttcggggggactgccccgaaaacaaaaaaatcgattttttcaagtgtccgtttgggtactcaaacaattatggggagcaaaaatccaacgcagaattaaagtacaggctatagggaagctattcccgaaggattcggtctccccataaatctgggcgcatcggttcggggggactgccccgaaaaccaaaaaatcaattttt

SEQ ID NO: 41454 - DNA, 962 bp, Heterodera glycines
accgcggttcagcagaagctgaaaattgaatttttaaattgtatattttaaattgccttcaagaaataaatgcattaaacttattgttagtttgggcgaagtaaaaagggatatggccgaggaggggtcatttcagtcacaaaaattatttttaaaacataaattatcaggagtttaaaaaatttaaaaaccattttataatttttttatttgtgtgacttaattaccataaataccaaattcgaaacaacattttttttattattttaataatttccgccaaattttcctgtcccgtattctatagcttaaaaccgttcaaaatttggttttaatgaacaaaatataaaaactcttttattttacttaactgtggtgtaaaaatgaaaaaaataacaattataaaaataaaagtccacttgattggttttaatgaccctttgataaattaaaaaaatatattacaattaaaataatgattttatttagtaaaatcatttttgatactgaaatgatccctctttggccatatttccactcccattggcatttaggctcaccataaggcgtcaaaatagttgtgctatgtaaaaatatgtatataaaaccaagcaataaatagcctaaaataccctatattttgtttgtttattagaataataaaggttttgaaattttaaaattaatttcgggccaagggaatttgttatttggctatatttttgaaaaaaaacaatttatctgcggtgactatgaccttcacaatttcggtgatccccgtcattatggccatttgcagcagagtgttgccgctcgatgtgtccttggcgttcacatctgcgccgccggccaaagcgcccaaaagactgccaatgtcaccgcctttgacgcggtgaacagcgtggacagaatgtctacagaaagcagaattgaaaaaatttatatagagacagctacaaatg

SEQ ID NO: 41455 - DNA, 669 bp, Heterodera glycines
taataagcaggcccaccaattagcaaacagaagaagcagatcaagttaaacaccttttgggaatggacactataatgtacggtaattggccaaccaacatgcatacggtaatgccgcactcaaaacggtagagaagacttacaatgacaatgaccttcagaagaccgggcaaagtgcgcagatagctcgtgtccagccacgggttgaactgcacattgcccccgtcgtaattgtgcactgtcggcacccaacgggcgccggtggttgtcgtgtacacgcgcgtctcctcatacattaattagggccgcggaagcggactttttcaacggggatgggctgtcggtttgttggacaggcgaagtttcactttccgagtgatggcctctcccccgtccctccaattgatcaatagcccccccccccccttcaattcatttgttccattgcgttcaatcgatcgctatttaagtcggccgaggatttcatttatccaatcggcgtttctgaatgagtgcccctccggccaatgctttttcgttggctctttcgtcagcccttcctccgcttccgttttcatgcatttcttcgccagctgttcctttcctctcagattcgtctgccctttctctccaggagaggttcgttcctttgccggtgatcaatcacgca

SEQ ID NO: 41456 - DNA, 1566 bp, Heterodera glycines
  unsure (1)..(1566): unsure at all n locations
tgttcaaattttcaaggaatgtaatgctaaattcttcaaaatttcttatgaggatattgtaaaaattataatattttttaattgtaaatttatgtgttaaaagaaaaaatttatttttataatagcttttttacttaatgagaaatgatagttttcaacaaaaaataaataaatccattttccaatgataatgaataaaattttttttcttgccgcaactttggtcaacctaaagtgcttttgggcaccataattttgggtgacaagctcagaaagaatcctttaaaattcaacacaaataaagctgtagtaattcttcccgctattcacccattaaaataaaaccaaaacacaatttatctagtcaaaaccgaatatcaaagttaaatcaaaggctacaactaaaaactcagagacgagagaagaccaaaattataaagaatataacaaatgaacgcaaaaacaaaatctgtagagaaaaagatcggtttatatcagttggtccccgcacgtttgggctttgggccctagcatgtttttggactacaacttttattgctcaaaaagttatacataaaaattgcgaaaagtcgaaagttgggtttttcttaattaattttttacaggcaagaaaatcttttcgctttgtatggctaatagatcatgtgaagagctttcgaatgatagcaataatgttgcatttgggtgacaaagaaaaaagttatagtccaaaaacatgctggcgcccaactgacgtagaccgtcctcgctcacatcctggctctctgttttccacatctttctctcattatttatctgtcaatataaattttttctctcctttctctctcttcttttcttattttctgtctctctcaattttttgtttacctctctctatctctttccttctctctcttacactttcatgtctctctctctctctctatctctcactgtctctctcactctatgtttctctctctctctcgctctctctcattccactgtcancttttttcaccccccccccctttctctctctcgccccctctctctctccccctctctctctctcttccttctctctcgctctctctctcggtgtctttgtcacacagtcacatatccttatatactcaataaaagcatattttaaatgaatttttaattatttaaaaagttttaaaaataatgataaaaaagaaaatacagacggaaacaatacataaatttgtttatttttaaaatttctttcatacattttcttctttaattttaaaggttttcgcgtcaaaaaataaacttaattcaaaaaaaccacaccatcgaattagtatagttagatagatgaaatctttaaagatgggctattatttgcgaagagtctggaagtaaaagtaacgccttgtaagaattggctaaaccaaccgcaccctgttttgagaggtgcaaaaagaattgggacaaaacgtttattctacagtaattcaaattttatgtatagaaaaaaatctgaaaaaatccctgctaagctaacttttgatactgatcaaaaaagtcttt

SEQ ID NO: 41457 - DNA, 811 bp, Heterodera glycines
ctttaccacattgttgtaacttatcggtaaggttagtcagcccctgtcttgaatgttccctgacggcatcccctaaatcacggccctgagcgatgtcactcagaactctctgccccgcggcgagcccctcatgtcctgcactcgaggcaatattcctcgcaataggggtcaagaaacgtgccacattaccgaggaaaccgaatccccgttgatacttgcttccgacaaagtattgtttctgtcccctcccatgttgtgaagtgaaaaaagatgaccaatcaaccgactcgggatcgaaaaatacgtgtgtcatttttaaaatatacttttcttaaaatgtaatgtaagaatacaacttccccagtgaaatttaacaaattcaccaaatggcgtgtgaatttcaattgtaatttctgaaattcgtttcgactgtagacgatgaaagtactcggtgctatatataacttcactaatcgaccctgggtcattgacgacgttaactattcttaagagtggagccatctggttcccgataattgtgttttctattaaatttggtgcataaatgtatagctgccttacgcctcccgtcaaatctggcgatataattcgcctcttccgcatgaaataacctgtgttcttaaaaccgagcacataggcgaggtgttttgacaaatctatgtgggagacagcagcggaaagatagacgataaatttttgatcaatgctgtcatattgaaattgaacatcctcattggctagtctctctcttttttgtggtcctttctcagcttcagatacttgtctattt

SEQ ID NO: 41458 - DNA, 846 bp, Heterodera glycines
  unsure (1)..(846): unsure at all n locations
aaagtgagcatagaattgaccaacaaagaattgtggcagaagttcncatcgggtcaccaacgaaatggtggtgacacggacgggtcgcaaaatgttccccaagttggagttgcgtctgcgcgggttggaccccaagggaatgtattctctgtcgctgttcatgcgccaattggacaacttccggtacattaaagaccaagaaattggcagtgcaaatctcattttcattccaatgtcagttataagtaccaaacgggcgggtggtcgcccgcggggcaggacaaagccgcggcaagtcaatcgaacgaagtgcagcaccacgacggcacgtgttcgggcgagttttggaccagtcaggagaagctatgctttgaccgcgtcaaactcaccaatagggaggtgcacagcaattctttggtcagttggcacggcaaaccccgcgggtgtcaataatttaatcctcccccccccccccccaactctgtgcaggtctctctctgctcaatgcacaaatatcagcccgtcgtcagtcttttccgacttgtcgatcgtcaagcgatgcatttgtgctcatttgagccaccggaaacacaatttattgtaagtttctaatggctttatttgttgtgaaatggccaaattggcactaatgagcggggcgtggcgttgacttttaagagctaatagtgagaagtgttcattttaggctgtcaccgcctatcagtgcgaagcaatcactcgccttaaagtggagcacaatcctttcgccaaaggcttccgcgagggctcttcgcgcaagcggacgctttccccgtcgcccattttcgcaggtcgtttcgcagtttc

SEQ ID NO: 41459 - DNA, 628 bp, Heterodera glycines
ttaaaattaattttgtgttccaataatttgacaataaacaatatgccgaatgttgtgatgtgataaaagccacgattaatttgattaaatgcctgttggggactcggttggccgagcattggccggccaaatggcccgaggggacgggctgaattttcccatcatagccaactttttacggcccaatggacgggcggggcggacggcgggagatgggcaagggatgggggggggggggaatgagagggtattctcccattttggaggcgtaaattcgtctctcgtcgccgttgtggggatggcacacgtcgcccgaggggacagacggacggacagatccattttattggaatttatttatttaaacaaatgcgaaaatgccttcctcaccccttgcccccttttctcgataagcattggcgagccgaatttaaaaaacggatcaggaccccggattttcaaaaaaaaaactagacatcagggcctgggttttcgagattgactcggactgggtttcgattaaaaagtttttttctacaacagtcaagacccggaccaggattctggcaaaaataatcacctaattaactttaagaattttgcttttttaaaattatagttttttatg

SEQ ID NO: 41460 - DNA, 1352 bp, Heterodera glycines
atgaataatatgatcagagataatttaatccgcatggccattgtgcttagggctcagctgttgttgatccgcagttatccttctcagttctcagcccgatcggttcctctgttcgaaggcatcggtctgaaaacgaaggaaataagaatactgaatcataaatttgttcaactcgtccatacccaatttcgtcatctgagaagccaatggtcaccaaattcggatgccattcgctcgacacacgcggcagacgcaaccaggacatcacgttcgcttccgtgaacaccgctggacagcgtagaatcttcacagatgacacaaagccaccatccggcctttgatgcacatcgctcgacagcgtcagcttttcctccgtccgaatgttcaccatttgttcacgccgggtgtagttgacgtcgaacgaagcgagcaccatgtacttgaccgggccgaccgcacgagtgaaggactaaaaaacggaaaaatgtgatcagaacaattaaaaggcaacgaggaaaagtaaaatcccgtccgttgatctacaacaccccccccccccccacaccaccgtgatcaattcgttgacgaaatttttccccatcctgatttcccatttgctcaatttgaatacccactggacgacccatcggggcgaggcgtgtgccagcccagttgtaccagtaaacgtgtcgaccaagtccggcgaattgctgtaagtggtcggactctcgggcaaaaccagtggcgctgatttggaaaaagtttctgcgccagtcgaagaggacggtcggcgacacgtatttgtgcatcctggtgaggtgcagccgctttacgttgaccagccatgatgagtccgtttcttcgagcgaggggccaaatgtgacgtgccatcgctttccaaccacgagtttgcgtcgagccgaaagtcgaactgcgagagagacgtccgtggagaagaggcggcgaattcggtgccgaggaaattgatcacttcgagtgtcgaaatacctgtaaaatggggaacaatttaaattaaaattgggagtgttgaagaaatgtcgaccgaatgttgatgctgttgaacccgacgacgattttccggcaactgttctgtgggcgatggcgatgagaaacgggagccgtcgctgttcacgataatcgcttcggcgcctgtcccactcggttccctctgacgagatgttcaactccttcgaaccaccgttgcctttgctgcgagctgcgtgtccacgagaatggtgaagcgggcgttgaccggcgccctgtgcggagccgaccactccacgcccagagccgtgccaacgccagggggcggaatttggtcgtttaaagtg

SEQ ID NO: 41461 - DNA, 952 bp, Heterodera glycines
tctatttatctttaaatttacaaaaaatttcattgagttctaaaaaagttatggttaaaaaactctgactcaagattttttaaaattttgtgaccataactttttgaaaatattataaaaaaattttcaaaattaatattctgaaagaaaacatctagagctattgaattataccataaatattaatttggctgatattaaaccaagttatgaatttatatgtcttatcttttcttgttttcctaccacatggcggatttaggaaacgcccaatgtggcggtttttaggaaaccacctagcacccctaaaaagtactaataaaaaattttattttactattttagtgcctattcgagggtttttgtgcctatttagcgattgttctgcctttttaggtgcttatttcgcgattttttgtgcctaaaatttccatccctattaattagtaattacgattactgatttttttggctaattattttttcggcttacatccctatttatacttaaaattaaatttttaaaaatacggcaaaaagtcaaattcctcccaccgatcaaacaacaattttttacatttgaatgtgaactgttcaaacaaaacgtaaacaaaaatctttttttttctattgcacaaattacaatatgatgatgcatcgttaatgaatttaattaaagaaaaacgatggaatttcacgggagaaaaatggggggggggcaaacgaaaagctgaacgataaacaaagcacacacacattttaaaagcgggtacgcctgggggggggggggaggcggtcggttccgttccggacaatttcgtcccaaaaaagttacacataaaccaattttaactctctgatcatggcaaaaaaatatatatgatatcttctcccaactaatcccaaaaatcccgaataaagcataaccaattaaacaatattcgtttaaaaa

SEQ ID NO: 41462 - DNA, 1106 bp, Heterodera glycines
atttttcttacatatttatgtacatatttggaccactttttgtacatatttttggcagccataattataaacatgttaataagggggaataaattttattttaataaaaaatcaaactaattttttctttaattgatttgtaggttcataattttttaaaatggtttattttttgaatttaaaaaccaattaaaaagtatagtaggcacaatttcattttcttccattctttttgtctatttgaatattttaaactatagaatttttttatttttggtcaatattgtagccatacattttttactaaaaaatgaaccatttttgcgattttgagccaattttttaagaaaaattgggaatttgggggccggcggtgccgataagcgccctcgggaaattttttccaacttcattaattagtataacaaatagtgccaagatttgtatattttgaaattgcaggtcccttggcattacactgttccaattggccaccggccgattcccctacgaatgtgtgaacaacgcaatggagttgatgatcaccatccacaacaatgacccgccgcgtcttgagcctaaccaagtgggatgcatttattggagaaaaaactaacaaattttcccccccataattttaggatggtcggcaattcagtgccgagttctgtcagttcattgccgactgtttgcagaaggacatgaacaagaggccgaagtacagggaattgcttgtaagttttagaaaaaatcggttttacattgtcattaacaaaaataaaaaaatattgcaaattcacaaaatgaaaaaatgttattccgttgcggggaatcgaaccccggccttgagagtgagagtctcaaatcctaaccactagaccacaacggacatggagggaagccatttatatttcttatatacaattaattattttcgttgcaacagttgttatttgtgttttgtttcgacattttaaacttattttttgatccgcttatccaaggaacaaatgaatttcaacaagggcgttgctgttttttaatttatttatttttggggttgatttagcaattcataaatttctgtcactaattttcctcgtgac

SEQ ID NO: 41463 - DNA, 996 bp, Heterodera glycines
ttttaactcattaacgtaatttattattgtttttgcatttaaaaatttgaaatattttaataaataatttaatatgaaaaggcaatccttttgagttcccgaaccttttcttttgaatatatattttaaccgttctacatttttgaatggacataagatggtatacagcttttgaatatgtatagataattgaaaacacttcccaacttagaccttttaaaatctccaagcttaaggcattgaaaaagatcgggacgatattaagatattgattactcatgtaaaaaccccaattaatattttagtaaaaacaaaaagctttaaaatcgcaaattttgtccaaaaattcattttaatgtaatgattttattagattacacctaataagattatacattttcatggattaaaaggcttgagtatctcgttttcctcattaaacctttctcactccatttatagattggcagagctatgacagaaaattaaatgaacacctgcgcagattcgaagcgcctattttgccaacagccgccagcgaaatctttaacaaagattaaatttaaaaataatatcaggcaccgaatgtaattctgagcaggcttttgtgggattccaatctacaatgaaatattttaggaatatttgaaaaaagaatgaaaattccattcatttcaaataacacttttatagctccctaaaaaattattttcgatcaaaaagttatcaaaaaatctaggaataaatatttttaaaggtttcaaattttccaatagaattagggatttttaatatagatgaaaaaaaaaaaatatatctttctttcgaccgactgtttattaaggggtaattagtatttacatgactttaattatttttcgtaattttgcaaatttgtttaccgttctcaaaaagtttcaggaattaaactaaaattaacctttttaagaaggttttatatttaataaaatttcaccgaaaaataattttttttaa

SEQ ID NO: 41464 - DNA, 1277 bp, Heterodera glycines
agagattgaaatgctggtgagttgagtctcagcgattggaaagcctgagaattgagtctcagagcttgaaatgctggtgattgagtcccagagatggaatgacattgaaatgctggtgggtgagtcacagtgtctggaatgccggttattgagtcccagagattgaaatgctggtgtgttgagtcccagagattgaaatgctggtgggttgagtctcagagattgaaatgctggtgggttgagtcccagagattgcaatgccattgaaagttggtgggttgagtcccagtgtctggaatgccggagatttgagtcccagacattgaaatgccggtgggttgagtcccagcgattgaaatgctggagaattgagtcccagagattgaaatgctggtgggttgagtcccagagattggaatgccattgaaagttggtgggttaagtcccagtgtttggaatgccggagatttgagtcccagacattgaaatgctggtgggttgagtcccagcgattggaaagcctaagaattgagtctcagagattgaaatgctggtgggttgagtcccagagattggaatgccattgaaagttggtgggttgagtcccagtgtctggaatgccggagatttgagtcccagagattgatatgctggtgtgttgagtcccagagattgaaatgctggtgggttgagtcccagagattggaatgccattgaaagttggtgggttaagtcccagtgtttggaatgccagagatttgagtcccagagattgaaatgctggtgagttgagtcccagcgattggaaagcctgagaattgagtctcagagattgaaatgctggtggattgagtcccagagattggaatgtcattgaaagttggtgggttgagtcccattgtttggaatgccggagattttagtcccagagattgaaatgccggagagttgagtcccagatattgaaatgctggtggcctgagtctcagagattgaaatgctggtgggttgagtcccagagattgcaatgccattgaaagttggtgggttgagtcccagtgtctggaatgccggagatttgagtcccagacattgaaatgctggtgggttgagtcccagcgattggaaagcctaagaattgagtctcagagattgaaatgctgttgagttgagtcccagagattgaaatgccattgaaagctggtgcgttgagtcccagtgtctgggatgacggaaatttaagtccaaaaattgaaatgctggtgtgttgaatccca

SEQ ID NO: 41465 - DNA, 1151 bp, Heterodera glycines
gtctgttaataaattattcactcccaaatttccctaatttattgatcaattaaattgcttaacaacccagtagattttttaggtagcgaagctcccgaagcgctttttcccaggcaagacccgacgtatattacacatttcgtgattatttgttcatttttattgcaaaaaaaattttatccaaaaaacttatgccaatgaaaaaaaacaaaaatgatgcaccaaatttatgcctgtaattagttcataaatgatactttctctgcaaaaatgttaaacatctttttatactctcttatatcatatacatactgattcgtacaattttcctaaccaccaccccagtagaggaggaaaagaatgaatatcagccaaacaaatcccgcccatttgaattggatcaagaatcgaactgaaaaatacaaagaaaaacgtggaaagtatcagatcgatcaaaaattttgcgctatgaagtgctaggaaatctgatatatactctcttggcctctgtaagggttcgtacactgactagcttctttccagctctgatggggtttgaacaagcccagtttttgaaaaggaattactagattgaaagctcggcgtaaatttgaagagaaaaaaaagagtttttggtaatgatccatattttggctgtgaccgcaaatgtccgaaaatagcccttaaaaaatgggccgcaaatgtccgagacgcaaatgtcggcccgcaaaatacggaccgcaaatgtcgggacacgtagtaaacggcgtaaaaagcaaatccaccatccccgccccaaccgaaaatgacaaaaaaaaaacattttttaatgaaatcttgattttccgggacaaattggttagcaaaatgaagaaaaatgcaaaaaaaatttcccatttccagaaaattttaaaatagaggagaaaaaaaaattagaaatccaaattaatccacccagacgcatatttttaaaagttggattttttaaagaattttacacgttcttgatccacccagattgaattttagaatttattcaagccatggtggcaggcttaaacaacaaattctcacatttatagtcacacacctcccgaaaatttagaaccccaaagacgaattcgaacaagtcggaaattgattttacacaa

SEQ ID NO: 41466 - DNA, 1169 bp, Heterodera glycines
agtgcagcgggaccgggacctgaacacggacaactgagtacaactgagtaccaaggtcccggttttgaccgggaccgggaaattcccggcttttttcccgcttttcccagccaaaaagtcccggtttttcaacccaaaaagtcccggtcccggtcctgcccaaatttcccggtcccgctgcactctagttttaaattaaaagaattttagactaggattaagttccgatccgtaaaaacattgttcatggaaaaaagattaaaaaattcaccccgtctcatcgtccttatgttcacgccgcaagtctcgtgcccattccgacgtgcatttggccatgtttggcccctcctccgtgttccaccgcttcgtcttggccgagcagtgccattcggcatgaccatatgtgcccggcgggcatgccacctgtgccgtttgcccataggcggtcatgggccaactcagctcgtgttcatgaagcgcgggacaactgagtacgctgaaaaagaaagaatttttaatgttttttaaataaaatattaatttgtttttaaaatgcaggttcattaattgaaagcgcaaatattatgtattaaattattaatataaaattatttttttgagaaatgttttttttaaataaaataataaaatatttgaataaattgaagataattataatttaattaaattaaatttaaaaattattttattttgtttcattaaaaatatttttactttataatccaataattacattttataattgttatgcccatttggcttcacaatgccatagcccgcggctatctttggcacattttcagtcgaattttctgcaaatgatgcaactgttgaaacagttgttgttgtggtcgttgttgttactaaataaaaacacagaaaattaaaaaataatgtatttatttttttaatatttttcataataaatccaccaccataaagcacaacaaaaatttacaccattaaaaacgaaattcttaataagcaaacttagacttggtaataatcctttgttttcaacgttattcaaaaataatagtaataatacagtatcccggaccacgattcaagaacagacgctccgcccaagtatttttgctaaaattttcaatttttctttgtcgtaccccctgcaaagacatatctca

SEQ ID NO: 41467 - DNA, 1215 bp, Heterodera glycines
  unsure (1)..(1215): unsure at all n locations
ttattggggtcaaaattttcctaaagttgtcccttcagcgcaagaagtttcaaataatgcacatttatcanaaaattattatgactcataccctttgtgatgaatgtataaatttgtacaaaattggatacaactgattaaatgcaattttgatatcatcaatcaagttgtntagtcgaacaaattgaatttagttataatttatttaaaatacgaaatgcaaaacatgaaatgatcaacatccctgatatgtttgttatctatttcggttttttggtccccaaaaatcatatccatactcaaaaaattggtttcctaatttgatgctgaatctcccatctttttgctgttcgaatttttgaattttttgagtattttgccaatgttttccatttgtttttttgcgcttttggcattctgttggattgcatctgtcaaagctttctttttggccctgccatcttttagatggaccgaattttgtgagatttctcgcccaatttcgtcatattttcgcaatttcttttcaattttgagctgcaaatcggccaattcaaataacaatttggtcgatttgactacggcattttccaattttttctcatttatcaccacttccaattctggcaccaaatcatttttcaccgcttcaatctgcttagccaaatctttcaaaaatgattttgttggcctaaaatgcaattttaacaaattttaaatataaaaataagacccaaaacacttgaacaatttttttttgagagtgccaatttcttcttcaaacaatttcatttgacataatttttgccacttttcacttgtctttgcatcaagtgatgatggaaagcttttaaaacgttattattatttttttaaatttattttattaataacggcggtaccggtactaaaaatttttgtccgttatataaataaataaatcctgtcgcgctacattgctcccgactctcgctcaacggatataataataattaagctagggttggtccccttaatcgacgcgggcttgttttttctaaaaattgcccccccccgtcgaggggtttgctcccctatatttttaaaatgcttcggccatgcccgataaattttgtcgccgaatttcatcaccgattcccgactttctctccccaagaatcggggaccaaccctaatttacactttcaattacccttctgttttcctaaatccaaa

SEQ ID NO: 41468 - DNA, 994 bp, Heterodera glycines
cccagaaaaattcggaaaaaattagggtcggcgctatctttccgaaaatgtggttggaattcttcatactgatgatcagaaaaagagataggcgtttttccaaaattttcgacatcaaactcgcccagaaagaaattcggaaaaaattagggtcggcgctatcattccgaaaatgtggttggaattcttcagactgatgatcagaaaaagagataggcgtttttccaaaattttcaacatcaaactcgcccagaaagaaattcggaaaaaattagggtcggcgctatcattcggaaaatgtggttggaattcttcagactgatgatcagaaaaagagataggcgtttttccaaaattttcaacatcaaactcgcccagaaagaaattcggaaaaaattagggtcggcgctatcattccgaaaatgtggttggaattcttcagactgatgatcagaaaaagagataggcgtttttccaaaattttcgacatcaaactcgcccagaaaaaaattcggaaaaaattagggtcggcgctatcattccgaaaatgtggttggaattcttcagactgatgatcagaaaaagagataggcgtttttccaaaattttcgacatcaaactcgcccagaaagaaattcggaaaaaattagggtcggcgctatcattcggaaaatgtggttggaattcttcagactgatgatcagaaaaagagataggcgtttttccaaaattttcaacatcaaactcgcccagaaagaaattcggaaaaaattagggtcggcgctatcattcggaaaatgtggttggaattcttcagactgatgatcagaaaaagagataggcgtttttccaaaattttcgacatcaaactcacccagaaagaaatttggaaaaaattagggtcggcgctatcattccgaaaatgtgggttggaatttctcagactgatgatcagaaaaagagataggcgtttttccaaatttttcacatcaaa

SEQ ID NO: 41469 - DNA, 714 bp, Heterodera glycines
  unsure (1)..(714): unsure at all n locations
aatatggttcatagggctcagtctcaaaattaaacaaatgatatatcaatcggtagctctcggtctgtaatggaagaatccgaaagtttttttgaggcaacaaatccctgaagagttacaggcccgggacagaagtggcaaaatggctttgggactgaactgtccactgacctaaaacgcatggaaaacgacaaattagataccaatcgattcctcgcggcatgtaaagcatgaatccgaaagaatttttggacaaaaaaattgacaaaagttagggtcctcaaaaaccaccgaaaacttttgattaaacaccggtccaatacgaagaaaatgataaaaaaccataaaatttaaaagtctagttttatttattgcgctaaaaaccagcgcacactcgactaaggcggccagaaactacgggctacggaaacagtccgcgcgtgatccgcaggcggttgactgattcgcgtgggccctcttcagtccccgcagcagggctgcacgcaattacagattacggattacggattacggaaattacggggtttttggacccccgtaattacggattacgggttacggatttttgggggttttccgtaattttgatcctaactgggacttttggattacttttcgagacgatttcttgttagattattttttataaattgaatttttattttattttattaaaagaanatatgtacattt

SEQ ID NO: 41470 - DNA, 229 bp, Heterodera glycines
gtggttgtacacaatgggagcatcacagttcgttggaaaggccttgacacagcgcgcgatgtcgcatcgtcagtgtaacaagttggagctaaaatcaacattatatacacatatatacgcgcccgtcctgaggccgcgaagcggccgaatgttccccacaaaattaaaaaacgggcgcgaagctcccgtcctgaggccgcgaagaggccgaatgacccacaaaaaatta

SEQ ID NO: 41471 - DNA, 1472 bp, Heterodera glycines
ttaaagaaaataaatttactaattttgcaaaatactatccatttaaaaatgttctcgtacagaaatttaaatatcaaaatatatagatgattctttatattaacaaatatgacaacatttgaaatacaataaaatttaaataagaaaactaacttattgaaaaaaacattgcaaattaaaggaaataactttttaaaaataatataaagtgaaagaatataattacataaataataactttatattatgaaagtaatcattattagagaccggacgagcccgggggcacgccgggccacccgggcccgggcccggtaaattttaaaaaaaccgggcccgggccgcccggtaaaacgggctttttttggacgggccgcccgggcccggccaattgtctaagcccgagcccgggcccggtcattttggcctggctaaaacgggcttaaatttcgccagcgaaactgccccaagtttgaaaatttaaataattattatggcgaaatgtctttagttcaaaattaaaaataatcagagaaacaaattccaattgattttcgtacatacatgccaatctttttgtttttaaatcctttaaaagtttttcagaaatgaatgcatcaatctggaaaataggtttatttgaaaaatcaaaggatgtcaaaatcgcggagtgccgagaatgtaaagaaaatggaaagtccaaatatgaatttagcctctctgactccagcaccaaatcgctcaaaaaccatctttttcccaatgctgaattacaaatattgactgacttttgttgaatgataaaaaattttcataaaattatttaaacaaagcaaaaatagaaattacgtacctaattttctcattttacaaaccaattttcgaaattttgaaaaaagcccgggcccggcgggcgcccggccaaaatttttgaccggacccgggacgcccgtttaaacgggtttttttggccgggccgcccgggctcggccaattgtctaagcccgggcccggtcccgacattttcaaaattccggtctctaatcattatgcttaatttatatgtaattcaaaaagactataataggcgtgagaaattatttacaaaagttaaaaatatatttattattgacgcaaaaaactaaagataaatagcagcttaaataaattttagatatttgagtaatttaaaaataatagattttgaaaacaacacgcgttataatgtacttcaacaaagtaatatttgccaagagatgatctattaaaaaatatatataactttacgataacaaaaaaggcttttttatcaataaaaaattcttgttaactaattaaatggaatatttaaaaaaaaactaaaaattaatttaaataaataaaatacaaatgaaaaaagagcataatgttttaaataatgtcttttttcaaatgtttggaaatttatttattaaaacataaaaattataaaa

SEQ ID NO: 41472 - DNA, 1304 bp, Heterodera glycines
aaaggacggcaacggcacggcgggcgcaattggcgccggtagcgtcgacccctcctggacagattcgttggtgctggtcaaggccaagccgaacacggggcccagtttttggcccattcccgaggcgttttggccggacaccgtcaggtgggttataggggaaaaatcactaaccatttgggggaattttttgatttttggggacctaaatgggacagtttggcctggaaatggtcccaatttttcagtaattccctccccccttcagaaggtctttgcccgctcgttctgcccaccccgtcgtgctgttccgttgtgatcgtgcggaaccgatgttcaaccccgagttcccgctggacaagtacgagttggacagcacgtctccgcttgtccaaaacatgctcagccgacgggagcccaacctttgctggcaggtcatcacaattttggcccaaaaggggggggggggaagggcgggtgaatttcaacagcgataaacttaacatttttttggcatttttgtattgcgtctgtaaaataaaaataatacgaaggcaaaattcttgtgcgttttcatgtttataatgaaaagtttcaattttttgcatccgaatttgagtgcatttccttaccattttcaggtgttcgtcgaggggtccttcaaacagccgggaattgggcttccgtttggctatttgaaggtaaaaatacccatggaactgtgattaataattgcctagttaattcaaatccctaatccgaaggtttcggttttttaaattactatagcttacaattaggtattaggcgtttaatgaatagagatgccagatttatggttttatgatcagagtgatcccaaaaactctccgagaacaaattttgatgaccggacatcatcataaaacaattattgcaaaccaaaagagtggatttaatgattttcaaaaagcgcaaattttcaagtaatgccaacttttttaaaaatttattcccggctgtgttttgtcctattctgtcatttcttaccgtcctcccattttttaaaaattcatttcccccgttttcaaggtgtcctcctcctccaccgtcaatctgctggtgatgccttacaattaccccgaccttctcacgctgttggcccaggccaaagaagggcccgaaatgatcgccagcgtccccttccaacaacgctttgacaaatatttgaacaccgtcccgccctattattacacggtgagtaacaaaatgccacaaaaagatggcacccttttacacccactttttgtttagtatctgaaaaa

SEQ ID NO: 41473 - DNA, 121 bp, Heterodera glycines
caggaactgaccgagatgcgcgagcgcatccatgccctgcggaagggcctggtcgagaagctggccgctgccggtgcaccaaagttcggcttcatcaacgagcaggccggcatgttctcct

SEQ ID NO: 41474 - DNA, 568 bp, Heterodera glycines
aatattcggtttttttcgtaagagtcttgtcttaaatccaatgtaaaacacattaacaattttcatatttttttttttaattttagagcgaaaattcacgctgatcagtgaccccgaaaagcttgtggtcatttttgtggacggaccagccgaaacgtcagatgatttgccggaagattggattcacctttggaatgaagcagctttaaaggtaagaaagaagcgttttaatccaattaaaagcttaatctaaatttaccaattcatgatttcgcatagctctctctctattcaagaatttgaggtcgagaaaattttcatttttatattagctttgtgattatattaatttttttgtaattatcagagcccggaattgggatttggtactgtaacggggtgttggatctgacgtaataaaattcatactgaaaaatattaataatttctcaaaaaggcgaaacagttttgcctatttttgaatgatttttcaaatttttccttaaacattttttgagttcgtgcaaaaacactgactcagtaccgaaattccggtttcgttctttgt

SEQ ID NO: 41475 - DNA, 870 bp, Heterodera glycines
  unsure (1)..(870): unsure at all n locations
tgcaatgccgctcggtgtttccgattcgttttccaactactagggaagaggagganaaaganaaggaagaggnggngcttgaaatgncggggnagnccaaaaaggagggaaagagaagnaaanggagaaagagnctcaagnatttaatttttttaaanagaantggtggaaantgaaaaaggncgaannaaatggaaatggngnaggtgtttatgatttgttttnaaaagatgttaaagaagaggaggataaagataaggaagaggaggtgaaggaaatgtaggggtagtctaaaaaggtgggaaagagaagtaaatggagaaagagnctnaagtatttaatttttttaaacagaactggtggaaactgaaaaaggtcgaaccaaatgcaaatgccgccggtgtttccgattcgttttccaaagatgccgaagaagaggaggacaaagacaaggaagaggcggtgaaggaaatgccggggcagcccaaaaaggtgggaaagagaagcaaacggagaaagagcctcaagcatttaatttttttaaacagaactggtggaaactgaaaaaggccgaaccaaatgcaaatgccgccggtgtttccgattcgttttccaaagatgccaacgaagaggaggacaaagacaaggaagaggcggcccaggaaatgccggggcagcccaaaaaggtgggaaagggaagcaaacggagaaagagcctcaagcatttaatttttttaaacagaactggtggaaactgaaaaaggccgaaccaaatgcaaatgccgccggtgtttccgattcgttttccaaagatgccgaagaagaggaggacaaagacaaggaagaggcggtgaaggaaatgccggggca

SEQ ID NO: 41476 - DNA, 1091 bp, Heterodera glycines
tcctccattttactctctttctcttccgtctctcctccttttaatgttcttgcttctgctgatgttgttgtttctgctggtgttcagctgcaattttctttttcctcttcttcagttgctgctcctttttctcctccatttttctctctttctcttccgtctctcctccttccaatgttcttgcttctgctgatgttgttgtttctgctggtgttcagctgcaattttctttttcctcttcttcagttgctgctcctttttctcctccatttttctctctttctcttccgtctctcctccttccaatgttcttgcttctgctgatgttgttgtttctgctggtgttcagctgcaattttctttttcctcttcttcagttgctgctcctttttctcctccattttactctctttctcttccgtctctcctccttccaatgttcttgcttctgctgatgttgttgtttctgatggtgttcagctgcaattttctttttcctcttcttcagttgctgctcctttttctcctccctttttctctcttttccccccattttctcttccttctcctcccccttcgctgtttcctttttctgttgttgatttcgtgtcacgacatttgcggccaccagccaaaaacgacaattgcggtccgtcttttgcggcccgacatttgcgcctcggacatttgcggcccatttcttaagggccattttcggacatttgcgtcccgacatttgctgccaaaatcaaaataggtctctcatcgaaaatcctttttttctcttcaaatttatgccgaaatttactcaatcgagtaattctttctcgaaattgggcttgttcaaaaccccatcagagcttaaaagttttttattaaaagtaattatttggaacttttcgccactatttttgccactatttagttaattattttgggatttttgccactaaaaatccgatccctacttctaacatgcattttttgagactttttttgactttttttacactttttcggatttttatgacttttttgaggttttgcgacttttggttcgtgatttttttgacttattgaggcaaagtttg

SEQ ID NO: 41477 - DNA, 1029 bp, Heterodera glycines
atcgtcgtccctttgcagtgctttaattggtacaatcgctcgccgccctttattatgccattattaacgtcctcaacggcttgatagaagcctaaagattttaaattgatcataaaacagtgaaattgaaaatatgtccctcattcccaaacttacaaatgctacgaaacaatttgtccttctcgcataactgcttttccttctcaacgtcgaaacaaaatttgcgcatggccaggcaagaagaagcagccgaagagtaattttgtatataaatgttgtggggacactcgcggtcgtgcaatttacgtgcgaatgaatccttaaaatcagacacattcggcgttctggggaattttctagtttaatataccatttgaacaagcatataagaaaaagtttaagcgatttcaaagaattttagcgccccaaattgggtatttgtgttaaaaagtctcgttttagccatgcttttgacaattcttggatgatttttcacctcgatcacttcaaacaatgcgcaaaaatgcgccgcctccgtccccaacttcaactcctcgcacactctgccgaacacttcgcgcgtgtcgctgtgccttttgatgttcaacgaaagagtgttgccacagacaatgacgcgcaacgaaacgtcgacgaacggagctgacaaagcaccgccggaatcctccatcagaaactcctgaaaggcattgggaaagaagtcggaaaagcagtgccacggcacctgcacagtgtcactctcggcaatcactttcactgcgcacactttctccaagtactgctccaacatgcgtcttctgctgtccaactgctgctccgagtgacgaaatggccatttccgtggcaatttcggaaacggaaagtcggggaattcttccttgagcaatttgttcagctgcagaaattcgctgtaccgtcgtgagccgagatgccttccggccatgtgaatggaataggcggtgaattgctccccgttggcgttcactgtttgatggcatggaatggtaatgg

SEQ ID NO: 41478 - DNA, 1566 bp, Heterodera glycines
  unsure (1)..(1566): unsure at all n locations
ccaaatttcaaattcaatttggcgactctctgaagaaagcaaaaagaatggaagaaggagaaattcatctaattgctgtcatttttactttatttatgtttattttttaaattcttttttttcaattttgattttggctttataatactaattactattttatttgctattaatttcgtttattaaaacgtcgattttgtgactcatttcaagtttcttcgaaaaaattcctatgaatcttaaaaattaatacgagaaacttcacaaaataatttaatttctcttaaataaggatggcatttcttgactattggttttaaactagggtttctccccgactccgagccnccccccccccccaggcccgtaccaaaggaatttttacaaatatttgttctattctcagatattaattaaatccaatttttcaattgcatttttaaataaaattctgaattggggcattcttttttaggtcatcattttgccttaatttatgttaattgaccccgataaatatgttaatataagcaactgcagaatcagcagatgttcatttattacttctccaatttgttaataatttttctcatttattacttcttcaatttgtttaataatttatcatttattaaaatttacatcttttattgtgaactttcattttaggaacttaatgaaaagtttgtcaaaatggaattggtattgaaaatcaccaaactggagcttaaaaatgtgagtgttatttaaagtgtcatttttttgaaaattaaatgggaattgctaattaattttgaaaaaaaataaattttttaatattaaatgattttagaagggactccaataaaagttgagacagaaggaaacgaatgtactgctggcgaaaatcgaagcgaaaaatgggaaaatgaaaacaaacaaaaaaactaattttgcggatcaatttttgagaaaatttcaattcttagggttgtatttttctttttattgcatttttgttaaggattttccgaagatcccaacacaattagtgccactaaaaagcaaaaagaacaccaattgttatcccaattttcatcgttcttctgctgctgaaccgtcacggcctccccaattttgcatcgtttcattatccatcggttgtccaattcctttgctttggccaatgtcagcttttcctttgtccattcgttcaccaattcaaatgtcacaattgatggcgcatgaacagtaaaatgaatttggtaactgacggaagaaatggcattggcacggagaaattgctaaacaatttggaaaataaaaatagaagtagtcaaaatcagtaatatgcaaaaaaatatgggaccataccttcttgaaattgttgacccaatcgaagtacacttgtcgttcaaaagtgtgcaacacaatcgcttgggttggccatcttttctcggtgtgtgccaaatcgtcaccaatcgcaattgcctcgggcaacagaccatatgaatcgattgaattcaactgattgagatgagtgataattgtcggcgaagtgcgacgaagcaaatttccaactgatca

SEQ ID NO: 41479 - DNA, 98 bp, Heterodera glycines
ctaccataacttttgtaatgtccgccaacttaaacattcttggaatcattcgatagagctaatagttctctattaactcacctaaattacaaaaaatt

SEQ ID NO: 41480 - DNA, 1069 bp, Heterodera glycines
ctgatcaaacccgtttttagccgaatatcctgtcaatatttccctattagaaacgatactgtgaattctttcgcctctttaattcattcgtgctttgcttcggattagtctaaaaatttcaagacgccaattttacatattagccatttttttttatttgtgaccgcaaatttttacatactagccattttttattttattgtgaccaagcatatctttcctcgtatttctgggatttttttcagaatgtggtcatagaataggtgggttgaattatttgtattttttatgagtattatgtaaggatattttcgacaaaacataaccaattccgagtttcatgaggcatcaacttcattcttttcttgtcctgcccaattgtctcaaatgtatacctaaaaatgcgctaaaaatgatcaaacccgtttttagccgaatatcctgtcaatatttccctattagaaacgatactgtgaattctttcgcctctttaattcattcgtgctttgcttcggattagtctaaaaatttctggacgccaattttacatattagccattttttattttatttgtgaccgcaaatttttacatactagccattttttattttattgtgaccaagcatatctttcctcgtatttctgggatttttttcagaatgtgggcatagaataggtgggttgaattatttgtattttttatgagtattatgtaaggatattttcgactaaacataaccaattccgagtttcatgaggtatcaacttcattcttttcttgtcctgcccaattgtctcaaatgtatacctaaaaatgcgctaaaaatgatcaaacccgtttttagccgaatatcctgtcaatatttccctattagaaacgatactgtgaattctttcgcctctttaattcattcgtgctttgcttcggattagtctaaaaatttcaagacgccaattttacatattagccatttttttttatttatgaccgcaaatttttacatactagccattttttattttattgtgaccaagcatatctttcctcgtatttctgggatttttttc

SEQ ID NO: 41481 - DNA, 1072 bp, Heterodera glycines
atttggatataagaaatgaaaatattgagaatatcacaaaagtgatcatgaaaattgtaaattggagattattgggacttatcagctcggtcctccgcaaacactgattcagtttatatttagaggataaggagttgaaatggtggaattccaaaaaggtgaccaagaaaattgtaatcgaatattattgacgattatcagctcggtcattccgaaaacactgattcagtttatatttcgcgaagaatgagctgtaattttgcgaattagacaaaaatgatcataaagtaacaaatgagagaatttcacattctgctaattaggctttaaatataaactgtttaagtgttgcagacggatcaggttgataagcgtcaataacctcagatttactattttcgcgaccccactttttgaattctgacattttcagctcattacgctctaaatataaacatcatcagtgttccggaaggatcgatttgaaatcgccaataacccccaaattacaatttcctactgtaaacttatacagattacatttggatataagaaattgaaatattgagaatatcacaaaagtgatcatgaaaattgtaaattggagattattgggacttatcagctcggtcctccgcaaacactgattcagtttatatttagaggataaggagttgaaatggtggaattccaaaaaggtgaccaagaaaattgtaatcgaagattattggcgattatcagctcggtcattccgcaaacactgattcagtttatatttcgcgaagaatgagctgtaattttgcgaattagacaaaaatgatcataaagtaacaaatgagagaatttcacattctgctaattaggctttaaatataagctgtttaagtgttgcagacggatcaggttgataagcgccaataacctcagatttactattttcgcgaccccactttttgaattctgacgttttcggctcgttacgctctaaatataaacggcatcagtgttccggaaggatcgatttgaaatcgcctaataaccccctaaattacaatttcctactgtaaactta

SEQ ID NO: 41482 - DNA, 952 bp, Heterodera glycines
  unsure (1)..(952): unsure at all n locations
ttttctcgcaatttttgtggccacaatttttcaagcttttagaggttgtcatttgcattttatggtcgttttaactgtaatagggtcgggtcgtacgaaggcattccatttcaacaaaagtccgtacataggtccaaaaaatttgttttttttaatttcaaaattttcaggttcaacagtttgtgtccttcacgcaggccaacgaacagacggcaattacatgtttgacggcctccaactggaacttggagatggcctgtgacatgttctaccaaaatccgtcctacaccaaccagcaagcgggcgccaccggtggggcggacagtcggaaaatttgtcacctgttcaacaaatatgccaccggtttgttcattttattattgatgataattccggtgtgcccttggaccgtaaaaaaaaaataaaacggttcggaaactttgaatttacaactttttgttcgagtttgcattagtagggattagcaattggtcaaaataatgttgtcagagaaccgtggtcaacaatcctgaaaccccaaaaccaattgatgatcacaaattttgttttttatgctccatcctaaggtcgagactacatatccctaacaaaacaaaaagcaatttttcctaccccccccccctcttttttcagatccaaaggacaaatctcagaaaattggacccgatcggatcggtcccaatgggatggttcgtttcttgcgcgacttgaacatcgagccaacgagtcgggcagttatggttttggcgtggaaaatgggtgctcagaaacagtgcgaattcacactgcaggagttcggcgacggaatttccacactgatgtttgtgtctttattttaatggggagaaatgcagttttaaattttttaaaattgacaaatttcagaattnttaaggggtttttgagtcgagaaaatttttttctgcatttt

SEQ ID NO: 41483 - DNA, 1229 bp, Heterodera glycines
tcctttcaatttctctttttttattcaattaagctaatattaaaaatgtccaccgacggggagtgaccaacggaacggcggcaaaagatgagggggatcagcagcagcaaaactgcgaacagttggtcacgcttttcgaggggatgaacaagttcttccgggaggaggcgatcatccagggctcggaacattcgtccgttttggtcagtcgtcccaaatggatttttgagttttccgagttcagtttggcattttgattctgtccgcctatattttggtcatcgcttttggcgccgttggcaatattttgactatttttgtggttcttcgcaacaaacagatggtctatttcatggcaattttcaattattccgtacaaatttgactttcagcgatcagtgcgcaactttttcattctcaatttggccatgtccgatttttttgtgtgcacagtgaccggtgggatttttttttagaaattttcgcttcccccgggcgattaaccattaaatgctgattggtatcggtcagctgctgctgatcagtccgtgatcaatcagaaactactctttcagcacccaccactttgtacaccgttctctacgtgttttggccctttgggacgacgttgtgcaaaattgcgggtagtctccagggattcaacatttttctctcaactttttcaatcactgcaattgctctcgacaggtgaaattttatcattgtctttctctaaataaatattccgatcaactctgatcactcttcaattttaaacaattgatttactttccatttgatcatatttttcaattttacacatactttggatcataaaagggaagaagctttggttggacggttaaaagccataaggcggggttgaaaagactcattaggagagatggctaatgcgtcttcagtcggcgggagagatcccacgacctccgccggtgcggcgattgctctcacccaaaagcaatgccatggccttccatctctcttaggtctctaatgagcattttaaaaccctaaaaaggtattttctcgtcattttcccgacacggcatcagtgtcagcaacgcctttcgctgctgttcttttcaatgatttggttggcctccgttctgttggccgcccctttgtttcttgcggccgacttgcgacccgttttccagcaaaaaagctgccaaatcgaattgaatctgtgcagtgagcagaacgaacgg

SEQ ID NO: 41484 - DNA, 1504 bp, Heterodera glycines
aaaaaaatttcaaaaaattctgacaaaaaattgatttttgaaaattgcggatgcgggattacggattgcgggaaattgcggggtttttggacccccgtaattgcggattgtggatttccgtaattgaaaatccagttgcgttgtatatgctgtattcgttgattatacttatagtagagaccgaacttttaggcacttggacaatatagaaggccagggtcatcaaaaggcgaatttacggtaaattaaatttcatttttttatgcgttataattccataagaagttagcagaaaataaaggcatatgccacaaaacccattctctgcttattaattctgggtacaattaattcaaggacaataattttttaaggacagttaaaagaggtaaaatacaagtgatttattcacagaaaaagcaagaataaagtttacataaattcattcacttaaaaacaagaatgacgcttacataaaacttgaaagtggattttctgtccaaaattttttggcaaatatttttctttcggtgccaacaaattccatcttctgtcacatagtgatgtcatataattcttcatcatcatcatgttgtgtcttggtattcaccgctttgtaaactacttttgtgtgtggatgtgtccgcgtgatcgttgtcagcgttcccctcacaaatggtcggctcgcgtagacttggacgtcgcgctttagtggcatgtgccgccgacaacagcagattgggttgtggaggtggtgcaagaaaaatgctacctttaaaaataaaaaattgttttcttccaagatactccaaaaattttttatttgccatatatgtcaaaattaggtaatactgtatactcagccccatttttagaaaaaaataaatttaaaaaaattcatataaaacgtttttcctgagacgagttcgctaatctcgaatcttacattcaattctagtaatcccgaatccgaattcgaacaaaaagccaaaaattcaaattttcaaaaactcacttttgtgtgaaaatttattaaaacaagctaaaatttgtcacaaatcattgaacttaaatggtcatcctatacagattcgaatgtaaaaggaaatcttgaacattttgtttttcgactttttgttcgaattcggttcgatgttcggaattcggaattattaaaaacggatataagaatcgtgataagcgaccacgaaaaccccagaaaagaggttttaaatgattttctcaaatttttatttttttttctaaaaatggggggtaggtggtacaaagtactgaattacccaaaattatattaaaaaaacttcatttttttttttaatgcctttgcttggtaacgttggaagcacatcatcctggaaccaccatgaacgtgtcttgaagcggagtgttctggacattgccgcaaagccaaaattgtgggcggcaaacacgcatacaacatatctttaaatcttttattattaaatagtgggggggggggggg

SEQ ID NO: 41485 - DNA, 1328 bp, Heterodera glycines
  unsure (1)..(1328): unsure at all n locations
ctcatctttttggtattctatcgcntacacaaaaccgatacatttatccaaacatttttgataagaatacaaataaaataactaattcttttttaattcaaaatctcttgcaactatgtctgaggtctatctaaagttgtttgacccgtttttaaacagtntaatgtatcagggtcattaggattgcatgtaaaagtaacaaaaagaccgggttttccagttttattaacaattgccattgcgatccattagatccgttaaatgttcatgcatatttcgtggcacatcagtaaacgttggtggcaatattaccttttttgatttctgtgccaactttttcagctttatttttaatgaaaatcttcaacatttgagtaattactgctgcaaagttctgcttgatgtgatttgatctattgaagtctatcccattcaacttttgcagcagaatctattaaacattgttgaaataattttttggcataaaaatggggaaaaaatgttctattttctcggaaaaaacaagtttttagctatcacaaattgtaactctttttcctatttggtctccaaaatgatatcctttttgaccacatggatacagtaatgatatgtcattggctctacaaatttatctagtgggtataaatctgttaatttttttattcggttttcggataaacaataattctcgcagggggaatatcagcagttgaatcgcaaagcataaccgcataaacttcatttgtatgaagaagattataacaacagtaaatctgtagcgacacttgtatcgataaaacaagtctgttgtgaacacgaaaatttacggagattggaaatgccaaaaaaaaattatgaatttttccaaaaaaaatgggtgttccaattactcttttttgataactcacaaatttcctagaaactacaaaaaatctgaaaaaattcatgtaagagtaactttttatgctaaacagattagtcagttgcgctgcgataatcagaacactccttcagagtggtctgagaaccagaaaaatggcttaaaaccggggatattttggaacaaattcctaggcggcttgagtaacacccattttttgagaaaattttcatattttttttgacattagcaaactccttaaaatttcttgtacatgtttttctacataagcccattaattttccanattacagctaaagctaatgaatcgattttgtgcccaatttcttcgtccatcnngcttagttttgcctagggatttccaatctttcagcattttcgtctcactcatcattgaattactttttcttattcctcacttctt

SEQ ID NO: 41486 - DNA, 1337 bp, Heterodera glycines
aacagtgatcagaagaggtccgtttttcaaattttgttgggcttgggcgggcgcttcgcgaccggtttttaaatttgtttgcgccagacctgcccaattgccccgagcgcaagccgcgccgatagcacttcagacacatctgccattgcattagtggcccccccagcgttacgccccgtcgatcgatgcagacagcgtggtcgcattcagtgacgacgcctttaaattgcacaacgcgatctcgcgaacgagcaacaaataggcaatcatggtgggatctaatcctttttttcataggcccaacgccaaaggaacgctggcaaacggtcaacgccctacgcatctgtgtaaacgacgttacgcattccaatggtgcgtatatgataaaaggttcatctggtatgttgtaataaatagtgttccaccaacaacatcgcggctgtcggaatcggttgagcgaatcgacctagccatgactcctacaacgagtcgcgccccggtcccccactttccaattcaccagcagcgtcgcgtccgaattgttgatgtaagaggcgatggagcttgcttcttccggtgaatatattaatgcactaccaaattacaagttaccattatgtagggccattgtgttcgccattgttggccgtgacgatgtcaacatcgcattcaacttgcgtcagcaaatgtttactcttttgcgacaatttgttgacgacccaaactgtttcccgcgaggcttctatgccaatcgcgcgcgtttcatgcaatttattgaagcactccttttggacgatcaaatcaacaactttgacgcttacatcgcaagtcgggaaggcgcaactgcttgggcagacgcatctgatgctctgatcgcggccgtcttactcgggcagacaattgttgtcgtgtcacctgtagatcctgacaatgtccgccgtgctacgagcttttatgacgacaccgttcgccatacaattggagtgtttttcccagacggaaatcatatggtgacaaatattttcaaggcctacctcatattgctttaaaaacagagaatggagcaagactttccacatgatcagctgcaaaacttcactgtacatggtcatcaaggtcaacaaaggccggtacagaacccggttttgatatggtacaatggactcaaccacttccaaacaatcttggtcagtttctcagtgtatgtcaattggagctcagttcatttggtgtttcagggtcctgaacagctgaactaccctgccgcacacaacatcgtgacgaaccagcagtacgtgactccagcgcatctgttacaggatgctatggatgtcggg

SEQ ID NO: 41487 - DNA, 238 bp, Heterodera glycines
ctgcggacatctacatttttgaattgaaaaaaaattcgttattactctttctttttctccatattgaccatcatactcatactccccccacccttttcttcttccgccaccctccgccctctcttgatagtttaaactgaaggcgggaaacgacaatctgatccccatcaagctagcttctgcaggtcctgctcgagcggccgcccggggatcgatccccgatctagtacatagatga

SEQ ID NO: 41488 - DNA, 1335 bp, Heterodera glycines
aaacaacccgactccaagacacgtaaagatgggtaggcaccgccagttggacaggtcttgcaccttctctggagccccggtcaagggaaacttgaacaagcgggccaacccaagctcacggtctatacgctacacctcgcaaccccagaggagctgcgattcagcgctggactcttcccagttcactcgccgttactacgggaatcctcgttagtttcttttcctccgcttactgatatgcttaagttcagcgggtgttcacgtctgagttcaggtcgaaaaatcaaagcaggaatgccagtaatccaggcactccgccacagcatgcaaagcattggtgcgcttgagttacggtccgtaaaacgcgaattagaaccacaagttcgcgccagcacaccaaaaccccacagccgagctgagcaagtaacgtaagaacacgtacaagtacatgatcccacgaagcaacgcacaagcagtgcattttatggtaacgaccctgaaccaggcgtgccaatggatgtaactccaatggcgcaatgtgcattcgaatgttttgtgttcaaggtttctgcagttcgcactaattatcgcagttggctgcgttcttcatcgatccacgagccgagtgatccaccgataagactagaattcattcttcaacagaagtgtaaaaaaaaataatgaaaaaaaaagaaaaagctggcggtgcccgagctgacactcattgagtcttaagccacgtgctaggccaagcacgggcactaccgcgtcgtctcatcacggccacggacgtagcagcaagcacaaacacaccgctagttacggcacgtaagaccgggaacgaaaccaccatccccagtcagtgtgttatgtgcctgccacaacaaccgctcaacgacgcacagacgccagcacagccgttaggtcgccccacgagcgtgcatcccacattggcgcagcgaaccagccaagcgaggcggcccgccaccgacacattgccacgcagcagccatacacaggctttcacacgtgcagcactgagcggtataccacagctccaacgtatggaagcaccccaaaagcatggctcgtgaggcagctgccccgtaatgttgggcagcgtccacaagtcatctcgaacgacctgtgcccatcagcggacgggggcatttggtggtgccaacgctagcccaacaggacagcaggtaggtggtgaataggaatcacttgggtaatgatccagcagcaggttcacctacagctaccttgttacgacttttgcccggttcaagccactgcgattaaatcggttccagtctgcataccgaccgaagc

SEQ ID NO: 41489 - DNA, 1150 bp, Heterodera glycines
  unsure (1)..(1150): unsure at all n locations
atttattagacattttcagggcaaaaaaaatctgtacttctagggaggggcaaaggaaatgtggttttcaataacaatattaaatttggcttccacaaaaaggaccgcattttgccctattcctcaaataatgcctttttccacccaaaacacgtgcctctgtcgaattgttgtcgcagttttctttgttgccggtgccacgggcggcgttcggtgtgtcctccgcaccggagccggcatgttcaggaagttcacgaggaccaccgctgacggagcaaaccctgggcccggcagcactgttctgcacaacaattcggctgccaccacccgctggcccgcctccgccggcctccacaagatggccgactccgccaatgacggcggaacccggtccagcagggccagtgttggtgctgttttcggtggagttttgcgtggacacgaagttggtcaacatatataatttttattgtggagttctatgttgtttaacggtaaatttttaaaagttcagcagaaaaatcccgtatttgtaaattatgtgatatgtgggattaaaacgcgagatcacactcagcaaaactttgagtataaatcaagggtacgcacgttcctttttgcctattttaattttgttttccaatatttctttggtactgaaatgtctattttcacggggactcaattttcccggtatccagatggcgtcatttcgatttttagacttagttcaccaccagttaggggtgaagcgcgaccgcgatatttggatccgcgatccacaacaatttggaactccttggcaattttggacgtttaaaaaaaattattaaaatttaacaaaataaagcctaagcttaagcctaggcccaagcaagcctaaacctagacttaacctaagcagttgtacgagttgttatgacaccaagtagggatcactagacttctacgcgtaaaaacaattgcccaaaaatggataattaagcaacaaaattttaaaattaaatacaaaatgacaaattaattattaaaagttggaccttagaaagcctcagataanttatgttggctttgttcttcattgttttggagcaaaaatacataatagacccctagntggtttacatatatttttgatgttaaatatttt

SEQ ID NO: 41490 - DNA, 940 bp, Heterodera glycines
cataaattgaaaattgccaaataatcaattttcactcccaccctagggtttaactcaatgataaattttaatttgtatcttttgcaagtaggcaatctgttttaattgttttcataaaaacatacttttttaattaaacgctgagacaaggaaatggccaataaaatccgcccattaattcgttaaataatttgattttttatttttttgccatatacaaaatcaattaatgcgcgtcattcagttatgaatattcattcgtataagtgtgtaaaacagagaagaaaaagccatgtcgctaattgattttaatgtatgtaaatttttagtgattatattaaataaattttttatttttatacaaaataaaattcattttcattttcgtttagaaatggatagcaaatttttcctttctatttttttatattttacattatatttctcttcaatagcatttgctaaactaccgaactcattatttggttagtttttttaaaaattaattttggactcagaaaaatgattaatcgaaagctttttactaattgcaaaaaaaaatttttgttcatgttttatataaaaaagaccacgaaatattcaaaaaaatatatttttgtggccatttttgccagattttatattttattgaaattttgcagaataaacaataccaagaacttaattttgttaataatgaaaaaattatggtttaaaattgcctggtgatgtattttgaccctgggctaaaaattaaataaattcttttttaaataaaactttttttctccgtccgttatccttatattaaattgcaccattttgattaaaacgtgaaaatgtttatcgaactttacgcttccaacaacgcttttcctttttgagatttgcataagcattgaaaagagaaggggtttaaaagacaaattaatcatttaca

SEQ ID NO: 41491 - DNA, 972 bp, Heterodera glycines
atattataaatttagttaacttaacaatagaatccatttacattaattatttgaattaaactttactttcattgataaatagttaaatagttttcatgcatttttttaattttaatccttatattgtaatagtgaatgcaatatttcatgaatttgtaagtttttaatttgaaatttttttaaattctataactttgatttattttattatagttagctcagcttggaaattggaccatttatattaattttaacacagttttttattgtcttaggtacatttttatttaatttgtttttattaaataaaataccgataaatttttttatattctttttggtaatttaaataaaaataccaataatcttttttattttttatattcttttgaaagttttatttgaaaaataaaatcttatatggtgtttaccttcaatttaattatattaactatttaatctttcatccaaattgaattaacaaatatgttttaaactcatctcacagtaacgggtacgccctgcttcactggctactgaagctccaacacaaatgagcggcttcatcattatgtaattttgttttttattacttttcaatataaaatatattttgtcaggagaatatttaatgaatttcattttctcattaagaatttcgtataatttaataaagtgaatattatgtaattcttaaaataattcaatcttttgcttagtttactctatattcttaaaagatatttttaaatgttttttttaatttcatacattaattttattttgtcaatctgcttattattagacatatttttaaactttgttattaattttttatattttttcataaatgtttagttcgttttttaattaattagatatttattttagcatatattatacctttatcttattttctgtataatttataagagcataattattggggattttgtatctatttaatccctt

SEQ ID NO: 41492 - DNA, 734 bp, Heterodera glycines
aaagtaactaacgtgacaacgcaattgtgacgaaaagccctttaaaacattgagcagaatacattttatttgtaaaattactatgcggcgaaataaatttttaattaaaaattggaatgaattgggaacaaaaattccatctcaaatttataatggacatatttaatgatgcaaaattaataaatatgatcatcagtgatgtttatctattttttattctttgatgattgagacaaaaaatggagaatatttttgattaataattgaactacttaaaagggaaattagacgccggtcgcagatcgagttcgcgtctcacctctggtgcccgattggcctaagatgaacaaattaaaagtgcggagaggacaaaatctcatcgaatcctttatcgcttccgcgacaggcaccgtgcatttattcattgaatatcctactgataggcgcagccagaaaaattttggattttttgcaatttagtaacagattttgcaccaaataatgccataagttgataaaaatttggtataaaacttcaaaaaattgcaacttttgaatgttttatttcgaatgctcattttcaaggacatcttgaattaaagaatattttcaagtgagagggcccaagtttccaggacgttcttggcattcaaggacgaatccgaaccctgctctaattccagtgtccaattttctggtgtccaattttctggtgtccaatttaccggtccccc

SEQ ID NO: 41493 - DNA, 1030 bp, Heterodera glycines
  unsure (1)..(1030): unsure at all n locations
ccccgaaaacaaaaaaatcgattttttcaagtgtccgtctccccaagtcaaacaattatgggggagcaaaaatccaacgcacaattaaagtacaggctatagggaagctattccggaaggattcggtctccccataaatctgggcgcatcggttcggggggactgccccgaaaacaaaaaaatcgattttttcaagtgtccgtttggggtactcaaacaattatggggagcaaaaatccaacgcagaattaaagtacaggctatagggaagctattcccgaaggattcggtctccccataaatctgggcgcatcggttcggggggactgccccgaaaacaaaaataaatcgattttttcaagtgtccgtttggggtactcaaacaattatggggagcaaaaatccaacgcagaattaaagtacaggctatagtgaagctattccggaaggattcggtctccccataaatctgggcgcatcggttcagggggactgccccgaaaacccaaaaaaaaattttttggataaaaattatttaaatgaactgactagataatatttaaaataggttatttctcttcctttcagtatccctgcaaagtttggtgcgcttctgatcagtttctgaaaaaaaagttaagcctanactttttggcctgttntaaaaggaattanaaatttttaaaaattttattcatctccctttttgatagaaaaagcatcagagtgcctaaactaacatgtaaataaaatttggtgcgtttcagaaccctttctgaaaaaatatttaagaattaattttgcaaaaaataaataaaaacgaaagactcagattttcgaaaaattttttagagcaagctagctcggcgctcatttcagtgtaagttagtcctttaccggggagtatccctgcaaagtttggtatgcttctgctcaattagcaaaaaatatgagtgatcaaactttcactaaaaagttaagcctaaatttttggcatatttaaaaagcaattaaaaaatttttaaaattt

SEQ ID NO: 41494 - DNA, 557 bp, Heterodera glycines
gaaattttgataaaaagtctaaaaaaacacaaaaagaaaaagtccagaacaaaaaagtcttaaaaactcatttaaagattcttccatcttatttcaagtgcaatttacggggaccggtaaattggacaccaagcggaaaactggacagcgccagaattttggacaccgaaggaaaattggacaccggaaaactggacaccaagttcctaaaataaagccaggaattgggggtgaaaaataaatttatgaagggtaaatggattaatgaattaaggcacttagagaaaatcagtaaaaatttaatcattttacgttttcttgtttttttaatatttttctcttcacttttctttatttatttcatggcagctgtcccagacgagttggtccggcaactttgaattgtttaatatttttttataattttttattatatttataaatgcttaaatattattattttttaaacttttttaattgaaatttatttattttttctttttagatattatttttgatgcttatttttactcctaacttctctttattttaaatta

SEQ ID NO: 41495 - DNA, 629 bp, Heterodera glycines
ttccttttctttacattttggacacggctccgctcataaacaatttgttcccattgaggttcctgtcactcaaaacttttttttaaaattttcttttttcaatgcgctgagaatgtgtgaagccgccattcgtcaaagagaaagatgcgcaaacaaagcaaaacaaaacagagaggaaaatcgatgatgtttttgtgattttcaaggatttttttaagcgaaattgcattgccgacatttttttttgtaacggcatttttgtgttaataaaaaagcggcgtccaatcatttggattcataatcgcaaaaagttggtcgacctcctctctaacaaaaacctaaaattagagaccccgaaaaccttgggaaactgttttcatgaccataaaaattgtcaaaattaggggaaaattttggatcatttgacaaataaagaaaaataagaaatttgcaataggacatagggccgaaaacactaatcagcgtaaattgcaaaaaaatatacatgcatttaaggatgactcatacggacacattttttgggctcataaaccgcaccgaaaatgacagtaaatgtcaacaaaaactcgactgttacacgagcaaataattgttgttcacaacaagaa

SEQ ID NO: 41496 - DNA, 836 bp, Heterodera glycines
  unsure (1)..(836): unsure at all n locations
attttcatttcttttttacaattnttaatcnttnactntnaccatcatccaaaaaaacccttnaattcacnatttctttactttaaccntnaatttttaattaaattttttntnncnncnaatttctttgctttttaacagcgctcacaactgaaaattttaaaaatcggcgtaattattctcatttgggataaaaaattttaaatttgagtgtaacatgttaacagattttcattaaaaacgaccaatttgtgaatttaagcgaatttattaatgaaaaaataattttggaggcccggcggtgccaatagagcgcggccgggaaatttttttttgaaaattttcctcgattttttttttaatttgcatttctgttcttctataatcaagcaggtttcacaaaatattactgcaacatttttatttatctttatacccgtttcatttacttgaaattttatttatatttaaatttattcgatatatttgtgtctttttatgacatatttctagtctattgatgtctccaggttatcaactatttgactcaagttatctttcttttcttttgtattttgtattaggaaaaaattaatagtataactattgtccagttctcattgacttaatgcagttatgcttccttataaaagtcatttttaaacttacattgataatattggttttataatattttgtattaagaaaagttgatttacttcattttgataaaattttaatcataattttttggttttgttttatcattttgaagcatatttttanatagaagaggatatattttatttancaagttctttaaattaaatttgcat

SEQ ID NO: 41497 - DNA, 1040 bp, Heterodera glycines
aagcagcgccggccctctaccaaccactgaactcatcccttcataagcatctcgccaaattcctacccctcccatttgtgcctcatcgaaagcgtacacagcgaaaagtaaataaaattcaagacgaaaacgacaatacacaacattactgttagaacaacccataaaagccataggattggaattgaggggatttaacaaaagtggcattttgtctagaaaacaacaggttcaagtattttatcgagtaccgaaaaccttccaattcccacttttaaattttcattaaaatgagaaaaataaactaccacttttcggacggcgaattttgcggtcatcaaattttgcggtcatcaaagtaatggcacagcccactggaaaataccaaaaatttaactatttaagaaccaagcaattgaattaaatataaaaaaagtcggaagtcagggtcacatgggttcctttctagagaccggaattttgaaaaagatagacccggatttcagagtcgaacccggacagtatttcgtgataaactgtgttttctttgttattgcgcgcatcacctaacttaaaaagtcaaacccacaaaaacctttccaaatgcaaaggtaaatgaacccttttaatagtaaacggccgccatttagagaatttgtctgaatttgttgtatttgcgccgctaaataattttgttgatttttatgggagtaccattattttcaataaaaaatcatttttttgggcggggcaaggtaaatacgtaatctactagcagtataagacattttgtttcatattccatggacgaaaaaaaatgccgaacctccataaaagatgaagcttgacacgcctttgcgcctgtcctcagtcacatgagacggttgcgctgggtctttggtcaattcgttgcgatacgcgtcaaagttggggaattggacatcgttgtgcactgcttgacgaccaagcggaagcgcgttgaccgactgttttcgaaggttgtgcaacagcagaattgacgacgaattgggcaacataat

SEQ ID NO: 41498 - DNA, 1011 bp, Heterodera glycines
ttacaaaaaaaagaatgtgtggagggcattgaaccaacccccactagtgatcaacgatcgcttaggaaaatcagtggtcgactgctcagaacaatgggacaaatctgcgcagtccgtagccttccgattcgtacttttttgcccggctttgctgggaagcgtcgaacaatgatttgtaaatgccttgagtgattacaattaatagccagtcaaccattttgctaattgaattgggttttccttcgaccacttacggctcaggtgaagattgtccgggttctgcgcaaatggcactcggacgacaagccttcgcttctgtttggcttcgccggatgcagtcgccggcactgaaattgggctgtcctcctccgtctcttccgcttcgtcgtcagttggttcagcagaaagagcggccgctgggggcgaacggaacggactgaaacttggcgccagccccgaggccgatctccacaggggcaggtgcaactgctggtggtgctgctcgtccagcaagtcggccatggaagtgaacactctgccaaaatcaaaaatgaatggaggggaaaggggagaatgaccgactgacctcgcattactcactgcgatcagtgacagcggaataagtaaagccaaggccggcattgtgattctgcaatgactgaacgacagcgacgactttggcattttggacgggcaaaagtatggggaaagcgagaccactgaataattctaagtttaacggaattgacgaaattacaagtggagggggggggaggaaaaaaccaaacggagggaaaaggaaaatggacgaatgaacgacggaacagaccaaaggacagaagcgaaatgaaaagcaaagaatcacacggtaaaaggagtgttcagtgtgtgaattcaaattccttttcatttgtcacttttcccaactttcgagggaaagcggcggacgaaagggtcaaagagaggcggacaaaagccaatgaatgccatcactttggctcctgctagaaa

SEQ ID NO: 41499 - DNA, 1074 bp, Heterodera glycines
aaaacaaatcggagtaattaatttaatctgactttatagataaatgggaattaaagcgaaggattcatgcagaattataatctatagaaatcttctaaaaagtagttcctcgcagattctgggaccgtttctataaagctagagacatatgcgctaactataaaaaagatgaatcattttttgaaaaatttatatagttcgactaaatttgcaaatcgatttatggtgtacaggatgtttgtcgaaacataactcgtcaggcctttaagatagacctgccattgctattcctgcaaatatgcagtctagtcagcccaatcgattgctattcgaatggtttggggtcgttggcccaaacaaaagttgtgctacttcttgcaaagaagacttagccaactgtaaacagcaagccatccaaatgcttcaatgtaaaaaaaaattacatttggatgcaacctttatttttcctcgcctctcttttcgaaaagaaaagctattagcaagcgtgtttggaccaattctaaaacaaatcggggtaattaatttaatctgactttataagataaatgggaatttaagcgaaggattcatgcaaaataataatctatagaaattctctaaaaagtagttcctcgcagattcggggaccgtttctataaagctagagacatatgcgctaaccataaaaaagatgaatcattttttgaaaaatttatatagttcgactaaatttgctaatcgatttatggtgtacaggatgtttgtcgaaacaaaactcgtcaggcctttaagatagacctgccattgctattcctgcaaatatggagtctagtcagcccaatcgattgctattcgaatggtttggggtcgttggcccaaacaaaagtggtgctacttcttgcaaagaagacttagcctactgtaaacagcaagccaatcaaatgcttcaatgtaaaaaaaaattacatttggatgcaacctttatttttcctcgcctctcttttcgaaaagaaaagctattagcaagcgtggttggaccattctaaaacaatcggggtaattatttaatctgac

SEQ ID NO: 41500 - DNA, 881 bp, Heterodera glycines
aaaaaaaaaaaattgattttttcaaggggtcccgttgggggtctccaaacaatttgggggagccaaaaatccagcgccagaattaaagttcagggctatagggaagttttccccgaaggattcggttctccccataaatctggggcgcatgacttcgggaaaaactcccccgaaaacaaaaataaatcgatttttcaagtgtccgttgggggtactcaaacaattatggggagcaaaaatccaacgcagaattaaagtacaggctatagggaatctattccggaaggattcggtctccccataaatctgggcgcatcggttcggggggactgccccgaaaacaaaaaaatcgattttttcaagtgtccgtttggggtactcaaacaattatggggagcaaaaatccaacgcagaattaaagtacaggctatagggaagctattcccgaaggattcggtctccccataaatctgggcgcatcggttcggggggactgccccgaaaacaaaaaaatcgattttttcaagtgtccgtttggggtactcaaacaattatggggagcaaaaatccaacgcagaattaaagtacaggctatagggaagctattcccgaaggattcggtctccccataaatctgggcgcatcggttcgaaggggactgccccgaaaacaaaaataaatcgattttttcaagtgtccgtttggggtactcaaacaattatggggagcaaaaatccaacgcagaattaaagtacaggctatagggaagctattcccgaaggattcggtctccccataaatctgggcgcatcggttcagggggactgccccgaaaacaaaaatcaataaagatttcaagtgtccgtttggggtactcaaac

SEQ ID NO: 41501 - DNA, 141 bp, Heterodera glycines
aagctgctgtcgcagttcaaagccaacgactccggcaacgccccggtcctgctgatgctgggcggcttcaagttcagcctcaacaccgcggtcttccgggagatccagcagtccaacgagtatcgctggcaggcgcaggac

SEQ ID NO: 41502 - DNA, 1100 bp, Heterodera glycines
ttttgagcgtaattacgatttttacttgaccatttttttctaggcttagatcacatgcgattttcggcactctgataattttagcgctcataatgggatgtataaaggcgattgtagaaggaattggaagcgttaaaattgtttgagaagctttttgagcgtaattacgatttttacttagaccatttttttctaggcttagatcacatgcgattttcggcactctgataattttagcgctcataatgggatgtataaaggcgattgtagaaggaatggaagcgctaaaattgttgagaagcttttgagcgtaatacgattttacttagaccattttttctaggcttagatcacatgcgattttcggcactctgataattttagcgctcataatgggatgtataaaggcgattgtagaaggaattggaagcgttaaaattgtttgagaagctttttgagcgtaattacgatttttacttgaccatttttttctaggcttagatcacatgcgattttcggcactctgataattttagcgctcataatgggatgtataaaggcgattgtagaaggaattggaagcgctaaaattgtttgagaagctttttgagcgtaattacgatttttacttagaccattttttctaggcttagatcacatgcgattttcggcactctgataattttagcgctcataatgggatgtataaaggcgattgtagaaggaattggaagcgttaaaattgtttgagaagctttttgagcgtaattacgatttttacttagaccattttttctaggcttagatcacatgcgattttcggcactctgataattttagcgctcataatgggatgtataaaggcgattgtagaaggaattggaagcgctaaaattgtttgagaagctttttgagcgtaattacgatttttacttagaccatttttttctaggcttagatcacatgcgattttcggcactctgataattttagcgctcctaatgggatgtataaaggccattggagaaagaattggaagcgctgaaattggttgagaagctttttgagcggaattacgatttttacttagaccatttttt

SEQ ID NO: 41503 - DNA, 552 bp, Heterodera glycines
taaaattttttgatttggtgaaggtttttagtgcatataaaagcatattttgggggtttttgagaataaatgcatattttgccacttttccatttttagagcatatttcggtcatttttggcaaattttcataagaaaaatgcgaaaaaagcgaaaaatacacccctaaggatggattttttgagaatttataaaaaatacctttaaaaatcgaaaaattttgaactttttgtgaaaatttttgaaaaaaattgtcaatataaaaatgtaattttgttttagcataaaataaaaattctaaattctaaatttcatataaaaagttttaaaattaaaatgttttgtaattgtctgaaaacgctctttagtcattgttttggtgtttttaaagtcaattctgaatttttacacaatttttggcatttttttgagggttaaaaaccatttttggcagtttttaaggcatattttagtgcatatttaggcatttttcgggtttttagagcatatttgagggatttttagtgcatattttatgcgcatatttggcat

SEQ ID NO: 41504 - DNA, 1021 bp, Heterodera glycines
  unsure (1)..(1021): unsure at all n locations
aaatttaaataattacgaattaatttgttttggcttttctccctatatttntggcttgtattttttaatttgttgatgtgtgcttctttagttttgtgtgtctgcggtagggccgaaacacactttttttcttattttttgttttcttttggaagagcaccgcactgacgaggcccactcttccattagaaatttttataacaaaaaaaatttttttcatttaattttttctcaggaattgtccgcaaatgtccgtccgcaaatgtccgtccgcaaatgtccgtccgcaaatgtccgtccgcaaatgtccgtccgcaaatgtccgtccgcaaatgtccgtccgcaaatgtccgtccgcaaatgtccgtccgcaaatgtcccactgcgatcccaaagggtcctcctctctttggttatggtcagttgcccgaactgcttggtgcttttgatgggccaaatgcaatttcttcggctggccacgcgttgtcccaatggttgcacactccgagagaaaatggccaacagaagcgattgctttgtattcagggctggacgtaattacggattacgtattacggaaattacggcctttttggagttacggattacggattacggatttttgggatttttccgtaattttgatccgtaactggctttttagattatttttcgagacgatttcttgcaagattattttttataaaatgaatttttttttctatttttattaaaaggctacccatatttcgatttaatctgacttattcttggtaatttgtagtattattaacatacataatggggagggaggctagcaaaggggaaaagaggaaatgctaaaaatttggctattttttaacaaaatcgttaaaattctgaaaaaaattttcctcggcggcgcttatcggcaccgcccgccccaaaaattcctaattatttttaaatattagctccaaaatcttagtcatttttagacaaaatcttatagcgaattgcataaaatttttcaaaaattttt

SEQ ID NO: 41505 - DNA, 1215 bp, Heterodera glycines
aaaaaatggggggggcgttcaaaatgccaaccattcaaaaaacggagtgagtgccaaaaacaaaaatatcatcctttcttccctaaaatgtcccatcgcataaaacattggctgcttgtagaactcgccagctctggcattcacaatgatctgcaaaaaaaaaaaacaatagtgtgccaattacaaattgaaaaatggaccggcgctacagtaacccgatgtgtctttttggattacggtatgggggaatcaaacattcattaatgatttaattactatatatagtgatgctcgagaccaaaattccccacattcaaactctcgagactggtggccccaaaaatttcgacagactttcccgagttaagacgcaaaaacaaaaaaaaaaaaaaacgggagactctcgagcaccacctaataattggagttcgaatacaggtcggaccgtccgtccgtatatgggtttttacgggcgcgcaacccgtattttttcggcacagactcgagttttttagcacctgtaagtccgtatctgctatttgttcgacatggcctatggatctatcaaacccgtaagtccgtaccccgtataggttgcccagtccgtaacccttacccctcttcgtaaattcgaaaaatttcgacaaataaaacaattttttttataatttaataatacggaaaatattttcctttttacgctcatagaaatattttaatttttgataaataatatattttcatttttatttaaaattatttaatctattttttgtatgaaaattaaaaaatccttctcctttatacacgcataaattcgacttaatgtttttcttaccggagagtcaacaaaattccgtgccaaattgggcccgccctccaaatccaaaccttgaaaatttaatttaaaaaattaaattaaaattattatttttatatatttttaaaaaatggttttacacatattccagtcagtccatccgaccacccaattgcgcaaatcgttgagaatgtcgcgggcataagctcggccccgggaccaatcgcccagcaaaacttttgtgctcaaaaacttcatagccccgtgcacgccttagggcaaaagaaaattggggacaatttaaatttaatttttattgcaaaaacaaattggcattccgttcatacaaaaaattgccgggatttttaaaatgggtaaatttaattcccgccttg

SEQ ID NO: 41506 - DNA, 1236 bp, Heterodera glycines
tagggcattgggtggcttttgagaggaagaagacccgatgaacaaaatgagaacgtttctaattttctcttccaattaaaagaaaattctttggaacatgaattttttctttttgttttcaaccgcaattgatcgtttttttaaattgttttgaattttttagttgttgatctttggcgggtgaattaaaaaatgcttacaaaattaatgagggatgtcattaaacttgaaatcaatcagtcacatttaaattacttaatttacataaaaataatggaggacaaataaataggggtaaaagaaaaggaaaaggcaacgcacggataattataaaagaagccctatggaaaaaaggaaatatccaaataatttaatgaattattgctgggggaggggaccaaaaaacaaaacgaaaattaacaacaaaaaggaggtggtcagttcaaaagtggagaaaaaggggaaggtgagttagattttaccagcaaatttataattaaatatgcaatacagcccaaacgcagcagtctgatcattctgaagagagagaaacattgggagaatggaaggagaaagacaatgatggatgtgttgcgacgaaattggcaaattatgatgcaccaaagtccaaaggatacgacttagtgaaaaacgtcaatttgcttgctaatgactttggtgcataatttgacaaagagagaatggcgaaagaggaggaataaaccgaatgaacatcgctgacaagagaagcgaaaggactgttgcatttccaacttaacagtaacagtacctaaggttggggtgccggaggaaaatgtgtggaattatgcgtgcgcatatttcgtctttgggatgagttgttgcccgtttttgcgttgtccaccagctcacaatcagacatgcacctgggtctcgcgattagcctgtctctgatggtaaagaagcatgtcctgcccgttgccgcccgtcatcatgttcaagccgctcatcagtgccgttccgcctccacccgtggtccctcctccgcccacacctccgacaattgttggcggagtcccattgacaaagtgtgccaagttgtgaccgctcgcttccaaacgctgactgattcgtgcgatcatcggcgccattcggttcatcatcagaaagtgttcgttgactgtgcgaacgtcacgcgcgctgtcattgcgtgacaaataggtggccgtctgcagcggcgtcttcggtgccccgcgg

SEQ ID NO: 41507 - DNA, 1517 bp, Heterodera glycines
  unsure (1)..(1517): unsure at all n locations
attttttcagttttaagtgcttatttttgtcattttagatttttggaaacggtcaaaacgactgtttttggggatccaatcgaaacggctaaagtaaaatttgggctgggacttattattttattctaattgtaagcagtaaaattgtctttgtcatntcattntagcctttgcttntaaaaatttccattttaattctttcaattttggatntaacattgggttgtgatcagtggtgatcagaccaaaaagaattaaatgtcccctaaaaggtgtgctttccctccgtcatttacctcatccaaaataacctttattacgtcgctctttcaaatttggaatcgacgacttttttggttggatatttttggttcattaatttcttctctgttttcccttcgccgctcctttcaggtcatttaccagctcaaaattctgaccacggcactgcttctccgcttttttctaagttttcttctgtaaatcctttttttttgtcccattttcaattcttttagaaaaaatgctttccccggcccaatggttggctttgcttctcctggtcagtcagtcggtccattcggtcgtcctttcccgttggcttttcctttccccccccccttaggtggtcggtgttagcattgtccaatctcagtacgatccccctccctcgtcccacttaaaatccgttcaaaatccgttgctcggcttcgtcgccgtcgtcgccatgtgtttcacttcttcctttgctggttaaaatattcaaaattcgggctgtttgtcagctaacgtttgctcttctgaaggtgtttacctcgaattggtgctaaagcaaagcaaagtaattaatggccgggggaagggacttaagaaagcgactgatgaaacaaattaaggtcgatgtttggatgcagaacattcggatggcattgtttggccttttcatcggtttggcattggtattggccaaagaccgagaacaaattcaaaaaggttggaaatgaaaaatgaaaaaagcaaccagcaaatgagcatgagctaatacaattaagaaggggctttcatcggttacgaccctttggtttggctaatgaccgtcaacaattcccttggggggctgctaattgcgagtgagtaaacaaagcaaatttatttaaccaacaaattcagtggtgattaaatatgcggataatatcatggtactatcgtctttttcctccttttctccccttaattcgttctctttcccttcagaaggcatatgcccaagtcagtgtttattccccaagggcactgatcaaaaatcgctttttgatcaatgcttttttgcctaggcaacggccattttgggcgccgccttcggctcttggcttttcttcaattttgtcccnaaattgcctcttcgcctttggtactgcgctggtgacactttccgtataccttttcaacagatttccaccaaagcgaaaggaatcaaaggattcaaatttttatttggcacttccaaattgntaaga

SEQ ID NO: 41508 - DNA, 1215 bp, Heterodera glycines
  unsure (1)..(1215): unsure at all n locations
aggcatattgcacaatacataaatgtagagcagctcaaaatagaggaataccaaagattaaaaattcgtgtntatggcccactctgctttggctggacataactcgccagagagtggagatagaccctttgttgatacatttgaaaatgtagagctcggctagcgcattcgaataacacaaaatttgttttcatttgcccccaaacaatccgcttatgacgggccgaaagaaaattcacaaaaatttggcaccggaaaaactccatttttttatgggccagcataataaagtaaacccaaaatgtaagggaatttaaattggtcatgtgagatgtttagttttttatttgacccatccgttttctgggaaaaaacttttcgagaaaagctgaaaaattttccaattgcatcagaagcagactcaaattcttcaacaacataatgtaaaaaatattacgcaagaaattatttttacatcctttttagaaatgctgcataaatttttattgtaaatagtcacaaacaaactttttttcactcccaatatctaccagttatcatacaaaaaggcaatagttaagcactgagatataaaaaaatcgtctagaataattatctaaacaatttgtcgggaaagctgtataaattctgggaaaaaacttttcaagaaaagctgaaaaattttcaatcgcatcagaagcagcctcaaattcttcaacaacataatgtaaaaaatattacgcaagaaattatttttagatcctttttagaaatgctgcataaatttttattgtaaatagtcacaaaaaaacttttttttactcccaatatctaccagttatcatacaaaaaggcaatagttaagctttgagatataaaaaaatcgtctagaataattatctcaacaatttgtcgggaaagttgaataaatttcagttgcaataggcatattggcacaatacataaatgtagagcaggctcaaaatagaggaaataccaaagattaaaaaattcgtgtttatggcccactgctttggctggacataactcgccagagagtggagatagaccctttgttgttacatttgaaaatgtagagctcggctagcgcattcgaataacacaaaatttgttttcatttgcccccaaacaatccgcttatgacgggccgaaagaaaattcacaaaatttggcaccggaaaaactccatttttt

SEQ ID NO: 41509 - DNA, 248 bp, Heterodera glycines
aatttaaaatgaattttttaaataatttaaaaaaagttaccgaattaatggaaagcaatgtctcctcgtcaagatgcaatttattactgttgggaacatattgaagggaattttctgtcttataataaaaaagagccaagaaaatttttatttttttccgggaaaaatttttaatttagaaattctttaaatttaatttatcaattttcgattataaattggttgattacattttgtcaattttcaaa

SEQ ID NO: 41510 - DNA, 443 bp, Heterodera glycines
aacgggcacaggacttggccgaagaaggaggacttgccgaaatgatggacatttttcgcactaccacggcagccgaacgaacggaggcggtggaacgttgaagggtgaaaatgacatttttaaaattttcactgactgatcaaatgaaaaaaaaggaaattcattttcatatagcaaaacgacggacgaccaacagcagcagcagatggacacggcactgacaatgatgagagggaattgcggctcacaaacaatcggacggatgtgattttatattcgatcattttccatgtatggatacgtactacatatgtatgttttatcgccatatatattttgatattttgcttgtcacgctcgatatttgctgctgctctgattgtacatatgttttgtattattgtgcctaacaacattaaatactcgataaataaattgtttgt

SEQ ID NO: 41511 - DNA, 840 bp, Heterodera glycines
  unsure (1)..(840): unsure at all n locations
cagaaaacaaaatgagacggaaaatgaatggcaaagaaaaantggagggaaaagaaaatgaatttggaaggggcgaaagaccanaagggacaaaagtgtacaaccacaggtggaggaacactgncgancggcagnagcgaataatggcacagaaagggaattggtggacgggggggggggacagtcgtcaaggagacaaacggacaaagttggcaacaaaatgtgaagcgggcgacactcagtgggccaaatggaagggttaattgtttaattggtgaggggggaaaagggtggaggcaaatgccgagacaaacggacaatgtcaaaatataacaaaaagcaaatatgatagggatttattcttagttttcttatttaagtcattatgagaagttaggtgaaacatacgtattatgataaaattgataaggactttagataggaactgaacacagttaataaatgggtctttagtcggtccgtctttcgcttcgtcactttttcgtccttcgatttgtccaatcatttcgacggctgctccaatttcgcggcgaaattgacgagcgaagttccaaggtccttcagaagcgcggccatcaactggcggttgacttcttcgctttgctgacacgaaacgcacggaccctttcctaaaagtttccgcgttaacgtatcgttatgcattgtgtccaccaccggcgataccaacggatgtaagggtggtcggagtgacaccaacggaaaacgtatcccttcttgatttcacgaatgggcggcgacaagtcaacttcagcggggggtgggcatgggccacttcaattttgcacggggtgggtcaga

SEQ ID NO: 41512 - DNA, 1292 bp, Heterodera glycines
  unsure (1)..(1292): unsure at all n locations
gtgataaaaaactcaaataaatcccataaaattctccttattttgctctatggtaaggcnnttgggcctgtaaaattgatcaacccttcgatttgttatgaatttccaaatattaggtcaaaatcccgagggccaaaaaattgccaaaaaataaagaatttttaaaaaattccaaaaattctgaaacggaaaacaaaggtcatattcgtgctcagcaccttaatttaccccagaaaaatattttttacccccattttcaacccaaaaaaaattttcgaaaatttctagggggcctagctcgaaaatttttgaaaattttacatcatgtagtacaccgttcgatagagcttaaaaagctctacaattttgctctaaggcattttttggctaaaaccaactcctgacgagttatgggcccgggactcaaatgtcccgctcaggccaaaaattttttctatttccgggaaaaaatcgaaatttttccgaaaaaaataccagtcgatagagctcgaaaaactgttgcttggaagtggtcttcgtttttctgggaaaaatcgttaaaaaatcctaaaattcaaaaacccgaaaaccgttttttaggcctagctcgaaaaattttgaaaattttcgaaatttttaaaaatcgcaaaaatcgagctccatcgagctcctcacaataggtctcgccggccaccccgcgctcaggtcaaagcctaatcgagttatctcaacggggactcgaactcggacaaagttggtactcgaatttttcgtagaagcacacaggccagggggttagagatagaggcctcggaattttttttaactctttagccaacactctcactcacagcgagcatcttttcgatttgagttttaggaaaaaagttatcgggccccaaactcgcgagaaaaagtaagaaaatcctttccctcggggactcagtcgntccgcgctcgaattttttttctaatagttttcccggatcgcgccgtgaaaagttgtaagaaccaatcgcacaacttttcagaacccctcaccgatagccgttctcgagattttggttttaagggatgagtttgccttggtcaatattaacatcatatatcaactaagggtggcacagtttggctattggtggtgcatggcgtggcttgggtaatatatggccctcatttgttattttaaaacattaattgcatctagtgtgatgttttaaagcgcttcgggctattggtgagaacgcggctaagcccgcgtcgctagaaagtgatgtaatttagaaattcat

SEQ ID NO: 41513 - DNA, 132 bp, Heterodera glycines
ccgtctccagcggcgcaaccagcggtggtgccagtacgctcgaccaggctgccgcagcagcacgtgcacagatggacgcggccagcaatgtaccggccaccgacatcaagttctgcgcgattgacgatcccg

SEQ ID NO: 41514 - DNA, 1181 bp, Heterodera glycines
ctgtcgaatgtcctttgctgtcgaaaagtccggcccccccattttacctattaaattaatatgtaacaaaaatcaaagcaattataattaattaaaatttaaaagatttccatgaaattggaaagtgaacaacaaaactatgagatattaacatataagtaattatttaaaagattgagttatgcatatgtttatatttttaatttaaaagaaattttattaaatattatttagttattttatgatttacgaaattctctcaaaaataatgaaatttgaatctgagatccatttaaaaaatataattatgctcaacaatttataaaaatttgattgcttttgtgctaatattgtgattttaaaatatatttggcgttttgttatttaatttgtttcatttttgtttgtgatttttgtgaagtgttagttgttagtttatgctgtcgtcagtttttattgattgtcttcgccttaatttatttgaaataaataattatcttcggcattgggctgtattgttttgtgtttgctttgggctgttgtcttttgctgtgtgcagtgcaacaacattattaaaagctcctgacaacaatcctcttctgttttgtacgacttggcgctcctggcaccggtgaatcagcagtggataaaaagcaaattggacgagcctcgaacttaaaatagggaaattaaatccctcgaccttcttgaaaaatcggaaaaagggaaaaaaaattccaacaagagaagagcctaatcaaccgactgtggacagctaaaaattgtaatcgggtaaagtaaaacccacgaacagacgagccatagcgatagaagtgactgaaaaacgggacacaaatccctcaaatttcaacggactgtcgaaaaaaaggggtgaacaaaaacccggaaaacgaatcaagaagcagacgaacaagacggaattttttttgaaaacgggaaaagcaaatccctcttcacttcaaatctcagcatcgggaaaggaaattgtgaaacaaatcacaaaatttgtcagttcggtaaaatccttcgacaaaactgactctcaaacagggaaactaatcccatttcgacatgcagcaacttctccaaaacaaaacatcggacaaagggcatcggatggaacaccgcagaagcaagaagacacaaattggcgcgttgga

SEQ ID NO: 41515 - DNA, 1437 bp, Heterodera glycines
atcaaaataattgtaatttgacatcgctgagcgtctcacaatcagcgaaaagcccatctttttaaataggaggttttcaatcctgtaaattgttagtatttttgaagcgagttcaaaaaatccagctgtcgttgggttttgcaattcaagcaattaaaaaatttgaatttaatttttaaataaacgcaatttggcttctcgaaacttcccgatcaaaactgaaccaactaacaaataagtccgtcgcgtttgcgttatttcatccctcttaccttcctttttttttgtttcgcttacatctgtttactgatctgttaatgaacgacctttttggatcaaggacagagacgtttggtggatctttcctttctcgcttcacttctctcttcgatcgcttaggattttcatctttcctttataatcatcttcggttgactcctcataaaattggctaattcttccaacaatttagattctgatttaaatttttttgatctccacaaatatgggcaaggactactataaaatccttggcttatccaagggagcctcggaggacgacataaaaaaggcatatcggaaaatggcgctaaaataccatccggacaaaaacaaagaggcaggggccgagaataggtttaaggtactcttttgcttttcaccaaatgcagttttaaataaactaatccgttttttatgatgtggcggaagcatatgatgtgttgtcagaccctaagaagaaggaaatttacgacaaatttggcgaggaaggtctgaaggctgatggtgctgctgggcagggagcgcctggtcgtgcgggcggataccattacacattccagtgggtttaatcttctttattttgattttctattaaacattgtggtctaacagtcactaatcgttttttaataaaataaaaaaacatgttgaattctttgagattgcatgaaacgccttaaacagtctgtctttattaatctcctgcaatagttgccagttatatacatgaaaaatctctaaacaaagttcacttccaattttgttctaccattttcaggggtgatccgatgcaaatgttcgcgcaagcattcggtggaccaaacggaatgttcagcgagttcacttttggtggtggtggtggtggaccggaggtcgaaaaatgaccattctcgcaatcaaattttaattattcagaatttcaggtgattttcggtggtggtggtggaggtggcgacgacttattcggcgggttgggcggtttcggtggcttcggaatgccgcgacagcagcagcggatcaggcaggacacggcggtgacacacgaattgcccatcagtttggaggacctgtgcaaagggtgcacaaaaaaaatgaagatcaccaagtcagtgggaggagtttgtttactcaccagttaggagtttagcaaaatat

SEQ ID NO: 41516 - DNA, 657 bp, Heterodera glycines
aaaattataccacaaaatacagtgtaagaacgaaaaagttcgccgacagggaaaaattaaactcaaaaaattcacggtcacatttcacgggttttctcagtcacggcgcacctctactaattggataacgaaaaatccaattgcaaatgcgtcaaaattgagcaatggaaatatgaaacgagcaaagagtgtattctgaaatgattaatatttaagtttaattattaaacatttaatatgctgaccaaaataaagcagatgagttcacttgccatgagaaaactgacagaaaattcaattttttcgtttgtgccgaaactaattatttaaatttacattatttaatgcgtcaatgccaaaaactcgttaaaatttggttttaataaaaggcaagactttgtgttgatcgtgtccaaatgatcagcccaatcaatacgtatgacagaaaatcggcaaaatataaactaaaactgctaatgtcaatgtaagaagcagtttccgattgatggttagggttaatttggccagtaaatttctaaagcatcgttcatcactaatctttttgaataatttttttaattactcgctacgcagaagaacgcacgacaaacgtcatggccattctcacaaagaaagaatcttttgattgcttgccat

SEQ ID NO: 41517 - DNA, 1042 bp, Heterodera glycines
ccccccccccaccgccaaactattcaaagagtataaaagatcgctccagggaagaagccgaccgccgaccgactgactgactgtgaaagaatgaatgggaaaagaatgaatgggaggacggcggacggacgtacggacggattaggatgggcattgtctggggaatttgggttgggagcgattcggcttttgggattgggttgcaatttggagcgaatttatttacgcatgccctcgaaattgggagaatcggcttctccgcaatgatccatccaaaagtatgcattaacacgctaattactcatcggcagtcgaaatcatctccaatcaacctcaacaacagctgcccaatcgtcagaaacacaattagcaactaatttacattaaacaaacaaatgcagttttttgttgaattttctttttttttgtccgtccgttagtcaaaaattcacaaaatgatttccttaaaaatcaatttttgattgagcaaagaccgaagggccatcgatcactccgatcgatcagctcagtgagccgttgtaattttaattcattcagcagcttaaaatccattgctgctgaaatggcagttgaccacagttcaaaagcgatttgtgacgacagtcgcattcagacaattgtcctctatcggcccccccaaagtcaaacggaccaatgccccgccggtgacaatggccaaaagcagcgccttaagcgatgccgttcttccgctgaacttggcttcaccatcgtcggcggcattgattcgcctcgggggcccatgggaatatttgtgaagaccattttcccgcatggaatcgcttcgaaaagcggactgttgcaaaagggtaaatccgttcaaactgcggggggggggggagacttcaaaaagatgtttatttctttcaacaggtgacgaattgctaagtgtgggcaacatttcgttggttgggatgactcacgctgaatcacttcaggcatttcggaaaatggccaaaggccgagaagtgatcatttgcattcggagggggcaaaaagaaaa

SEQ ID NO: 41518 - DNA, 1038 bp, Heterodera glycines
cagcggagcggagacagcacagcaggcgaggggcggagagtgtggggcatcaaaagcaaagaggaggaggaaacgagagaatcagaggacggcggagaaagtacagctagccaaacggaagagacggagaaagacaaagtccaactgatcggccacgcggtgcccagggacggagagctgtgatcgaaattcagaattctatacatgcatatatttatttatttattcattatgtgaagaccaccatcctgttacttttagtttcatttgtcagttgtttctttcctatctcgtccacatccatttttctgatttcgatacatttctaacttcgggaaaattgtttttcactttatgatatttaaatttatgaaaatctgatacctagcacataatttggaaggatcttttggaatggggaggggcaaatttacaaatagatgaaaatggcacaactgttccaaaaaaattttaaaaaattgcttccatcggttcgtcccttattcttttccactgttttccgctagccattgtctgtacgtcttggcctccgtcgccatttcagtggcactgcgtgccgttctctcattctcgtgcccctgcagttcggtgtaaaaacggtccatgtctccgccaaaatcgctggccttgcgcggcaccacgtgcacatggacgtgctgaaaattaaagaccatggaatggaattatcattcttgcccttcatacctccaccgtttggccggcgtgcggaccgtcctggacagcctgggtgaacgaatcggtcccgtagatatttgtcaacattttctgaacttttttggccaccacaaacaagtcggctgtttccgcgtcgctcagttcggtaagtcggcgagcgacacgcagcggagcgaccaaaatatctgcgaatttgtaaaaatgtaatggatggtggggtgggggaataaagcattacataagcaacggcgtaaagccataatttaaattttgaacaattcatatgggaaaaaaacagagaggctcataagaacgaaagta

SEQ ID NO: 41519 - DNA, 604 bp, Heterodera glycines
attgtcctaaaaagagatagccatttttctgacccccaagcacaatttccgcagctcttgcggtaatggaaaacttttgaagaggctatgcggaacggattagcatcggggttacgagatagaaaattgtcctaaaaagagatagccatttttctgagaattaattcacaatttccgcagctcttgcggtaatggaaaaaattttgaagaggctctgcggaacggattagcatcggggttacgagatagaaaattgtcctaaaaagagatagccatttttctgagaattaattcacaatttccgcagctcttgcggtaatggaaaaaattttgaagaggctctgcggaacggattagcatcggggttacgagatagaaaattgtcctaaaaagagatagccatttttctgagaattaattcacaatttccgcagctcttgcggtaatggaaaaaattttgaagaggctctgtggaacggattaacatcggggttacgagatagaaaattgtcctaaaaagagatagccatttttctgagaattaattcacaatttccgcaactcttgcggtaatggaaaaaattttgaagaggctctgcggaac

SEQ ID NO: 41520 - DNA, 825 bp, Heterodera glycines
tgcgttggttggcattgtgttgaacggcacagttttggtggtcactgccaaatccaggcaaatgccatggcatttttaaattacaatttaattaatttctgtttaccaatttaattcaatttctcatttttcagttccctccgcggctccgccaattttttgatggcactgatttgtctttgtgaattggtccaccaaattgggcacactttttttctggttgttgtcatttcgggcacaaattttgtcagtttgctcactgctgacttaattatgacgttaaatttaattttaaatatttttttatttttaattaacgcccacaaaaccctaattaacaccaattaatcctttccatttaagcctaattaaaactttaattatttatttaatttgttttttagacactcctccattttcacccaatacaaaaaatgcgggaatgtatggcgcaattcaaaaataactaaatttaattaattaattattaaatttaaaatttatttaagtccaaccaccggtgttgtggccgaaactttgctgggccccgttggttataaattcttcgccggcacattcattatttcattgggtagcacctgttgttatgtgtccatttttatgttcatccgatgcaaaaatggcggtaagttttggcattcatttgtttggcattttattttgtgccaaaattaaatctaaatgtttttacagtaacccaacagacgaacacacgagttttacggtcattggttatcattttgtccattaacattggcggatatttgttcaattcggcgatgtatcaattgttatacgcatttg

SEQ ID NO: 41521 - DNA, 659 bp, Heterodera glycines
caatttttatcatgaaattgcaagaattaaatttggctttggaataaatgtgccaatttgtgtgcccacctgaacgccgcccggtacaacccttcgatggtcaaatcgtatggactctgttggctcaggtcgtacgccatttcttcctgaacgctcaaaacgtcccaggacttcagtgccggctgaacgaactcgccaagaacggagatcgcaacgggagacattgtacgaggcttaatttgaaaaatatacaaaattttcagggcgtaacagggggaaagtggcaaataaataatacacatcatgaaaccccaactttcttgaaaaaataaaacaaaatttggttcaaaaaccacaaaagtctattttggaccaaaaacagaaaagttgacacaatttggcgcaaagttgggaagcagtctgaaaaaatgaaatttgaaaaacaaatggaaaattgaacctaattttagcgggcttggtaataacggagtacaaaaaaagtattcataaaatccaattggaaaattggggtcacctttttcacatcgtccgcagtcactgtcttcagaagggcaatgaaatcgtcgggtgtcagtgcggtgccctggccaacaattgggacgcctgggattatgaaaaaaaatcaataaaaataatgg

SEQ ID NO: 41522 - DNA, 1180 bp, Heterodera glycines
  unsure (1)..(1180): unsure at all n locations
atttgataggcgtatcagggggttgttggcttgtcaccttttaagggattggacggagnataaaanngggagggaagccttactactaccaaaaacagtcctcaaaacgtaaaatttggtcttttttttgaaaaatctgttaaacaaaaggaattaaaatttttaaatttttcctccccccaaaaagtttttttttgaaaaagtgagccgcaaaaaagtgccgtgaaaaacaataaaaaatcttgccgtgttcgacatgattataacttctccaataatgttaaaattggtaatgagtgggctgaaaatataatatttggcacatttttgtttttaaataaattgtaaaataacccagttttacaaattgttaagatttttgactcaaaaaactgttatttgagccctaagttctaattttgtcgaattatttttcaatggcacgactttttcacagtttatgcaaaaaataaattaatttaaatcggctggaaaactattggttatagaaagtgatttcgatcacttaatactcaaattcatagccaaattttggtacattaaaataaaatatgttttttaaatcattaaaaaatgaatgagcgtcaagcatattgaccatatttatttataatttgggtaaacaaattgggcgaatgcgtttcgatcagttttttgttttttgttattcctatcatgatttgagttacacgaagcgtaatatttgattttttgattgaataaattgtaaaataacacagtttttgacccaaaaatctgattttttgatcccgaagttccgatttcgaacattgttcgtgacacctctgaattatgtcccatctttaagttaaataattaaaattattttattttatttcatatatttttcagtcttttggtgaaaaattttgattaataatttatatgaaaaaaaaaatttgttttttgacggaaaaaattaatcggcaaaatttatttttcgcacatattttggtgtttagttcatattttactcttttttatgcaaatattccaagccttacttactgaagccaacaaatttattcgtgcaagaaaattgcaattattcgcatgttagcaagaattttttgagttgacaatgagcggggcggcgggagggcgagggggagtttattaaattcaccanaaaattatg

SEQ ID NO: 41523 - DNA, 1642 bp, Heterodera glycines
tcactaaaaagttaagcctaaactttttcccaaagtttcatagcaattaaaattttattcacctccattattgatagaaaaagcatcagagtgcctaaactaacatgtaaataaaatttggtgcgtttcagaaccctttctgaaaaaatatttatgaattaattttgcaaataaataaaaacgaaagactcagattttcgaaaaatttttttgagccagctagctcggcgctcatttcagtgtaagttagtcctttaccggggagtatccctgcaaagtttggtacgcttctgctcaattagcaaaaaatatgagtgatcgaattttcactaaaaaagttaagcctacattttttggcatatttaaaaagcaattaaaaaattttaaaatttaataattttcctgcaccgaaggtactcactcggcctcttcgcggcctcgtggtgggccttcgccccccccccccccctcccacgcccttcagagcacgacaaatatttcaacaaaaattttgaaaaattgactagagcaatcgaacgctaacggacgacctaatggaaaaaaatccccgaaggagagaatttaattaaatccattccttcgggggaccgtgccgggtgccgcggggtaagcagtgctggttcgtttcatcacggcaccgaaccttttggctagtcagcaatcgttgcttaacttgccagatcggacgggtgcgcatgactttctgaaaaaaatatttatgaaataaaaaaatcgattttttcaagtgtacgtttaggggtactcaaacaattatggggagcaaaaatccaacgcagaattaaagtacagactatagggaagctattcccgaaggattcggtctccccataaatctgggcgcatcggttcggggggactgccccgaaaacaaaaaaatcgattttttcaagtgtccgtttggggtactcaaacaattatggggagcaaaaatccaacgcagaattaaagtacaggctatagggaagctattcccgaaggattcggtctccccataaatctgggcgcatcggttcggggggactgccccgaaaacaaaaataaatcgattttttcaagtgtccgtttggggtactcaaacaattatggggagcaaaaatccaacgcagaattaaagtacaggctatagggaagctattccggaaggattcggtctccccataaatctgggcgcatcggttcggggggactgccccgaaaacaaaaaaatcgattttttcaagtgtccgtttggggtactcaaacaattatggggagcaaaactccaacgcagaattaaagtacagactatagggaagctattcccgaaggattcggtctccccataaatctgggcgcatcggttcagggggactgccccgaaaacccaaaaaaaaattttttggataaaaattatttaaatgaactgactagataatatttaaaataggttatttctcttcctttcagtatccctgcaaagtttggtgcgcttctgataagtttctgaaaaaaaaagttaagcctaaactttttgggctgtttaaaaaggaattaaaaatttttaaaaattttattcatctccctttttgatagaaaaagcatcagagtgcctaaactaaca

SEQ ID NO: 41524 - DNA, 935 bp, Heterodera glycines
  unsure (1)..(935): unsure at all n locations
cccccccccccccncaganaatcaacgggggatgaagtgacaatctgagggtggacataaaactgacggactgaaattgtaaggaagcggccaatttaacagacgccactgaacaaacgatggctggggccacagaaacgaaaagtgcgctggacactctcagcagcgaattggactccgttttgaccacaacaaaggattttgagaaccaagttggcagaaaaaatagtcataaatacgagaagacaattaataattaggcaatttccgacgcggaacgttccaacgaagtcgcgaaaaaagcgactctctccgaagcgactgcaaattcactgcaggaaaagctgagtgactcggacacaaaacttacggaagcattggcccaactcagtcaattgatttgcgtttgttttgtcgaaattttatttttattttaggttccttagacaatgtggacgatgcgcaattggacaccgtggagaaactgctgaaagaagcggaaaatcgtttcgattcgagcggcaacgaagtgaaaatgcgagaacggatcatacaagcggagaccaaagcggtgaagcagaagaggtgatcggaaactaaattactattttaaaaggcttcgtgttttgtgcaatattttagaagaaaatcttattggctagctgaccgatttaattttctcatcttctacagggaaatcgatacattggcaaaagaattggagaatttgcgtcaaatcagaggttattttcgccctgtactctttaacagctgccattcttccacctttcagattcattgccgactcgctgctacaattatgtaaatttggaacaggagggacaacgatgaaaaggagcaattgggccagaagggacggttcatcacaagtggaataatcccggcttttttaacacattccccgtcagaagcaa

SEQ ID NO: 41525 - DNA, 971 bp, Heterodera glycines
  unsure (1)..(971): unsure at all n locations
cggcgcatatggcaaaaatggcagcagagccacacaatgaccagaaaatgattggttcagaacccgttcatctcctcagaaaacggcaaatcgaccactgtcccgactgtgatgcagcaattatagatctaccgcctttcacaatcatttgttttttgtttaatatatttcatattaaaatacataataaagaagtacataatttcctttggtcctccatggagagaattcattgatagaaaaagagagagataagggacattttgtaatttgttgctctttctacgcttcattttccctatttccgcaactatgtgatgccagcagaggaagcggattgtgggagaaagtgggataaagaaaaaagagaacctccaaaagaaatgcccgtcgtggatacgagtcacaccggtgaattttaccttttatgttaccgctacacggactcgatcagttgggtcccggcacgtttgggctccggactataacttttttctttctcaccaaatctaacattgttcgtataggcttacagtatggctgtgatcgcattgcttttttggaattggtattaaggaagttgtgtctctcaaaccctttttggactaagtctgaacaatttatgatcacacacagaatttttgagcaaatcttaatgtgaaatgagaccattaacaaatagccctttcaagattaatattaaatacattcattaagtttaaaagtatataaattcgaaaaacccgtatttcctaaatgtatgattggtcaaagcgaagtgaccattcttcacaaaaagttttacttggttgaacttctaactactgtaaaaaagcattatctagtcattttttcccaaaaagagtccattttcctttgatctctaaaaaaagaagaatggnattgaatggatgctacaaattcccgtaatttagctgatcatgcccactcacagggtcatttccatcatt

SEQ ID NO: 41526 - DNA, 270 bp, Heterodera glycines
cacacgacgcaaaaatgacgacgactcatcatcttcaatttcacggcggcgcctcagccaatcctcgcgagccctgtggagaaaatggaaacatttgaaatctatgtaaaacaattttttgtggaaaggtgaaaaatttttccaaaaattgaaaaaaagaaataaaattggggaaaattatgcaaattttctaggcggaatgtaattttagttcttaatttgagaaaaattattttgagagcaagttgcaccaaaatctaggcccattca

SEQ ID NO: 41527 - DNA, 1091 bp, Heterodera glycines
cgacattcgccttttccgaccggcggacattggcaccctttgggagggagagtacgcgcgggtgttggcggaaccaccgaaaatagggggacgaattgccaaaagtgacggaacatttggaaaaataatttgctctgccgccttaatttgcccattaattatttccttccttttttgtcgtacttttgccattaatttttctttttcaattcccttttaattggacccattttcccctaagaaaagaagaagaccttttgcatttcttaaacaaactttggcatatttaagctcattaattgcttttaatttgtctgattttgcgtttcgaattgtctccgtttgtttgcgacacataactcattattttgcgtcattcagtgcgtcacattgccacaaacttttcttttttgaacaacaatcttcacttttcgtgccatccgcttgccctcttttaagcccccccccccaaatgccgtgccatttgttttaccctcttttttttgccatttctcccccacttcgcgtcatcctcctccaatccgttattatttattcatttcccctcgggcatttcccccattaaatggccaaattaaacaaaagtccgtcaccgttttcttttgccatttttggtctgtccatcacttttcctccccttctctttttgcatgcgtttgatttgcttttgcattgccattaattacttttctttatttgctctcccaaatttgatcgataagagaaaagaaaagggaatgattttgattttgatggacgggcggcggtgttattattctccgactataaaaaaataatttaaaaaaataacaaaatgatttttcaaatttaaaaccgacaaaattcccaaatccctccgtccgttaggccaaagcctcgctctccgatggtgttgctgttgttgctgccattgtccgacctgctgttcctcaccagacactgctccctctgctccctttgttctccccatattgatcccccgaaatgaccgtccaattgtccgcccttttgctccctctcctcattatcactttgttatgcaattttgcgatgggcaatttgattttcca

SEQ ID NO: 41528 - DNA, 547 bp, Heterodera glycines
agcgtaattacgatttttacttacaccattttttgctaggtttagatcacatgcgattttcggcactctgataattttagcgctcataatgggatgtataaaggcgattgtagaaggaattggaagcgctaaaattgtttgaggagctttttgagcgtaattacgattttacttacaccatttttttctaggcttagatcacatgcgattttcggcactctgataattttagcgctcataatgggatgtataaaggcgattgtagaaggaattggaagcgctaaaattgtttgaggagctttttgagcgtaattacgatttaacttacaccattttttgctaggcttagatgacatgcgattttcggcactctgataattttagcgctcataatgggatgtataaaggcgattgtagaaggaattggaagcgctaaaatttttgaaaagctttttgagcgtaattacgattttacttacaccatttttttctaggcttagatcacatgcgattttcggcactctgataattttagcgctcataatgg

SEQ ID NO: 41529 - DNA, 747 bp, Heterodera glycines
  unsure (1)..(747): unsure at all n locations
ccccccccncccctcattgatatttcaatgcctttttttgagatgttccgcatttgtgactctcatgaccagctagaaatgttcacgaattctgagcgtttgcgcaaccattacgtcggtcagcagttgctgcgtctgtccttgcgtcggaagagtgaacggagcattaagcaggaactgatcgaacacacgggggacaaaaaagtgtacgagaagcttttgtcgacactaagtgtttggaacatccgagccacctactacgacttcaaactgaacattttggagcagagccccgaaaatcaaccggccaagacgagcaatgggaaccaacaattggccagttcttaccaaatggccatgtatcagcaggcgctgttcaacaacgtggccaatgcttgtcatttgctgttcaaagagcatttgctgagagacattcattgtgaagatttggttagaagccgttggatatatcatttatctcataacgaaatttgtctgacagaacactgtccagaattttcgtctttcggccgtgaattgccattggcctaattgctcctctgataaacgctttgccttcgccgtcgccaccgacgacgagcaatccccaaaatacgctttggtgtccatggaacagttcggccatgaaggcctatttcttgaaggttgttgcggacaatcttagcatcgcaaattcggacggtgccatccaatacgagcagcttcttaattaccaaccctttctga

SEQ ID NO: 41530 - DNA, 858 bp, Heterodera glycines
ggttggtctaaatctgtgcgaaaagctcatttattttcttccttttaactgccatttacccaaacactgatccttcgtagctattcgacgatttcttttgctggggacccactgcccggtcattatcgaaaaatcattgaccaaatggccatcattgctttcaataattctcgattagccaatctttacctcatgcatcgatggtttcgggggctgtggcgtattataaaaccttccaattgaaacaattatgcacggcaaatgaatgagaaggattaacggaatgggcggaccaaagtgccgaaagcattgccagcggagggtcgaggcgggttagcaattggttgggctgttgcagaaggtcgacttcaacgccttcagttcgaagaaaatgccgaaactgaaaaatccttctgatcgtaaacgattcgacagttcgacctgcccgtaattataattccaggaaagctaaacgaaagaaaagatgtcgtagattggcttatttggtggcgtttgcctggaggggtcctcgcccgaagtaacagccctcaaaggcactcgcattggcactctccgctctttctttgcaggggtaccttccgtttctgtgattggttcgcattctttgccattggcccaccaaaagtccaattccggcgatcttttgcagtaacgtcccgcctcaacacatcggtccccgtctttgaaagtttttccgtcgcttctgccggggaaaagcggtgagcgggggccgccctcaaagaaatggtaaaaggcgcctctgtaaaagcattcggaagccacgcgaggtgaaagtttcgaggaggaactgctgaggaatgaagaagcattgaaaga

SEQ ID NO: 41531 - DNA, 971 bp, Heterodera glycines
tttcacatacattttcagatgcctataaatgtgttccctcacttagtgaaaataagttttaaggggtattgggggtccctgatcacgaatacagcacccatttttgttaatttcgaacccctgatccgaactcgaacaaaaataaaattagaaaatttgtatggataatatcctcatgggcatcttgccaatgaggatattattggtacaggaagcctataaattctttgtccttgtacagctcatgtagtgaacggtagcgctgaactgagcacgtattcgtgatcagctaccctaaaaaccccttaaaacttattttcattgatttcaaaaacacatttataggcatttgaaaagtatgttaaaagtacgccctgaactagaaaagtactcttttcatatttattttaggtgcctattcaaatgtcttcttcaataaatgatctggcaaatgaaacaatggtgcgttttccagggatttcttggattggttcatctcacttatactcattcgtttttcaatttcagtctcttattttccaatatcttcctccaaatgaaagagttcgtattgaaagagtgtgccgccgttggtgttttgtgtcgcgagaactcagttggtacaaccaaaagacacttctgctggatggtcaggaactcgcacaaaattttgatctgacggttagaaaacttttcagtggtcataaattattagtttagcatgatatttggtagttatttgggattgtggttccgctgatcgtttgtcttacattcgttagaaaaaaagttgggctggtcacacgtattacaattagagatcggaattttgaaaaaagcctgtacctgtacctgtatttcccgattggcctgtacctgtatttcctgtagaaaagtacaggacaatacaggttttttcgtgtttagctgtacctgtacctgtactaaattctaaagatggctgtacctgt

SEQ ID NO: 41532 - DNA, 468 bp, Heterodera glycines
agaaaaacaaattggatatgctatttaatttaggcttaaagtaattgtaagtttacgcgaacataaaactcagaaagaggcagcctaaactgcagactaattgagaaagaagccttatttgttagatctatcgactgatgataaattagtgtatcgtatccccatcctttttcttcatacagtaaatcgcttcggcttggacacggtagtgatcgctctgctcgacctcttcgttctgttcatatgccttggctcgctgtttctgtgcgtgcgcgcgctggtcaaaggacacttgttgaaaaatgttttaaaatgaaaaagaaaattaatttgaaatttattttgttcaaaagaccacacatgaatacttcgaccgggcatttggcattcggttaagcattcaagacaagtgggagttcatcaacatgtggtacgccatgattgtcgtggtaaggcatgccgtaacaa

SEQ ID NO: 41533 - DNA, 918 bp, Heterodera glycines
ccagaaaaatggctatctcttttttgcgagaaatttcgtaccatacaaatgttcccagcatgggcagaggggcgcggagagcaatgtccattctattctacagggaatttttaaatttattctctatgccagaaaaatggctatctcttttttgcgagaaattttgtaccatacaaatgttcccagcatgggcagaggggcgcggagagcaatggccattctattctacagggaatttttaaatttattctctatgccagaaaaatggctatctcttttttacgagaaattttgtaccatacaaatgttcccagcatgggcagaggggcgcggagagcaatggccattctattctacagggaatttttaaatttattctctatgccagaaaaatggctatctcttttttgcgagaaattttctcccagcatgggcagaggggcgcggagagcaatggccattctattctacagggaatttttaaatttattctctatgccagaaaaatggctatctcttttttgcgagaaattttgtaccatacaaatgttcccagcatgggcagaggggcgcggagagcaatggccattctattctacagggaatttttaaatttattctctatgccagaaaaatggctatctcttttttgcgagaaattttgtaccatacaaatgttcccagcatgggcagaggggcgcggagagcaatggccattctattctacagggaatttttaaatttattctctatgccagaaaaatggctatctcttttttgcgagaaattttgtaccatacaaatgttcccagcatgggcagaggggcgcggagagcaatggccattctattctacagggaatttttaaatttattctctatgccagaaaaatggctatctcttttttacgagaaattt

SEQ ID NO: 41534 - DNA, 987 bp, Heterodera glycines
  unsure (1)..(987): unsure at all n locations
atccattgcctgccggttctcggcacagcaaagcactacttctaagtttgactcacttcaaaaaataattccatacacaaaagttttttacaacaatttattgccaatctaatttcttgcagattgaaagccatccattgcctgccgatactcggcacagcaaagcactaatagggtgtttgactcacttcaaaaaataattccttacccaaaagttttttacatcaatttattgccaatctaatttcttgcagattgaaagccatccattgcctgccggttctcggcacagcaaagcactaatagggtgtttgactcacttcaaaaaataattcaatacccaaaagttttttacaaccacttattgccaatctaatttcttgcagatttaaagccatccattgcctgccggttctcggcacagcaaagcactaatagggtgtttgactcacttcaaaaaataattccttacacaaaagttttttacaaccacttattgccaatctaatttcttgcagattgaaagccatccattgcctgccggttctcggcacagcaaagcactaatagggtgtttgactcacttcaaaaaataattccttacacaaaagttttttacaaccacttattcccaatctaatttcttgcagatttaaagccatccattgcctgccggttctcggcacagcaaagcactaacagggtgtttgactcacttcaaaaaataattcaatacccaaaagttttttacaaccacttattgtcaatctaatttcttgcagatttaaagctatccattgcctgccggttctcggcacagcaaagcactaataggggtgtttgactcacttcaaaaaataattccttacacaaaagttttttacaaccacttattgccaatctaatttcttgcagnnatgaaagcatccattgnncctgcggtctcggcacagcaagcactaatagggtgttngactcacttcaaaa

SEQ ID NO: 41535 - DNA, 1279 bp, Heterodera glycines
ttacaaagtttagggaaaacaacacaagaacggaccttactgaaccgattcaaaatacggccgagcggagtgatgtcgaaaaatgcaatcggactccgcaaaatactccgaagcattttttcatgcagcgaataactggcaaaaaccctaaaatttgtgaaatgccaaataaaagtgaggaatggaaaacagacatcccaagagacattacaacggagccaagcgccaaaaaacaggcttaaacggaattattaattggtaaaaaatggatggaatgaccttgacccattccaagccccgtgtaaatgccgagatgtgtgatggtcgccaaagaaatggtgtcattttcgttttgcaactgaaccgaagtgcaggttttgtcgtccgctgaaaagcccttttcttacctcttgggcatggtctgaccaattagcaagccaaaggagacacgagacgccgagaatactggaggagaagaagatgagaaggcatagaaaacaggtgcagaggccaatggcacgcaaataatccaaataaacgctgaatgagtgcctcagggcattggtttgccaacctccgcttctcccacctgtacttcaccttccccgtgaacaatgcctctttctcgatcagtcctttgccttttgtctccccattttgctgcttctcttccgcttctttttcgggttgtgttgttccctttgatttggcttctttcgtttctgagaaagacgaaagtgctgcgctttgttgtgacaattttcgctccaatccctcgcccttttccgactcttcgggtttcattgaggtcaaaaactcctgaacaacagcgtcgtcgttgcccatttctcggttggagggattgcgattggtgaggtaatctctgatcagatcggagaaatcaccagaaccagccaataagtcactgtaagtgccaatttgcgcgacagaaccatctgagaatgagtgcgttttttattgtgactagaagagtgctttcggtgacctttgatcacgacaatttgatcacaatgcttaaggacagagagggaatgagtgacgagcactcgcgtctttcctttcagaagtccgttatcggaaccttagaatcaaaaaagtgtagtagattaaaatagggagggggtcaaagtcaagattttacaaaaacagaaaacccctccccccttcctccaccggcagaggccaaatggtgctgatttaccacaaacccctattcaactactagtatttaacaccatactgataagtttgtcgaaaa

SEQ ID NO: 41536 - DNA, 996 bp, Heterodera glycines
cgtatccaactgagaatctgctgaatggggtttttggctttgctgaacccaaatttgatgccgccgttgtcatacgagcccaaataattttttaggaattttattgtacctgtttcgaggtaggctttaaaattaggcttttgccaaattagctctcgagactgtagccagacggaagcagggcccagccgttcgtccagttgactttttacagaagtttgcggtggtatttttaccaatcagttttttatactgttattgatcgtatccaactgagaatctgctgaatggggtttttggctgcgctgaacccgaatttgatcccgcgattgtcataggagcccaaataattttttagtttcgaggtaggctttaaaatgaggcttttgccaaattagctctcgagactgtagccagacggaagcagggcccagccgttcgtccagttgactttttacagaagtttggggtggtatttttaccaatcagttttttatcctgtttcgaggtaggctttagaatgaggcatgaggcttttgctaaattagctctcgagactgtagccagacggaagcagggcccagccgttcgtccagttgactttttacagaagtttgtggtggtatttttaccaataagttttttatactgttattgatcgtatccaactgagaatctgctgaatggggtttttggctgcgctgaacccgaatttgatgccgccgttgtcataggagcccaaataattttttaggaattttattgtacctgtttcgaggtaggctttaaaatgaggcttttgccaaattagctctcgagactgtagccagacggaagcagggcccagccgttcgtccagttgactttttacagaagtttgttgtggtatttttaccaatcagttttttatactgttattgatcgtatccaactgcgaatctgctgactgatgtttatgcctgcgctgaacacgaattagatgccgccgatgtcata

SEQ ID NO: 41537 - DNA, 1600 bp, Heterodera glycines
aactagagttgtacgggaccggaattggtactgaaaaaacgtacaactgagtacctaagtcccggttttgatcgtttttgaccgggaccgggactagtccatgttttttcccggttttcccagccaaaaagtcccggtttttcaacccgaaatgtcccggtcccggtttttctcaaaattcccgatccctacaactctattcaaaaccccttctggggtcaattcaaaaaatgtccaataaaaaaagatttctgggggaggggctgatttttttttatatgaaataaaagcaaaaatgaaatgcccgtaccattcatttcacattgtgccatcttttccacccccaccccaatcgacggtccatactctttttgtcaaataaaatacactaactttttttctcactttttaaaattcactaactttttttccaattccactctcgtctcaagaagcagttttccatggttcggctttattgagactgccaattctctgtttatttccagaagaatttcttcaaagtcccacaatttgcacaggtcagagtcggccaattccggcaattttcgctcaatttttttgcgcaattcgtcaaatttcgttcgcatgttaaccatttcaaattcatttttatgttttattgcgaaatttgtcattttttttgtgtgttcgtcggatgggcccaattctctgcaaaaagaaaaagcatagaaaaacgcaaaaattagcattggaaaataaatcaattccccagacaaaaatatatagctaattcataagcgcctgcttaataaataaacatcaattaaatggtgctaggtcgaacctaaaaaaagtatcaatgataataatatttaatttaattatttttttaaattttgtttgcagaataataaatcataacttagctcatacttagttaaattaataaaattggtattctgcgatagctctacgtgtcctcctctgtttatatatttttaaaaatctagcaaatttacaaaaaaaaaattgtaggacgggatcccgcgtgggtttttgcgggatccggtcccacattttttgggtattgcgagatttggcgggattaatcccgcatgatcctgtcccgcaagcttttgagtctcaaccccgcggctgaatccacaaatttgattttgtccgcggcattccgcgttacattttttgaaaattttaaatggcaaaatgtcatacattttctttaataaaattacaaaaattaaataaaagctaacgcttttttgcatcgcaaatttcatccaaaatttgtgaaaattttcccaatgtgtctatcggcccgccggaccggcccccaacttattacttcttcaaaaattaaagcgaccttttttccgggctctattcataatagtataaaaaaaacttcattctctgtccaattgtccgcttctgtccaatgtccggggtctccactcagaaacagcatttttacaacgaaataaatcggacttttaaacccaattttttaagtttagaaatagtgtgatttgaatatatttaagaagacagaattttagcatataattaatatgatttgcttggcctttccatgcct

SEQ ID NO: 41538 - DNA, 773 bp, Heterodera glycines
attattattaattaattttaagcaatttaatttttttataataataaattctcaaaacaaaaaaatcacttaaattgtgtttccatgatgtcagatacgcgattttgacatcacatcatgcaaattgaattgacacagaattacatcatattcacgatttttcgtcgtatttacgatttttctcccatcttataaaagatgatcctaaatacgatgagacgtcgtgaaatgatgggaattgaaacaaaattttacacgatatgacatcatatcggagatacgacgggaattgaaataggccccagcacgcgtctgttcactgtatgccctctcacccgccgctgcccgcatagacagacaatcagacagtgcactattttcccacctttccctcactatacttttttcaaattcatttttaacgcaaaaaataaacaaaacgctacacaaattcaaacactggacacacacatacagacactcaactttattatataagattactttgtcagttctctgccaatgttaggtcaccaatttgcctaaaattctttttcccattgatttgtgtgccatcaacggcagaaaatgatggtcattcattcattcactttcactttcatttacataaaaactatttgttataaatcggtcattaactcattaatagtgaaggaaatcatctgaagaataatatttttttatttttggaaaatttgtaaattttagcaaattaaaattttgagaattcgctgctgaacggaaaccaaaac

SEQ ID NO: 41539 - DNA, 991 bp, Heterodera glycines
  unsure (1)..(991): unsure at all n locations
tttttaaatttatctttatatcccaagaaaaatgactatctcnttatttgagaaaattntatacgttacanaagcgctcgagcgtgagagggagggcggtgcgcaatcgccatntaatttctcagagaatttttaaatttatcttatatccaagaaaaatgactatctcttattttgagaaattttatacgttacaaatgctctcgagcatgataggaagtgcggtgcgcaatcgccatttaatttcacagagaatttttaaatttatcttatatccaagaaaaatgactatctcttattttgagaaattttatacgttacaaatgctctcgagcatgataggaagtgcggtgcgcaatcgccatttaatttctcagagaatttttaaatttatcttatatccaagaaaaatgactatctcttattttgagaaattttatacgttacaaaagctctcgagcatgagaggaagggcggtgcgcaatcgccatttaatttctcagagaatttttaaatgtatcttatatccaagaaaaatgactatctcttattttgagaaattttatacgttacaaatgctctcgagcatgataggaagggcggtgcgcaatcgccatttaatttcacagagaatttttaaatttatcttatatccaagaaaaatgactatctcttattttgagaaattttatacgttacaaaagcgctcgagcatgagaggaagggcggtgcgcaatcgccatttaatttctcagagaatttttaaatttatcttatatccaagaaaaatgactatctcttattttgagaaattttatacgttacaaaagcgctcgagcgtgagagggagggcggtgcgcaatcgtcatttaatttctcagagaatttttaaatttatcttatatccaagaaaaatgactatctcttattttgagaaattttatacgttacaaatgctctcgagcatgataggaagtgcggtgcgcaatcg

SEQ ID NO: 41540 - DNA, 1139 bp, Heterodera glycines
ttaatattttagccacatttttaattttttggcaatactttaattatcccaaaaaaattccgttatttttttgaaactcgaaaggatgaatgccaaaaatgaaattaaatataaaatcgacaatcctgcccttcttttttaattcatccaataaaataatttaaaattatttgaaaatattttttcccaggatgttgatggcggtggcaaatttgtgccggttggccaagtcgggcctggcgaaacgtcgctgcagctcaaaggactgaaggacaagggcaactacaaattccgggtcaaagcgctgaacaaagagggcgaatcggagccattggccacggacaaacattaccaaatcaaaaacccgtgggatgagccgggcaaaccggtaattaattctaattaattggcctaatctccgaatggtcaattttgccactgttgcgctcattcaaattcctaaaataaaatataaatttaaaaatgtaattccctaaatatttcattaataattaaaaaaattcatcaaaattcacatatgaaaatttttcacttaaataagttttgtggcgctagtgtcaaagtgttaaaatttggaatttttttccaattttataatgtgtcaaattttgcttgtaaatccattgaaatatgtcttgaaatggatccctattaagaaattaaaatgtaattcaaatttataaaaaaaataataaatattaatgatatattataaaaaaaactggaaaaaatttcaaatatttatcattttaatactagcgccgattttgttcttcaatttttaaaattttattaaaaatatctttcctttttccccaagggacgcccccaaatcaccgacgttgacaaggactttgtttcgctccaatgggacccaccgatgaaagatggtggtgctccaatcgaaaaatacttggtggaaatgcgtgacccaaagagcaaggaatggaagcaggtcagttaacggagtggcaaattagttaaaaaatgaaaaatatttaaaaaagttttctaaattttgtcaggtggccacttccgaaaaacccgaagcaactgtcaaaggcctggaggagggcaaagaatacccatttccgggtgaaagcagtgaacaaagcggg

SEQ ID NO: 41541 - DNA, 976 bp, Heterodera glycines
taaacacaccgtttcaaaaaacgagagatgaaccaataaagagagagcgcagagaaaaaaacatctctctttttggcgtactatttctttgtctctattaatagagaaaaaccgaatttacatttctatgtttagtttttttgtcctatgttaaatgcgcttcaaattttgcataaagatagagaaaaaaattccgcatcggttaataggtcaagttaatattaaaataggtcgattcgagaacttattcaaaaaacaaaatttcgaacgctcatatcttttttctactcattcaaatcgcttagcatttgcttagaaaaagcttctccccatcaagggctttcgaatgataccaagatttaccaatttggttggcaaaaagcttcaaaaataattcccaaaattcgtcattttttaatattttggacaaaaataaataaaaatattcatgttgcacaacggactcgaaccaccaccctttgtccctttactatcttacaaaaaccactgcgccacacatgcaaatctttttggaactgagaggccaaaattgaaacggtgtgtatatgaaaaaaatgaaaatgtgtacgaaaaaattgcaaaattttgaatttttgggggcattaataaaaatttccttaaaaatcatcaaaaattgcaaaatgtgtaaaatatgtatttacataaaattagtagccctatatattatataaataaatattttgttaatattaaaattataattattcgtcctattcaaaaacgataccatcaacactcgccattgttaattgcatgatattatatattttatatatttttttgaatgaagctttggttaaaaaaaacatattcttagtaataaatgaaacaaagattcccaataaaaactaaattataaaagagaatagtgaaggaagtgatgagcggggaaatatggaaaagatgaataacatcgattggccaaaaagggaaa

SEQ ID NO: 41542 - DNA, 566 bp, Heterodera glycines
tataattcagttagttttcttaaaaatttgaccctaaactttctagattcccactgtggggtcctaattttcgtttatctagatttgtctttctcaaatttaaattccttttccagcaaccggcgcatttgcttccatccactgtcgccagcagttcaaatcaacccatccgtcggacttttgccgatgttgtcgccgcaattcctccgacaattggcgacacacatatatatgtagctaaagctcattttattttattttgttatttttgtcaattagtatcggcctgaaacattgacttgtcactcaatcgagttgtattgggctccgctaaaatgtgacactgaccattacgtcgtcgaagtaaaaaacaaaaagaaggaatgggaagcgacgaagcataaggtgaggtgtttcaactatatttgtgtataaaaattacacaaaagacctaattttgtccaaatggagaaatttaaaaaaaggtttggtcaaattcgttaagtaaatttggaaataacaaacttctgaaagaaaaaattttcattttttttgggggggggggg

SEQ ID NO: 41543 - DNA, 916 bp, Heterodera glycines
  unsure (1)..(916): unsure at all n locations
aaaaattgtttttttttcaaaaaaataaaatttttttaaatcgctgaaattttttcaggngggaagagctgctcncaatttgtatgccatgctttaaattcttacctttctcggtaatcaacaaaaacaaattttattcaaaaaattgaagaagccgtcaaaacggattatctaagccagtattttttatattcaccgttataatgttgatttatcaaaaagcgtgatgaaacaccaaaaatgaaacaataaaaaaagaaaaaaatcggccaactgattttgaacaaaggttaactgatcatttgattaaaaaatgggaattcctcatttaatttttttagtgtaaaaagtgttaattgtctgtgtctgactgatgattagaatctttcatgacggttgtaattagatgaaaaagcgaatcgtttaaattacaagcaaaaaattttgaaaaaaataataattacagtaacccaaaattaaaaaaaaatatatatatatggtaaatggtataaattcaaatttatgtgtcttaaaatgataatttgagagagcgaaaaaaatccatagaaatattcgccaacaattcacagaatagacaaaacagaagaaagctcaatatggaggagtggaggagagaattgtgtgtaaatgatctttcataacaaaagaaatgagtacagtatacgtgtacaagacaggaaaacagttacagtaacaggtttgccaaaaaaataaaagcaggaatttgcagctaatttatgacattttggggacaaattttcaaaatatggtcaatgtgggtgttctggcaatgccttatttttcaaaaaaaaatttgccattttttggaaattttttaatttttcattcaccgggagggaggggggggagaaattccaccccctggctcaagagt

SEQ ID NO: 41544 - DNA, 1060 bp, Heterodera glycines
cccgaccacaaattatttttttaaagacaatggtgccaattccctttttttaatttttctcagtcagtgacgaaatgatctgttattgttggaactaacctataatggactgcagttaatcactatttagcattttgatttttgagaaactcattaacaatcataaacaagcacattatgtattaacagttttattcttacctcgcaaaaaaaaaacaattaattaattatatattataagtgcgataaggtcggcatataaaagaggacacaatgaatcagtgaattcagtgttgggcatgaaacaacacccgaaaattaatacaaaatcataaaaaggtctgacaaaaaataattaaataaaacagcaaaaaggaaaatttaaaaatatacaataataaggaagttcagttgctgaacaaagtaaaaagagagagactcacaaaaagcataagataaaaaatacccgaaaatgaaaaccaaaagaaaagaaaggaataagaaatggagtgccaataagaaaagaatgagcattggacttagccttcggcttcaagtactaagcctagcttcgcccaccccttgtcagaatgattaacaaagtgggaaattgcggccagcagactcgtaaccagagaaaaaaaggaactagggcagagtatgcgaagatttatctgcttttgtcaaaaataaaaataaattttcatgtgtcgttttgaaaattaggcggttaggtgccaaagaagaaaaagtaacattttgtgtttgtagagagatggggaaatttctaaaaaaaataaataaagtgcattttcacccgagggcattccccccccccccccgctttatcccctttggttacggtttgaggtaaacaatcaattcgataatcaaagctcgttgtctttagtgctcatcggtggaaatttgacaaaaggtctccgtgcaaaagtttttgcctttaaaatgctttgagccaccgcttttttggcgcgtaacgaagccatctcatgtgccatgtaagtgagcacaatttcatcggccaattcagtgaaaaaat

SEQ ID NO: 41545 - DNA, 862 bp, Heterodera glycines
aaaagaaaaaagggcttggggattgcaaatgggagaacgctttttgtgtgccaggcgcagtcagaccgttggaagaccctccgaaaaataatggaaagaaaaagcaacgcaaaaatggaaagggaaagaaaaagaatggtggtaaaaaatggttccactttttctgaaaacaaagttttggcaatgacaagtttgtttatcatttgatcagacaaattgtcattaccccacttaccgtatccaccattgacagtagtcagatttagccctgatcccccgacattgacttagcaaattttccgtagattacactcaagagggcttcaagtgtatggtgtaaaatgaattcccatgagtttctataaattctaaggcatatcttttttttcaaactttccaccattccccgatttattcggatatgctggtgcttgatcccagacttttcagtccccgagttcaggactaaatctgatttatccgtccatcagtctgtccaatgtttcttcttctgtcattcttaaaattctgtccttttgtagtatattttgatcatttcatggctttccttttccatttctgtcgtatgtattatttattctatccatttgtttgtttgtcattgatcagacaaattgtcattcccccacttaccgtatccgttgaccgtagtcgtcggatttagccccgatccccctacattggttttgcaaaatgtgtatggcattttatgaattccttatgaattttagagtatttaaaaattatctgaatttttctttatattgtatccctgatatattatttttaatccgccagccatccctgacatgggttttgccaatttgctttttatttcaac

SEQ ID NO: 41546 - DNA, 677 bp, Heterodera glycines
tttgggcatcaattatttgcaaattgattgattatttttccaaaaatgggcatgttttgttcattttgatcacagatgcgtccaatcagccgagcacctcttccaatcagccaatttgggcacacaccgcggggtcagatgacgggagcagcagcaagcggaggaggggcaggacgagtcgggtgggtacacaaaaagtgatcggaagggggggggcaaggctgaagcagcataactctgaccagtgatctgtcgtcggctgcaattgacaaaaaatgatcaaattgacgaacgcggatcattttgatcaatgtttgactaggaaataaaatggtcaaatggagaagaaagcatttatatccctgatcaccgatcaattatcatatttggaatttgatcacaaatgttcaattgattgtgaatcatgtgttttgtgcgctgatcactggttaaaattaaaaatatgatcgatcgaaccaagcaaaaaatatttgaataaaatacctgagttctaatcattaatcatttattttggaaattgaccgaaaaaagattaagtgaattatctcatttataatcccaaaaaattaatcctcataattacgatgtcctgatcattgatcagaagcagagtttttttaaatacctaattagcattttcctttttaattggtcaa

SEQ ID NO: 41547 - DNA, 538 bp, Heterodera glycines
tggacatggacaatgtcaagttcgccccgttcagcgacctacacagaaagcgcgaaacaattaaacaaatcacatacataactttaaaaagtcattttaagttatcacttagttttattcatatccagcagattatatcaaaaatagaggctgacgggattggaatcgcgtccaaattttctagtggtccacatcccgaccttttgaaaaatggcaggatcactatccggcaaaagcgggatttgaatccatcagttgacgcgattaagatcccgataaaaccgggatttgaattccgttaatattatccggcctaattcccaatgatctagacttgttcaaaagattaaactctttaaagataccaatatttaaaaatataagtctacaaatacataatatatacataatataattagaaaatgttaggcgacttctctttgttgaactacgcaattgaaattgctgatgagaattatgcgctgggtcaaatgatgttggcctacaaaaaggtgcagcactctttttaccgtacttt

SEQ ID NO: 41548 - DNA, 991 bp, Heterodera glycines
  unsure (1)..(991): unsure at all n locations
agaaataaaaattaccagctatttgaaatgcagtggggcctacctagcgagtcgcttaaatgcacaccctttgacacgtaaaatattccaaaaaaagagatagtgattttttctggattaggccggagaaataaaaattaccagctatttgaaatgcagtgggcaagcacagcgagtcgcttaaatgcacaccctttgacacgtaaaatattccaaaaaaaaagagatagtgattttttctggattaggccggagaaataaaaattaccagctatttgaaatgcagtgggcaagcacagcgagtcgcttaaatgcacacccttagacacgtaaaatattccaaaaaaagagatagtgattttttctggattaggccggagaaataaaaattaccagctatttgaaatgcagtgggcaagcacagcgagtcgcttaaatgcacaccctttgacacgtaaaatattccaaaaaaagagatagtgattttttctggattaggccggagaaataaaaattaccagctatttgaaatgcagtgggcaagcacagcgagtcgcttaaatgcacaccctttgacacgtaaaatattccaaaaaaagagatagtgattttttctggattaggccggagaaataaaaattaccagctatttgaaatgcagtgggcaagcacagcgagtcgcttaaatgcacaccctttgagacgtaaaatattccaaaaaaaaagagatagtgattttttctggattaggccggagatataaaaattaccagctatttgaaatgcagtgcgcaagcacagcgagtcgcttaaatgcacaccctttgacacgtaatatattccaaaaaaagagatagtgattttttctggattangccggacaaataaaaataccagctatttgaatgcagtgggcagcacagcgagtcgcttaatgcacaccctttgacacgtaaatatccaaaaaaagagatagtgattttttctggat

SEQ ID NO: 41549 - DNA, 1386 bp, Heterodera glycines
  unsure (1)..(1386): unsure at all n locations
tttatttaataggtaattttaattattttaccgagatctaaaaaactttanngaagaatgcgtatntaagcatcaatntaataaaagttaaacatatttttaatntaaaaaattgataaaaaaaatcatcaatttacagctgctggcatataatttaattgtcgctgctcaaatttgatttgtaatttcttttcgcatgccaataattttgtgttaattattcatttaatttttatcataaaattaattgaaaagtgttgtaaaatttagaaattgaattatgaacgcaatatccattaaaaatgaaactcttatcctcttatgcattagattgttccattttgctcatcacaaattctaaacaaatttgcccaacgtttggcacataaaaaaggaatcgaacatataaaagttaattattttttggtcctaataccatttctacgaatttatattaaacatgatttgtcttcgtccagattagagtagagcgggaccgggaccaaaacacggacaactgagtacagaaatcccggttttgaccgggaccagtcccggtttttccaggttttcccagccaaaaattcccggttttttaacccgaaaaggtcccggtccaggttttgccaaaattcccggtcccgctctacntctagtcagatcctcaactcaggcctaggcatttttggttttttgcaaccttggactttgctgagaatggcttttccccgggaatgtgcctatcggcgccttccagcgccccctcttttaaagatttttttggaaaaagctcgccgcaagagaaaccttaatattttttaatttcaaaaacaatgaattttttaaaagattcttaaaaatgcttaaaaaataaaaacttcaaaacgaaaaaaataatttttaaaattttgtaaaattcagtttttaaaaaattaaataatttactttaaagttgcctttgtagtggaatttcgtattttcattcaaaaaattaacttatagcaatacgaaacgccaaaataatggcgatattattccaattgcgaaaataaaaaattgtgaatccgtgcactttcaaacaaaactcagttattattttatcagctgtctggcggttgcctcactgggggttttgttgaacttggctttgtcatggattcggaaaagacttggattaaccgacctgactggttccaaccttgaaaaatgttccaacgaacaacaaaaagcatcacagaaattaaaaacaaccgaacactggcggaagaaatataaattttctggctaagtcgggttttcaattccatttggaattttctctgtttttctcttcaattgggctgactaacgggggacctggtcttgtcattttcaacgaaacttgta

SEQ ID NO: 41550 - DNA, 945 bp, Heterodera glycines
tttgagaattttatacctcacaaaagcgcttgcgtatgagacggagggctgtgcacaatcgccattttatttcacagaggatttttatattagagggttatcccagaaaaatggctatctctttttttgataaattttatacacatacaaatgctctcgagcatgatagggagggcggtgcgcaatagaccttttatttttgagggaatttttaaatttatactctatcccagaaaaatggctatctctttttttgagaaattttatacctcacaaaagcgcttgcgtatgagacggagggctgtgcacaatcgccattttatttcacagaggatttttatatttagaggttatcccagaaaaatggctatctctttttttgataaattttatacacatacaaatgctctcgagcatgatagggagggcggtgcgcaatagaccttttatttttgagggaatttttaaatttatactctatcccagaaaaatggctatctctttttttgagaaattttatacctcacaaaagcgcttgcgtatgagacggagggctgtgcacaatcgccattttatttcacagaggatttttatatttagaggttatcccagaaaaatggctatctctttttttgataaattttatacacatacaaatgctctcgagcatgatagggagggcggtgcgcaatagaccttttatttttgagggaatttttaaatttatactctatcccagaaaaatggctatctctttttttgagaaattttatacctcacaaaagcgcttgcgtatgagacggagggctgtgcacaatcgccattttatttcacagaggatttttatatttagaggttatcccagaaaaatggctatctctttttttgataaattttatacacatacaaatactatcgagcatgatagggagggcggtgcgcaat

SEQ ID NO: 41551 - DNA, 1365 bp, Heterodera glycines
aggtcagaggcacaaatgaatttttattcgaagcactcttacagagagtctttaaaaacccgaaaatgtaaaacaaaaatcttaaagttaatcataattattgcttaaaaattcggtaagttaattttaaatgaatgtaaataatataaaaataaaaaaggttaaaaataaaatattacttcataaatgctaataacaagttaattgaaaaagtattcataaacttacataagtaatggcaaatatgtgaaatttagttacatgaaaaatttacttaataggaatatatgcaaaaattaataacatgctcttttataaaaccgaaaataaacaaataaataaaatatcaatctaaatatttgctttctataacaacactgaaaatttattacagcttaaagcagtataaattaaatcattattcataatattactaaagaatttactacaaatgcctgctgagtatagaatttggcaagatgagaaaaggtaataaatttaaaactatttttaaatatatgaaatcgaataaaattcaaataaatgcttaataaaaaatcaatttagtttaacattttaatcatatattataatgaataaaataaactttattctaatttatattttaaattaacatggaaatattagaagataccgctcattgtgtcaactgctcaatgattttactacaagagctgcttttgaaagtaactcagacctaaaattcaaatgggcatgcttttcattattaaaataagaacgtttcaaaattaaaaaagaaattaaaaacttaataaactcgaattctattaaaatagtttttaaaaatcaaaaattaaggtaatttaaaataataacattttcaattaattgatcattgtataattaggaacattcgaaaaattataataatatttaatgatgtgatgtttgaattgaatggaaattaaaaattaacgagaaatccaacaaaaatattgattaaacttttgtcataaatttaaaatacaaaggaaatctaaaaatgcgatagtttaattataaaaaagaattacaattattagattaaatttttaatccttaaaatgataatttaaaaaattgattaaaatatttcaaaataatttaatcattaatatagcaaaagagtgaaactgaattaataaattattttagcaaagattaaataaaaattataatcattttcgatatcgattaaatttataaatcagctaaattctttaccttatatgagtggattcaaaggttattataaaaatataaattcagtgaaaaaatttatttcatgaagtgattgagaccgagcgggaaagaatcacgaatgaaggagctaaatgcataagg

SEQ ID NO: 41552 - DNA, 1384 bp, Heterodera glycines
  unsure (1)..(1384): unsure at all n locations
cgctttctgtgaaatcctttgacgtaatttctatatttctgttnnggtcattttgtcttnacgcacttttaaacgtaatatttgcttcgctatatatatatatatatatatttttgttctcaaatcaatttatctgcatttctgataggttttagaatttccaatgacttccgccgatggttccaatatgagcgagggttcgttagtcgtttcgtaaattttaattgtttttactttcagcgattatgcaaatggtccgtcccgccgttgaacgcatggacgaacaggtgaagaacaccaggaagagtcagctgttcttggccaatcacatcgaccaaacatcagaaagtgggtgagcaattaaccatatcaagtcaaaagagagtcgtgtaaatgaacatttttaaaacgttatggtgtaattgttgaagcaaaaaatgctgaacatatttagagttaaagaatttggtggatgaacagcttttgccctatgatttggacgcgtacgtgcgaaaattggatgagagtcgaaagcgaatcaacggaatcggccaaaaacttcaggtagaattctaattctctaattgaggcgatatttatgtcccatttagatactccaaaatcgaatgggccaattacagcggggaattgcccgagagacattcagacagaaacaataattagcttttatgaataaaagactaaaagcatgtgttattcctgccagtttcgtttaccgttttcacagtctcgcatctttattttctttttccctattttatttgttttttatttaattaaaaatttttgcacattaagaaatgcacagaacttcaatttatgcgaaactgcaggtgaagtatagtcgtcgtgccaagtttaccccgagggttgctcgcccgtggcgtcagcgggtcatcgcctgggccggccccgacgccttctcacgcgaccggtcagtccaacgcctatctttggtgtttcttcgatttggcaatctgtttacagcttttatgaactagactcgtggtacaaagcacggattcagagacccgaactgctgcccaagttgcatatcattgacccggatttaatcgtggacaattacgaaagcaaaattcaacgtaagacgaggggacgagagggttacattcatttgtattttgaaggacgcaaggaacggacccttgacattgggtttagaaagaatgaggcggcgcctgccaaagtgacggaggaagcgatgcaaaagttggaagagttgtccgcaatgaaccaatgtgagtgcgtgaattgagcttgtccgctttgcattcattgttcggctgtgtctgttcagtggtcatcgatttggactccgtcgactcgtccgaccaactgagtc

SEQ ID NO: 41553 - DNA, 153 bp, Heterodera glycines
ccagataggcggccttgctgcgctggctccactgcccggcctggctggccgagaagcccggtgcgccgttggaattggcttccaggcccgcggctgcgcccggacccaccgcatacgaggcggggtcaccggcgcgcacctggtaggtctcct

SEQ ID NO: 41554 - DNA, 1526 bp, Heterodera glycines
  unsure (1)..(1526): unsure at all n locations
ttgccaagtacgaattgggagacttagggaaattggaaaatntaaaattaaaattaatttaaaataccccaaaattgaaccaaatgcatacagcaactgatatatggccaaattggtcagatatccgccaatattaatagacaaaatgatgaccaatgaccgtaaaactcgtgtgttcgtctgttgggttactgtaaaaaatatttcggtttattttttttggcaaaatgcctaagaatttaccgccttttttgcatcggattatcacaaaaattgccacataacagtaggtgctacaaaatgaaataattaatgtgccggcgaagaatttatgcccaacggggcccagaaaagtttcggccacaacaccggtggttggactgaaaaaataatattaattaattttaatttttgatttaattgcgccatactttcccgcattttcgaatgcaaatgcgagcacataattcagtgtaaatgcaccgtaaattacacaaattaacagatgactaagcaaatacggtaatttgtatttagtgaaaattgaggaatgtctaaaaaaggaaaaattacaataaataatctatcaaagaattaattagggttaattagtgtttgttgaattaatttcatacttaaatggcgacacaacagcaaaaagtcggtcaaaagcagcacaaaacattgccattaagccacaattcaaagcaaaaatcattggctaaaaattgaaaaataaatcaaaataaaaataattgaaattcagaatttaccgtcataattaagtcagcagtgagcaaactgacaaaatttgtgcccaaaatgacaacaaccagaaaaaaagtatgcccaatttggtggaccaattcacaaagacaaatcaaagccatcagaaaattggcggagccacggagggaactgaaaaatgggaattgaattaaaaattggtaaacagaaattaattaaattgtaatttaaaaatgccatggcatttgcctggatttgacagtgaccaccaaaactgtgccgttcaacacaatgccaaccaaaacaaccaaatacagcgcaacggccggcacaatcaaatcggcggacggaccggcgaaacggtaggccaaataaagctagaaataaatgaaaacatttttatttatttaaataaatcttggtttaatttttccaaaaataacttaaaatagttaaatcctttgtttttaccgggtcatttgagctggtattaattgatgccattattgatgtaaaaataagttttatgaaaatttgtctgcttaaaatatttatatttatttgaaaattttggttgagtaattcagttattttacaacattttatattattcataaaaaaatttcttctttatttcattaattaattttaatcatttaaaaaatttaagattttgtaattcagagaaaaaaattatcgcaattaatttctttaataaaagattttcttacttaacggaagtgggaaaanaagtgaaaacctgaaaattatattgtgtg

SEQ ID NO: 41555 - DNA, 1080 bp, Heterodera glycines
tgcatataattctactccctacctatcatatatttttttataaaatactcaataattaaattccattttcttcattctcgacccactttatcgatgccttacgtgaacgaaagtaagacgaattcaattgtatagggctctccatcttataaaaaatttaattctggcggcccttaaaaaattatcactttttcagggggtgagatgcaggacggcgccagcttttcaatcgtccggtcattttggagcctcgtctacttcttagcattcttgtaatcattcgcagcccattttaacgccattaaactcaatcattttactggtttaagttattttcggcaaaaagtttattaatgagcaaattttttttgcaaaaaatggaaaatttagaacctagcgtttttcaaaaatttcgatttaaaaattgtatcattggcacctcaaaaaacgatcattttgtttgcaacttttttgtcataataaattatatttgcggggattttctggatcgctgagtcacgaatcagacttctattcaaaccaatccaaattcgaaaccataatttactaattagaataaaaaaaaatttttattcgcgttcgggtttgagattgatgtcaaaaaatggtgttagattcgtggccagcaaacccccgaaaaacactaggaattaattcacccgatttatttttcccggaattaaacccctaattttccgtcggacattttctgacatttctcaaaaaaaaaatcagggccccggaaattttgagtgaatctgggccttgtccgggctttacaaaaaatagcatttatcagacccaatttttgcatttttgtcagcttccgttccgttggtcggtccgctcattgacagtgcgccgcgctatgacccggacagcgactcgcggcatcggtcgctgcgcggcaacggcgggggcggcggttggggtgggggcggaggaagggggaaggaagaaaggccgcgcttggaaaacccggttacaattcgggaacattttggggcccgttcaaattgtattgaaactcccaaattttttgaaaaaatcccaaagggg

SEQ ID NO: 41556 - DNA, 728 bp, Heterodera glycines
atgtgttcaggtgggaaaatgtgcccaggagtgtaatactttaaaccaaaaaaatatgacagcgaaattcgggattggtcataattagagctcgacctggacctggatacaggcctgaatttttcctgggtccaggtccaggacatttttcggcaacctgggtttttcatggacctggatttttgtccagaaaatccaggtccaggtctaatgtgaaaaaaaaatccaggtccaggcaaaacacgaaaaaacctggatttcctggacaaaattttagaatttattatttcaaatgattgatgtttttttcaagttttcaaaaaatgattaaatagatttaaaaacagattattattgtaaattacctatatatttttaaatgttcccatttgtttgcttttaaaacaaatttcaaaaaatccatggccaggtttggatccatatgcctagaagagccttgactctcttgcactttctctctcttctcactctctctctcccccctctgtatctttccctctatatttctcctttttctttcacactctccctttctcttttttctctcacactctctcttcccctctatcaccacccttctctttctctctatatctatcctttttctccacacactctccctttctgattctctctctgctccattctcactctacctctcccctctctttctttctctctccctctcgtccggtctctgttttccc

SEQ ID NO: 41557 - DNA, 360 bp, Heterodera glycines
agttaagagcagggtagccagatctgaggctttagcctcattttgtggtttttttataggtcaatgaggctaaattttcaaaatgaggctttgaggctttttgtggttttttgagaaaaaccgcaaaataaagaatttcttaatgaaaatatgctaaaaattcttaatttttcccccggcggcgcctatcggcaccgccggaccgtaaaaacccttaatttacaagcaaaaatttgctcaaaatcgcaaaatttggtcatttttcggacaaaatctgtcaacaaatcgcattgaaaatttcagaatcccaaaaaatgcttatttctaacaaaaaaatgctcaaattgatcatggacaatc

SEQ ID NO: 41558 - DNA, 1042 bp, Heterodera glycines
attttattatcaaaatatttgaaatccttttaagctccttccagcccatcaactcattttgaggaacgcttctgatgtatttgcagcaatgtttcgttttgactcacaaaattcaaatgctgaaagtggtaattgaataaataataactaaagattaatcactagttaattatcttaattaaattttcaatatcctttactatttacaaaataataataattaatctttaattagcattctctgctaattgccctgtggtggtggtgcccgacgttgaagcagcagttaactaaatttttaattagccaaaaagtaaaacatccctggcttggttgatccatgtttggatattcccatcaccgaatttcaaaatgttttcttggcttattcactgactcgccttttcgacttggaggtgagaaagtcgattttataattttgaaattaatcgaattttattttgaaacttaacgaaataaagttttgatttttttattaaagattttttgttttgtttaggactttgtccatcgttgtctggttacattgataaaaacgcggacactttgctcaaatcggatgaatttttgcaaattgttatgctaaagtttggaacgtgacgaattgcaaatccatgaagaactttcaatttgggaagcagtaaattaacaaatttaattaaattatttataaatatttttaattgaattttaattgttttccggcactccgttgggctgacacgaaatgccgccaaaatggcattgaatgctccgcagagaaacgccgtcaaatgcttggcccggcactgttcaaaattcgtttcccactcatcccaaaagaaaaatttacgaagaaaattggtaaaaaaaaaagactttaaagttaaaatttaaattctatctgctgaatttttaaatttttttaaaatagtttaaaaatttttgttttttttaattctgtttttttacagttccatcggatgtgttatcaaaggatgaagtgatcgccgtttatcagttccatgcccttccaaattgt

SEQ ID NO: 41559 - DNA, 556 bp, Heterodera glycines
  unsure (1)..(556): unsure at all n locations
ataaaataattttcattaattntttttacaaaattcattcttcttttccactttttttaatatttttagaaaattcataaattaattttcttttcttttttttaatttacctcgattccttgaccagttttgcatcaacacatgacagccaatctttgacataagcactgaatttgtcgaagcaaggctttgtcttggttggatccacaagcttaaaaaaataattattaattttattttaaacttttttaaattaattttacaaattctctcccaaaagaaaaaaaaagttttttttttctaagtttttcattaataaattttgttaaattataatgagcaatttgagagtttttgtggtcaacatttaagcccatttttcatgaatttttcttttttttttgtttctttaaatggagttgtagaaagtagagaccggacaactgtggtcggagggatcccgatgaaatcccgatcaatcccaatgaatttanaaaatcgctcgggacggatcccgaggtcgggatcccgatttaatcccgcaggatcccgatcc

SEQ ID NO: 41560 - DNA, 1092 bp, Heterodera glycines
tacaagccatttgaataaatattaaccattttgcattgcatataataaaaattttaaatgtccttgaatttcatgaattttccccactatgtccttgcaaatcagcatacccgtccttggaaaccgacttcggacgataccatccctgtcttaattcataattagattcaaaaaatttatgatgaatcgtttttaaatgatcattttattcatgatcataaataaatttttataatgagaaatgttttcaaaaactagtaacaactatacaacctattttcgaaaaatttttaacattgcacaaaaaaatctatttgatgaattgtctactgacggattgtcccttaattatggattgtctgtccttcactgacggattatccgttgacggattgtccaccgacggattgtccctcaatgatggcttttccttcactgacggattatctgttgacggattgtccagtgagggattgtcccttaatgacggattatccgttgacggattgtcccttaatgatggattgtccttcactgacggattatccgttaacggattgtccactgacggattgcccggatcccataaaaatgaagacgccaaaattaagttgacttaaaatacagctggaattttgaatttaaaaaacccggcttaggatcaggattttctagatggaccaggatttgaacaggtctcccgccggtccttttcatttttacaaaatattcatgaccagacccgaagaaatcttatacatactcctgtccgggctctctattaaaaactgctggtagtaagacttagataaaaacttaatcaatttaaaaaaaaaattatgaatttactttagatattttttttcatattttagaattttcccatttcgaattattcaaattgaggcaaatggccaacatttgtgggcccaatttttaagtccagctgctcaaaattggaaagaattcaattcggagcaactgcaatatattggtcgggtaaagccaaatattttcgtatttcttaaacaatatttaaaatttcggaattttttcagaaaattttaaatttatttgtcaactctctgaatt

SEQ ID NO: 41561 - DNA, 591 bp, Heterodera glycines
cgggcggcttcgcgaccgtttttaaatattagtgggcttgggcgggcgcttcgcgaccgttttttaaatttagttaggcccagtcgagcgcttcacgcccgtttttcaaattttgttgggcttgggcgggcgcttcgcgaccgttttttaaatttgtttgggccagacgggcgcttcgcgcccgttttttaaatttagttaggtctagacgggcgcttcgcgcccgttttttaaatttagttggggccagacgggcgcttcacgcccgtttttcaatttagttggggccagacgggcgcttcgcgcccgtttgatcgttttttaaatttgtttgggccagacgggcgcttcgcgcccgttttttaggggtacaacagtgattcattaaattaaaatgaaaatattttttaacaaatttaattaaaaaaatacatgaaattctatcaattaaaaaaataattaatttaaacttataaaatttatttatcaaaaaaaattaaatataattttttatttattaactcaacaaaatattttaaattaattaaaatcattgaaaataacgtaaaaatgcacagaaaaataatgtta

SEQ ID NO: 41562 - DNA, 1032 bp, Heterodera glycines
attagcatcggggttacgagatagaatattgtcctaaaaagagatagccatttttctgagaattaattcacaatttccgcagctcttgcggtaatggaaaaaattttgaagaggctctgcggaacggattagcatcggggttacgagatataaaattgtcctaaaaagagatagccatttttctgagaattaattcacaatttccgcaactcttgcggtaatggaaaaaattttgaagaggctctgcggaacggattagcatcggggttacgagatagaaaattgtcctaaaaagagatagccatttttctgagaattaattcacaatttccgcaactcttgcggtaatggaaaaaattttgaagaggctctgcggaacggattagcatcggggttacgagatagaaaattgtcctaaaaagagatagccatttttctgagaattaattcacaatttccgcaactcttgcggtaatggaaaaaattttgaagaggctctgcggaacggattagcatcggggttacgagatagaaaattgtcctaaaaagagatagccatttttctgagaattaattcacaatttccgcaactcttgcggtaatggaaaaaattttgaagaggctctgcggaacggattagcatcggggttacgagatagaatattgtcctaaaaagagatagccatttttctgagaattaattcacaatttccgcaactcttgcggtaatggaaaaaattttgaagaggctctgcggaacggattagcatcggggttacgagatagaaaattgtcctaaaaagagatagccatttttctgagaattaattcacaatttccgcaactcttgcggtaatggaaaaaattttgaagaggctctgcggaacggattagcatcggggttacgagatagaatattgtcctaaaaagagatagccatttttctgagaattaattcacaatttccgcagctcttgcggtaatggaaaaaattttgaagaggctctgcggaaacgattaccatcggggtta

SEQ ID NO: 41563 - DNA, 1175 bp, Heterodera glycines
  unsure (1)..(1175): unsure at all n locations
tgtaatatgttgaaggcaagccaagtgcttcgatttcccatcttctcttggagtgtgcacncatttggataaagcttggccagcagttgcaattggccgatcaaaaaagacaatccgatcggggaacagatcatatgtgttgattgatttcaactgattgagatcagtgagaattgtcggagaagtaaaaagacacaaattgtccaaaccatcagcatcgtgaaaaaacattgtacgaatgtttggtgcaaaaatgggccaaatttcacgcacaaaaaacttcccaaatcgactggacatggacatcatttccaaataaagaacattgcggaggggtcttgaggggggaggttatttttttatgacaaacatcggtactttcccattatgtgaccgcaagccaaactttttctgcaagaaaaagggataatccatcaatacaggccccccattaattactgaatttgaagtttcgcaaaacaaattttgttgtgcagcggacgatccggccaaggaaatggcacagaattggcataatgaataaacacagatagttttggcactttcgcgccagtgtcttttttaatttcaatttctcgccaaattgccaattcgcttttgccatcgaaatacgtgcgaaatcagtgccaatttgaggccgagttgagcacggtcaaaaaatgggaaaatgtccaccaaaacatcgctgcaaatccagcttaaattatgaaaatttatctaggaaaatgaaaaacttgtcctcatttcctttaccgtcggttcatttttgttgcattttatcacacttttcctttttacaattgattgatgacagaataattgttcaattgcagtacaactttttctagccacggaaatgtaaaatgcgaaaatgaattaaaaaaggggaaattaattttgtctatactctcaactatgaacaaaagcattaaatattctcgattagactggaaaggaccagggctttttctcaaaatagtgaagtgatgccgatatgcgccgatgngatttatttttgctcaatttgtgctaacaggttttcttgagacaaaaaatagaaatacatcattgattgcattggatgagcagcaactggcagagacgcagatggccacacaccagggatgggccaaattgaaaataaaaagcgaatg

SEQ ID NO: 41564 - DNA, 1035 bp, Heterodera glycines
ctatctctttttctggctcaacagtaatagagaattccaactcgcacccgcagaataattacgccgatactaattgttctggaatttgtttctcgacgcgtttgtttgggaaaaatttggaaaattggctatctctttttctgctcaacagtaataggaattccaaccgcattctcagaataattacgccgatactaattgttctggaatttgcttctcgacgcgtttgttcgggaaaaatttggaaaattggctatctctttttctgctcaacagtaataggaattccaaccgcattctcagaataattacgccgatactaattgttctggaatttgtttctcggcgcgtttgtttgggaaaaatttggaaaattggctatctctttttctgctcaacagtaataggaattccaaccgcattctcagaataattacgccgatactaattgttctggaatttgtttctcggcgcgtttgtttgggaaaaatttggaaaattggctatctctttttctgctcaacagtaataggaattccaaccgcattctcagaataattacgccgatactaattgttctggaatttgtttctcggcgcgtttgtttgggaaaaatttggaaaattggctatctctttttctgctcaacagtaataggaattacaaccgcattctcagaataattacgccgatactaattgttctggaatttgtttctcggcgcgtttgtttgggaaaaatttggaaaattggctatctctttttctgctcaacagtaataggaattccaaccgcattctcagaataattacgccgatactaattgttctggaatttgtttctcgacgcgtttgtttgggaaaaatttggaaaattggctatctctttttctgctcgacagtaataggaattccaaccgcattctcagaataattacgccgatactaattgttctgggaatttgtttctcggcgcgtttggttggggaaaaatttggaatattggctatctctttttctgctcacagtaatagga

SEQ ID NO: 41565 - DNA, 952 bp, Heterodera glycines
  unsure (1)..(952): unsure at all n locations
ggaaaaatttggaaaattggctatctcttttctgctcancagtaataggattccaccggcattctcagaataattacgccgatactaattgttctggaatttgtttctctgcgcgtttgttggggaaaaattgggaaaattggctatctctttttctgctcaacagtaataggaattccaaccgcattctcagaataattacgccgatactaattgttctgtaatttgtttctcggcgcgtttgtttgggaaaaatttggaaaattggctatctctttttctgctcaacagtaataggaattccaaccgcattctcagaataattacgccgatactaattgttctggaatttgtttctcggcgcgtttgtttgggaaaaatttggaaaattggctatctctttttctgctcaacagtaataggaattccaaccgcattctcagaataattacgccgatactaattgttctggaatttgtttctcggcgcgtttgtttgggaaaaatttggaaaattggctatctctttttctgctcaacagtaataggaattccaaccgcattctcagaataattacgccgatactaattgttctggaatttgtttctctgcgcgtttgtttgggaaaaatttggaaaattggctatctctttttctgctcaacagtaataggaattccaaccgcattctcagaataattacgccgatactaattgttctggaatttgtttctcggcgcgtttgtttgggaaaaatttggaaaattggctatctctttttctgctcaacagtaataggaattccaaccgcattctcagaataattacgccgatactaattgttctggaatttgtttctcggcgcgtttgtttgggaaaaatttggaaaattggctatctctttttctgctcaacagtaataggaattccaaacgcattctcaaaaaaattac

SEQ ID NO: 41566 - DNA, 1125 bp, Heterodera glycines
agagccgttgttggtcgttttgtgccgcaacatcaccaacaacaacaaatccaacggtatggtggtggtgttggtcatggcgtcagcggcggtggcatgggacggcacgcgttgacggatcggtatgtgtgcatctgctgtgtcaagacccatgacactcattgttgggatgctatcgtggccgagctttcgacatattgaaacttttaccccctggaggtgtcgggttttcggtgaaattcggcaacactagttaccgggtttccgtttacgttttgtcggaaaatcgcttttttcatcatatttatgccggaatgttcagcttagtgggcgaggctctccagctgggcccctaccatgaccaacgggtggtggacgtggcacgacgcgagttggccgaggcgtaccaattggacgagcgcagcgtaagccgatggcattgaaattttcctagggctcactcaagttacgagacattgagaattgatcccccgagacttgagaaaacccgaaactttctcatcgatattcgtgttcgagaacagaacacaatcatttttatttgccgcaacaaaatgaatgatttttgtcgcgtcagatggactcggccgcctattcctacctgctggagcagcaccttggcggcgtctgtccggaggacatccaggacatcaacacgtactcccaggttggttgtgctcccgccggacaatccgtcggcgataaaatcccatccattttttaaaattaaatcgaacaatcgcaatcgcaaattttgatcatttctcgaaaaaattttttgcaaaataatgtccactgacggattgtccattatgaccgattgtctgaactccgctggttggttggttggtgatggtgaagtctcaaaaatactatttttaaaatcaaattttaaatttcattcttcagcatgcactgatgaggccggtccaagtggacgaagaggaggaggaggaagaagaagaactggtcgaagaccacgacgtcgaacgacgacaacaccactaccagcagcagcagcagcggaaatactgggtgggacagcagcaacagaaggtcgggggaagacgacctttttgctggtcacacactctgatcagttgc

SEQ ID NO: 41567 - DNA, 677 bp, Heterodera glycines
  unsure (1)..(677): unsure at all n locations
agacgattatctaattgaatttaaaaaccgaattttattaaaatatttattttagaatattcaaataacaattaaataattcttttagcgatgttcgcttcggtgctgttatcggaaaagcgtataaggtaaaatgggagaaaatatttcaatggcacggaccctcggaaaagggtaaaaatgccgagagtttagagtcgagaaattccattttcaaaattaatttgcacaaatttaatattttttgttgtaatttccgaactttaagggcacaatgtgctcctttgagttcagcggaggtgtcatcgttgaccatgccgaactgccggcatttgttgggctgaccgtagcgcatgaaatgggccacaattttgggttggcacagccaattaacgctttttcaccactaaaacttattttcttttcagaatggaccacgatgccggctatcccgagccttgcaaatgcccggcgcagcaatgcatcatggcaccggccagcagcaagttgctactgttttttggataatttaatgatggcattaaatgaaccaatctccaaaaaactgatgaataccttncactcttttttggattgatttattaattcatccgcatagcaattagtccatctggacaaaaaattgaagcaattaaaatgcatttaaactaattaat

SEQ ID NO: 41568 - DNA, 826 bp, Heterodera glycines
atacaggattaccgggatgggtgggttgggtaccacggagtgtagtctttcagtgtcgagtctgggagatgttgccacgggatgaatgagtgtcaggaaaggctctgttgcatttcaggcacccaatcggcttttaggcgtccaatcaatgacaatcctcgcttttttggacataatttgtttcttcattgatcaaaaaagcccacattttggtatcaaactaagaatttttgtgttacttttagcccagattttacttttataaaaacttcaagctccatttgattccaagaatgtgagccttggtaaaggaacaaaaaaaagttatggactaagaattgcattattatcttatgcataaattgtaagaaaaatcttattttttggtgattcaatttccaaattgttaaatttgtgcccattttttgtgattttccgttggtttaggctcgtccgacgatggaccgttggctgcaggagggaagcctttgggtgaatttttgtttatacccaaattgtggtgaatttggccatttctttagtgggaatactctggtatcatctttaatgcctttggtaatgtttcaggccgattggaccttccgcggcaaacatttgggcgtgtacgaattcggcacggacctgaacaggtccgactgggtgctgatccataagcacgaggagaagaagttcacggagaacaggcagcagatgggcacgctgaacattcccagcactttccctgtgcctcctttgcaggtgaccccgtcaaaaaacggcctcggaaatgcaaacatttgtaaaatttctggtcaccgacatttcg

SEQ ID NO: 41569 - DNA, 971 bp, Heterodera glycines
  unsure (1)..(971): unsure at all n locations
cgcaaaaacctaataatnntttttggtaaaaaccttaactcccccccccggaaattgtcaaaaaatttccccggcggcgcctatctgtaccgccagacctcctggtccccaaaaagttttaggaaaaaacgcgcccaaaaaagtggtataaatagcaaaaaaaaagggtcttcactgggcaaaataagcaaaaaatggtcgaacgtaggaaaatggggctctgaccccccccccccccccccatgggtgggtcaaagtcgaacgtaacacccaccacccccttgcaatctgatgatattcatattaattcatcaattaatggggaagcatttccaagtatgcccacaattaaaaatgaatgctttttaccgtgtcttgcgtaagatgcgtttcgacactgtccgggtagagatcaccgctcagctaaaagccacgaaaatcatcgcccgaaaatagcaatcaaacaactttagtcatgagttgagcccggaattttgaaattgccgggaccggggccgggacttcgagaatggaccgagcgggatcccgggaccgagactcccgttttccgggactccaggtcccggtggtttgtcaaaaaaaaaaacaggacctaggccgggagtcttggcaaaatcccggcgtggctccggtcccgtccgggctctagtcatgagtgagaatttttggcaataattaattgaacataaatttgttgggaaaatccagtaatgaaagggcgcccattggcaccgaccgaaacggaggaaaagctctccgtctgattggcacgggtccaccagtcgtagggccacgggaagaagcgcacatgcaattcgccgttcagcttgatctcgtagaagaaggcgtacaccacaaaatgcacttgcacataacgttggctttgcgacaccaaaaagcttttgtcaatgacaccttttatttccaccatatttggatttcttctgaaa

SEQ ID NO: 41570 - DNA, 958 bp, Heterodera glycines
tcacatggcgatttttcggcactcctggataattttcgcgctcatcaacggggactataaaggcgatctagaaggaatcggaagcgctaaaatcgttcgagaagcttttcgagcgtaattacgatttttacttacaccatttttcgctaggcttagatcacacgcgattttcggcactccgataattttagcgctcatcacgggacgtataaaggcgattcgtataaggaattcggaagcgctaaaattcgtttcgagaagctttttcgagcgtaattacgatttttacttagaccatttttttctaggcttagatcacatcgcgattttcggcactctgataattttagcgctcataatgggatgtataaaggcgattgtacaaggaattggaagcgttaaaattgtttgagaagctttttcgtaattacgatttttacttagaccatttttttctaggcttagatcacatcgcgattttcggcactctgataattttagcgctcataatgggatgtataaaggcgattgtagaaggaattggaagcgttaaaattgtttgagaagctttttgagcgtaattacgatttttacttacaccattttttgctaggcttagatcacatgcgattttcggcactctgataattttagcgttcataatgggatgtataaaggcgattgtagaaggaattggaagcgttaaaattgtttgagaagctttttgagcgtaattacgatttttacttacaccattttttgctaggcttagatcacatgcgattttcggcactctgataattttagcgctcataatgggatgtataaaggcgattgtagaaggaattggaagcgctaaaattgtttgagaagctttttgagcgtaattacgatttttacttacacatttttttctaggcttagatcacatgcgattttcggcactctgataatttta

SEQ ID NO: 41571 - DNA, 739 bp, Heterodera glycines
caaaagccaaccaactaatgcagtaagttatgatttcctctttagtgttttgcgcttggcgatcccaacttggggaggaccttcctttgtcactggaggtggtggtgtctccctcccccgccccttcgctttggcttttcctttctcacttttggcattgcttttgttgtcgcttaggctggccaaattgttgttgatttgcacttcttcctcgtcgcttccactgaacaaaaagcaatcgtcaacttcatgaaatcgatcgtatttatattattgttgctgatataaaattaaaaaaaaagaatcgcttaagcaaatgaaattaaatatctaatattaataaataaatttccgtgtgattttgatatatactaaaatatttagttaggcattgtgtagattttgcaaaaggggaaacgggccacattaacggcgaagaacggcggcattaatagaaaatttattggaaaacagcggcagagatttccaaaataatacggctttttttgtttttgaatgttttgccaaataagccattcattcctccgttcatttaataccatatccatcagttattagtcatctcatcacaattgcatcagtcaaagaaaaaaccgaaataagtggaaattaacgaaaatgtgagaaattgtaaaatttttcacttaactcataagtaaactaactgcttgatagcttcaataaaaatcaggttcctgtttagcgctataattcctct

SEQ ID NO: 41572 - DNA, 639 bp, Heterodera glycines
  unsure (1)..(639): unsure at all n locations
aattaattcaaataaaaattaaaattaagaaaaattaaaataataaataagattaagaattaaattaaaataaattaaatttaattaaaaataaataaaacccaaagccaaatcctattggagaagggaagggtaggcgaaggggagggagtcagctgtcgtgccaatgggggaggggaaggaacgccaggccagctgaacgctcgcgtgtgccatttgagcacacgcaggggccatttgagagcccgcttgtgataatttgagcgattaaaattcaggttaatttaatgttgaaataaaatttcaaattaatccaaataaaaaataaacttaagaaagttaaaatcaaaataggattataattaaaattaaataaaattaattaaaaagattaaaattaaataaaatgcaaaataggatgaattaaaataatattaaaattatggtaggatttaaactaaataaaagataaataaaaataaaatataaagataaatctcagagaaataaacaattaaaagaatcaaaaattttgaaaatggtgcgggtataaatgcagggctanacggtggacggttaaactgtccttttgtgccgcgntgacaggtaaaatggcctttaagagaagagctggacatt

SEQ ID NO: 41573 - DNA, 936 bp, Heterodera glycines
tctctctcctcctctctctctctgtctctctctctcctctcatcgcattctctgtctctctctcctcctctctctctctctttctttctctctctctcctctctctctctctcctcctctctctctctgtctctctctcctctctctctcctcctcttaccaatggaaaagtatttagggagttagagttaagtaagtaaaaatggccattttagagttcggtatttttgatggctgatttaaagaaaaataaagagatacagagccagagaaatagtgattaaatagagcaaagttaggactataagaacacaaaaatataaaattttaattacaaaaattgaattattggagagccgaaactgaaagtggtctccaaaaacggcatttttcaagaccaccaagtaacataatgttttaaaagtggttttggaaattccgaatttaattaaacaaggtaaatcgggtatgttgagttcgaatatggtcttagagtaacaaacctgtacagctcaaacttcatgcatggagttggagcagtacacgctcaggttgaaaagataggtcccatttaaggccatattcggattctactggtctaaattgtatagaaaaactaagattttgttatatcagctttggtttttgaccataaaaaattcgagaaaaattagtgggccaattttcaattttggcatggtcgggaaaaaggcagaaaaatctatcaatcaaataaaaagtgaaaggatagtaagatataaaagaggacaccatgaagaacaaaataaaaaaagaatcatttaaataggcgcagaaataacggagttatgaatttttaaaaattggaaaaaaatctctgtcatttttttacttatttattttaatcctttgacaaattccacaaatagagcatcttcattctaaatttaatttatt

SEQ ID NO: 41574 - DNA, 1138 bp, Heterodera glycines
taaaatggcgattgtgcacagccctccgtttcatacgcaagcgcttttgtgaggtataaaatttctcaaaaaaagagatagacatttttctgggatagagtataaatttaaaaattccctcaaaaataaaaggtctattgcgcaccgccctccctatcatgctcgagagcatttgtatgtgtataaaatttatcaaaaaaagagatagccatttttctgggataacctctaaatataaaaatcctctgtgaaataaaatggcgattgtgcacagccctccgtctcatacgcaagcgcttttgtgaggtataaaatttctcaaaaaaagagatagccatttttctgggatagagtataaatttaaaaattccctcaaaaataaaaggtctattgcgcaccgccctccctatcatgctcgagagcatttgtatgtgtataaaatttatcaaaaaaagagatatccatttttctgggataacctctaaatataaaaatcctctgtgaaataaaatggcgattgtgcacagccctccgtctcatacgcaagcgcttttgtgaggtataaaatttctcaaaaaaagagatagccatttttctgggatagagtataaatttaaaaattccctcaaaaataaaaggtctattgcgcaccgccctccctatcatgctcgagagcatttgtatgtgtataaaatttatcaaaaaaagagatagccatttttctgggataacctctaaatataaaaatcctctgtgaaataaaatggcgattgtgcacagccctccgtctcatacgcaagcgcttttgtgaggtataaaatttctcaaaaaaagagatagccatttttctgggatagagtataaatttaaaaattccctcgagaataaaagggctattgcgcaccgccctccctatcatgctcgagagaatttgtatgtgtataaaatttatcaaaaaaagagatagccatgttttctgggataaactctaaatataaaaatcccctgcgaaataaaaggggaatgtgcaccgccctccctcttcttctcaagagcttttgtgggggttaaaattttttcaaaaaaaaagaaaggcatttttttgggaaaaagataaatttaaaaattccctcaaaaa

SEQ ID NO: 41575 - DNA, 741 bp, Heterodera glycines
gaactttttgagacattcgcattttaaatttttgtgccctttcaggttttctaagtcagggggatttttataattctgcttccgaatctttcaattaattgcgcttgttcaggcgggttgaggtcactttggcgtgggactttttggcgccgcaactttaaagtgtcattttgcatgtaattaaataaaacaatcttgagaccattcgatagatcgtagtgttctcaattatcctgcaaaattttcgaaaattacacttggttaaaaaaagatatggcacgtggcgcaaatggccaaaaaacaaaaaaaaaaagtttgttgaggtttttttgccataacttttttgtgtccgagcaaaattttttgtttaaaatcaaattttttatttttgatgactcaaaatgttataaggtttggcggcgccgaagtgagcggactcattaattgcccccattctttcagagttaaatcgcgctgaaaattctccactctaattaaaaaatacaaaattgaattcatcttgtaaattgcaacatcttagagcgcgaattggcccatcatttgatggcccaattaattgttggtttcctcgcccttttcggcctacaccccatccaaatagcgctgcaattaagatgaatgtgtcaaaatgtgtaaaatttcgcacttaaatcataaggagactaactgcttgatagcttcaataaaaatcaggttcctgtttagcgctataattcctct

SEQ ID NO: 41576 - DNA, 1273 bp, Heterodera glycines
cattgtcaatgtgccaatctacatttacaaattcaaagtttttgtgccctcctctccccccagggtttgtccatctgcgcgttggcactttctctctttgcgttgctcctcgccgagacggactcggctctggtgaagcagttgatcaacaacaacgacgagacggagacggaacagcaccagtgggacaattacgcatatgaagaaaaaacagtggtgaagacgaaggacggctctgagcatgagcacgtgcgccaaaatacaattggtaattaattggtggatgaaatgccgggggaatgatcccaaaaaagcgaggatttgtggccaattagagggggagggccaggttggcttgttcgtaaaatcctcctgtcgtcaagcccagcttgaaagtctcgggcttatctcgggctggattcctcccacttttttctcacgttttctcacaatttttttgccaaatttccctcggcgtttagcgactgcgtggcgccactacgctcggcggttggagctgagcggttggctgcgcgaggccgagttgtgcctggtgctgttggtgattttgctgtggattgcccagggcatcgtctgccacttttatcgttacgcgaaattgcgaaaggtcgagaggtttgagcgcgcggcgaatggatacggcgcaggcggaactcggccgagcggcacaaatttccgaattcccgtggccacactccgacgtcttcagcacgtacagcagcagcagaagcaaatgcccagcggatcagcagcagcgacggggaaatattgaggaggaaaaaagtgatcggaagggattattggccaagacgaagccatttaagccgaattattaaacaattgtcttaaagaaaaagtgatctacgacgaaatttattaggcatttgagaagcataactgaattttagtgcaccaatgatcactttaagataatcgattggcccaaagtcggacattcgatcaaagaccagacaactgattgattgattgatttattgattggtacgatgtttaatgatcagacacatcaaattattcgaattgtttaatgccgttataaattaacaaacccgtaactgtgatcattctgaattcattcattgcttacataattttcacattttactgtctttttgttcggcgttttcatttaactaattgaatttaacaaattttcaattaacgctgcctttataaatagggcggggaattatatggaaatccatatttttttcggggactgtgggggggg

SEQ ID NO: 41577 - DNA, 1330 bp, Heterodera glycines
tcggatttgtgcaaaacatccatgtttcgaatcccgcccccactttcggacaaattttttaacttttttatttcttgccgctagtatcttctacaataatttgtcagtttggtcggatgtgcgtcaaacggaaaaaataattaaaattttataaaaacacataaatagtataacaaaaaatatcaaatttcagaacaaactaagggttctagtcgattttgctcgacacatgttattttacatatcccatgacactatacgagatacccctttttcttgcatataccatcactttatacattctctgacaacttaaatgataattgcgcatcgtcctgcctctcacgctcgagcgcttatgtaaagtataagattactctaaagaacagatagtcatttttcttggatataagatagatttataaattctctgtgaaataactggcgattgcgcaccgccctccctctcacgctcgagagcatttgtaacgtataaaatttctcaaaataagagatagtcatttttcttggatataagataaatttaaaaattctctgtgaaattaaatggcgattgcgcaccgccctccctctcacgctcgagcgcttttgtaacgtataaaatttctcaaaagaagagatagtcatttttcttggatataagataaatttaaaaattctcttagaaattaaatggcgattgcgcaccgcacttcctatcatgctcgagagcatttgtaacgtataaaatttctcaaaataagagatagtcatttttcttggatataagataaatttaaaaattctctgtgaaattaaatggcgattgcgcaccgccctccctctcacgctcgagcgcttttgtaacgtataaaatttctcaaaataagagatagtcatttttcttggatataagataaatttaaaaattctctgagaaattaaatggcgattgcgcaccgccctccctctcacgctcgagcgcttttgtaacgtataaaatttctcaaaataagagatagtcatttttcttggatataagataaatttaaaaattctctgagaaattaaatggcgattgcgcaccgccctccctctcacgctcgagcgcttttgtaacgtataaaatttctcaaaagaagagatagtcatttttcttggatataagataaatttaaaaattctctgtgaaattaaatggcgattgcgcaccgcacttcctatcatgctcgagagcatttgtaacgtataaaatttctcaaaataagagatagtcatttttcttggataaagataaatttaaaaattctcttagaaattaaatggcgat

SEQ ID NO: 41578 - DNA, 1178 bp, Heterodera glycines
attttgttttatgtttaaagtatggctctttgcagtttccatcattgtaaaaaataataaaaaattaaagaagatatggaaaaaattttccaaaaattgtagaccaacaaaaatttaaagtttttcctttgaaaatttaattttgggaatgcttatgtgatggagttaatccgggacatgctttgtatgggcaaagaaaaaaccagtttatcaagcgttaaaagtttctttgttagcttatttcgtttccaaaatttttgggtttcagttaaattttttacaaaatattaaattaactcctaaaattaaatttgtttattttttgttcgaattatcataatgtatttttatggtcgtgtaaattttattataattaaaaaacaactcgaatctgaaggaatccaaataaataatccacattttatgaaggctatctatgcaaacaaccttaattaaaaacattttattgattcaatttttgaggaaagagttttattgaaatcattttttaatttattttttaatctttttctttagtatattgaaaaatgtccaaaatttattttttctttttatttttcctaatttctgtcaatcatggattatgtacatttggtaattgtttttttaactttgtttatttattatatttacaataataattgtaattcaaaattgtgaattaggaataaatatctgacattttaagagactaaaattggcgaattcgatgagcaatatccaaaaatgctgatcacaatgcaaaaaatatcgcaaaatgagcattttgaaaaagcgaaattaagaagggaagcatcgattttcaacatttatataatggactttttaagttctgtcgaaataaaaaaattaaataaatcgcagaaaaatattttctcagaaaaaatacgtcaattcgataaaatgacgagaaaatttgcacattcagtggagaacaattgcgaattgtggaagttttggcgtggcattggtaaaacggaatttcaaatagctaaaaaatgaattaaaatagtattatttaaataaaaaataattattacacaattaagcaacattaaaatttccaatgactgaaaatgatgatttgtatgaacaacaaaatgaaattgaattggatgaaatgaattgctctgaatttgaagaaatttgcaaaatat

SEQ ID NO: 41579 - DNA, 1156 bp, Heterodera glycines
atgacagtgctacggcaccggatggacaagcggtggccaaatggcttttcactccccgtccggacaatgtgccgaaggtgttcaaatgctggttgtacatggatgcttggacttgcccgtcaaatattgaacaattcaaaacggtgcttttattatttcattttcgttaatcaattttcccgtattttaggcctttgcctcggcttcatctcctgtcaatttcatcgtttccatttgcattccgttgccttttgctgactccgttttgctcttcgatctgaccaatggatttacgcatgaacaattgacgttgacatggatgaacgatatcggccgttttctgctgatccgtcgtccaattgtgcgcgatgaaagcaaatgggcaaaatgggagaaggatgcgattggctggcaattttatgaccaatggaatcgaatcgacatttgggtttcgtgacgctatgatcgacccaagtaatcagcagaagaagtggatgaatgaactgttaagaagtgatcgaccaatttggattgcggatgaatttgagcccatttgacgtttataaaattgttattttgtggcggtgatcacaattgtattatgtatatatgtgtgtataatatgcctctatgataaattaagagatttcctgaaattgcaggctcattcttttgggtcgggggtcgttttcgtacgagcagcacaagtttttagctataacttttttctttgctaaccatttagttagaatgctcgagaattatggataccgaaccgagaaatatgccggttttttcagttatcggtgcgatggcataaattaccgtatttatcgattaacccttttgggaagggttgagcaataaaagagccccgggccttataaccgaaaagtacgatatacaatatatcggtattcctgaaaaggggtttggtactgagatgggatcttacagtatataaaggaaaacgtcgccgttcaacggcatcccaaaaacaatccttttattttttctaaaacgaattttgttacgaattttgcattttttaaactctaatgattaaagaacaaaaaaaaaagttttacgagtccaataaaaaggagcaatttttatgagcacgtcaataattccataattcaattaggtcgatcac

SEQ ID NO: 41580 - DNA, 1102 bp, Heterodera glycines
gaaaatttcatttgtgattatgattttttttcttaaattaccaactaaagaaatttttataaaataaaattcacatctattttccattcttaatcgacaaataattaatgatattcctttttttctttccatcctttgtttcttctttaatttgatcagagctcgccgccgtcttttcgagcttcccattctttgtgcctttgattatggtaaattttaaagaattttaatgttttcaaggaattaaaaattataaattttgaatagcgattcaaaaatatatatataaagtgttcaaaaaatattataatcactagggaagcaacttttagtgaaaaaactttttttttgctcaattgttttgaagaaaggagctcaaaaaacgcatttctgcgttaaaattttttcatttggacgtcacttttcgtcactagaaatcactattttggcgacttcgtcactaaaatagttaaaaatcactattttggcgttttgtcactattttttcactatttcgacattttttggaaaattccttaacaaaaatgcaataaaaccaaaaaatacacccctaagaatcgacctaaaaaattttcaaaaaaatacacccctaagaatcgacctaaaaaattttcaaaaaaatacacccctaagaatcgagcaaaaatttttcaaaatatactcctatgaaatgaaaaaaaattttctcaaaaatttactttcttggcaaaaatttttaattttaaaaatttttttaggtaactattttgggttttttggtcttaaaaatcccagtcctactcatttgcaactgcaaatagtgaataaaaattatttttgctcaatttttggctgaaaattatgtcactattcgtcactattttggacttttttcactattttgtcactattttggcactttttcgtcactattttagttaactatttcgggatttttcgtcactaaaagttgctaccctaataatcactaacgactcaggataaaaattacttttaaaaaagttctaaattatctcattcaatgaatgggaagttaatttttagcgcttttacttgattgaacacgcactgtcagtcgaaa

SEQ ID NO: 41581 - DNA, 901 bp, Heterodera glycines
gaaggagaattatacaataggggcctttttattaccaccccaacaaatcagcatggcgtctcaatgatatggtatgtttcagttaaggtttagccgatctacaaatttcggcactgtctattttgtaaaagcgaatcaaattcctttggattccaaagtggaattacagaattgcgacggcaaatcctaaatagacaacgacgctttcattataaagctttaagggagacaaagtaatacgaatatttcaatttcttacttatccgaatagacaaagataggttacacacgaacatttttatagaaatttggctgaaactaaaatccctcttttggtcttaacctatgatttttggcccattatggatgaattaagtatagaaggcgtcgcagaaatacattcatattttctaaattcgggtttcagaaaattaagatttaaaagaggctgaattacagatgcttttcaaattttgggtgtatccgaatagaaagaagttggaaatcagtacttttcacgcctataaaattcgggccgaaaaatattggtgtttgtgactagaaaaatagcagatgcatatcaaatgactacagaaaattacagcctccaagaaaataattgctttgcacaagcaatattttgtagagcccatcaaacacattgtgcttataggaaaggcagaattatacaataggggcctttttattatgattacaacaaatcagcatggcgtctcactgatatggtatgtttcagttaaggtttagccgatctacaaatttcggcactgtctattttgtaaaagcgaatccaattcctttggattccaagtggaattacagaattgcgacggcaaatcctaatagacaacgacgctttcattataaagctttaagggag

SEQ ID NO: 41582 - DNA, 917 bp, Heterodera glycines
tgtagtgatggatttatgaaacgtctattttggcgtttatgaaacgcctccagcggccggatatccgtatgacacgaagtatttacgtgtattttcgctaataaatatttataaatgcttttatattataaagttttgtcagaaagcttcattaaaataaaatgtttttaaatcttttattattactgagcttatcatgcatttgtcaggccgaaggtaaaatattaaaatattaaccaataaataaataaatttgcagtattaaattcgatgaaaatgatggaattggcacgtttagctgtcccttttgctaacaatgctaatccaaacaaacatttatttatggaatggattgataaatatgcatttcgcttattatgccagaaaaactttttggaaataaatgcaaaaaattattttgtaagtgaattatcaggatggtatgaattaggaaaaattcaaagcaatttttgtgaagcatttgctaaaggggaaatttcaaaagtaacagaagaaaattgggaaaaaatgacaattaaatttgcaaattattttgacgagacgcaaaaaaatgaagaaaatattcgaaagaatattcaaaaaatcaatgataaatttgtgaaattctttggaaaggaaacagacaatattcttgataatgtttttgatgcactcaaagtgatagcagacataggtaaattggccaatatttttgtttttaattttcattaatgaaatccattagcattggccaacaagcccaaaatgtgccatttgcaacacaaagttgcacagcccatgcagtcgttggctgccgaaattcacaacaaagctttgaaaatggtaattgaaatatttaataatttttaccgatttattaatcatctccttaatcacatttagaaaagtatattatt

SEQ ID NO: 41583 - DNA, 1078 bp, Heterodera glycines
  unsure (1)..(1078): unsure at all n locations
cgatgcagtcgcggcgttgacaactgagatggaaccaaaagtttccataatatctttccataaggcgggaaaggcagaatttgaatggccagtcgatatttacactaagcacccgttgaagcgggtgatgcgaagccatagcaaactgtatttttaaattctggccgcaattctaccaaaaacgtgtttagaccgcagtataacgatgctctaccaaaaacgtgtttagaccgcagtaactcggctcagagtgaagattaagggacgcaaaagagacgatttaaaagcgattcgaaaattctatcgactgatataataacgatgcagtcgcggcgttgacaactgagatggaaccaaaagttccataatatctttccataaggctggaaaggcagaatttgaatggccagtcgatatttacactgagcacccgttgaagcgggtgatgcgaagccatagcaaactgtatttttaaattctggccgcaattctaccaaaaacgtgtttagaccgcagtaactcggctcagagtgaagattaaggaacgcaaaagagatgatttaaaagcgattcgaaaattctatcgactgatataataacgatgcagtcgcggcgttgacaactgagatggaaccaaaagttccataatatctttccataaggctggaaaggcagaatttgaatggccagtcgatatttacaatgagcgcccgttgaagcgggtgatgcgaagccatagcaaactgtatttttaaattctggccgcaattctaccaaaaacgtgtttagaccgcagtaactcggctcagagtgaagattaagggacgcaaaagagacgatttaaaagcgattcgaaaattctatcgactgatataataacgatgcagtcgcggcgttgacaactgagatggaaccaaaagttccataatatctttccataaggctggaaaggcagaatttgaatggccagtcgatatttacactaagcacccgttggaagcgggtgatgcgaagccatagcaaactgtatttttanattctggccgcaatctaccaaaaacgtggttagaccgcagta

SEQ ID NO: 41584 - DNA, 762 bp, Heterodera glycines
tctttttctgctcaacactctagacaattcaacccgcattacggaataatagcgccacccctaaattttcccgaaattctttctgggcgagtttgattgtgaaattttggaaaaacgcctatctctttttctgctcaacactctagacaattccaaccccatttacggaatgatagcgccaaccctaatttttccggaatttctttctgggcgagtttgattttgaaaattttggaaaaacgcctatctctttttctgctcaacactctagacaattccaaccccatttacggaataatagcgccaaccctaatttttccggaatttctttctgggcgagtttgattgtgaaaattttggaaaaacgcctatctctttttctgctcaacactctagacaattccaaccccatttacggaatgatagcgccaaccctaatttttccggaacggaatttctttctgggcgagtttgattgtgaaaattttggaaaaacgcctatctctttttctgctcaacactctagacaattccaaccccatttacggaataatagcgccaaccctaatttttccggaatttctttctgggcgagtttgattgtgaaaattttggaaaaacgcctatctctttttctgctcaacactctagacaattccaaccccatttacggaatgatagcgcccaccctaattttttcggaatttctttctgggcgaagtttgattgtgaaaattttggaaaaacgcctatctctttttc

SEQ ID NO: 41585 - DNA, 1471 bp, Heterodera glycines
  unsure (1)..(1471): unsure at all n locations
aaattattaaaaaaaaatttttttttgggaaaacattaaaatgttatacggatcaattcccagacggattggccagctctgtcaaaatgttcgtagaagctgtacggtgttgtcgtgtggtagatgaattgcggttgtgccgatatttcgtcgacaattggcacttcgccacgcggcggcggcggtgaaggatgaagcgattgcgtcaaatgaagctccggttggtccatcacaatgtccttttttggtgtgccgggctgagccaaatgcgtctgatgaagttcatcggatgctaaaggacaaatatgggataaatggaaagaaccgctgattttctacaaaatttcttgtttgcccctttgattgtttttttgccggggatggaatagggaggagggggtgaaagtccagaaatttcattttcaaatttttgtggcttggtagtaactggttaaacaaacatgctatgcgtttttatacggtttgccattaaaccgggaggtgaggagagaggggggggggggggataaattaggtaaattttagggaaataggcaacttttaaggatagcagttacattttctatacccttaattttttgccttacgtttcagtttcaacaactgctcccggtccggttttccatggatttgtggcacaatttcctccaccgattgttgctgttgcgttttgttgccggccaaacgaaggcgtcgatcgccgtacaatgtgtagccggaaaagagcaacaacagcatcaacagggcgtagaacagccatttgccaatgtgttgttgctgtgcatcatttctgaataaaaggaattaaactcagtattaaaaaaaagtctgtagctcccagttagatttgaaaaatttcttacaaaactggtcaatttatcgctttttcgggactttactcaattttctgactgtttctggctccgtagccacaaaagccgaaaattggcaacagctaatcgtcccacctcacaaattttttttttaaattttttgcatagcgaagggggaaatttctgaaaaatggaaagcgctccgaaaaaattggtatgaaaaaagcccgcactggagaaaagttgaatatcgtaagaaaaataattagtaagattttaattttttttttagatttcattgccccctcgctcctttcatttttcgggtttcattacgcccctcagcatgccataggtcctgtgctaatattactttgaatgtatcgccgcaaacgctgccgcgtcttcccccgccatttgctgctcacgatgtcgtgacattgcccgggtgcgcaaaccgatgccgcgcacaccgccagcggaagtggaggacggaggcgtcccatccacagcggcggatgcgtaatagcgcggcggcgcgtcgccggctgttgacgctgcctgtgccacgtagcggcgctgcccagtcagccnagcgaatgtccaactgatcactg

SEQ ID NO: 41586 - DNA, 1116 bp, Heterodera glycines
aaatgttggtacccaagtttgcggtcaaatcccccaggagaaaaaagagatagccattttttcgccaagaatttttttcgttagcatttcaaatatcgtgtgagtgtttggtagagccagactagagaaggcaaatgttggtaccaagtttgcggtcaaatccccaagagaaaaaagagatagccattttttcggcaagaatttttttcgttagcatttcaaatatcgtgtgagtgtttggtagagccagactagagaaggcaaatgttggtaccaagtttgcggtcaaatccccaagagaaaaaagagatagccattttttgggcaagaatttttttcgttagcatttcaaatatcgtgtgagtgtttggtagagccagactagagaaggcaaatgttggtaccaagtttgcggtcaaatccccaagagaaaaaagagatagccattttttcggcaagaatttttttcgttagcatttcaaatatcgtgtgagtgtttggtagagccagactagagaaggaaaatgttggtaccaagtttgcggtcaaatccccaggagaaaaaagagatagccattttttcggcaagaatttttttcgttagcatttcaaatatcgtgtgagtgtttggtagagccagactagagaaggaaaatgttggtaccaagtttgcggtcaaatccccaggagaaaaaagagatagccattttttcggcaagaatttttttcgttagcatttcaaatatcgtgtgagtgtttggtagagccagactagagaaggcaaatgttggtaccaagtttgcggtcaaatccccaagagaaaaaagagatagccattttttcggcaagaatttttttcgttagcatttcaaatatcgtgtgagtgtttggtagagccagactagagaaggcaaatgttggtaccaagtttgcggtcaaatccccaggagaaaaaagagatagccattttttgggcaagaatttttttcgttagcatttcaaatatcgtgtgagtgtttggtagagccagactagagaaaggaaatgttggtaccaagtttgcggtcaaatccccaagagaaaaaaagatagccattttttcggcaagaatttttt

SEQ ID NO: 41587 - DNA, 1333 bp, Heterodera glycines
  unsure (1)..(1333): unsure at all n locations
aaaaatgaattttttttatttatttgttttaaatatttacccaaataattcttgttcaaattcattttgcacaaaatataatttgtccaacacaaattgtgttttccaattccgcncaattcgctcttttttaatttgtcccatttttcctcaaattcttccatcaatttatttggccaattttctactcgatttttgatgaattttgtcgtcacttcaatcgcaatgagaagcattgcaatgtccaaatgcttctcaaattgtccatcttccgaataaattttatacacttttttcaactttttctcattcattaaatcttaattgtttttattattattttttccattttatattttatttaccaaatattctttcgatgccaattctttccaatgcttcttttgtgcccttttcttctttgctcatttcctctgaattttcctcttttatttccattaaatttgttttatttttttgtccattttccgcttcttcgccttttatttttccatttttaactgttccattggttacattttgtcctgtcgacactttgtcctttttctgtttcggcgtttgtttaaattctttttctccatccttctcaattttcatcgaattttgctcatttttttgcgactttttataaacttttttccttttccgttgatcatttttcttttcatttgccaaattcttttcagtgctttttatcatttgccaaatttcgctttctgttttggcgatttgtccgttttgcgtttcggcactttgttcattttttacggtttgtccatttttggcacagctttcttccctttctccttcaaattcgttttgtgtttcccaaaaaagctctttttctgatgaggacgaagacaaaaattcgggcggagttaaataattaatttcctaaaaataaataaattttttaattttaaattgtattatgatctttgatcacctcagtcaaaagtactcgaagcttcttaattgcgtttgaatccaataactcagaccacaagtgctcttaaataattttgtatatttaaattccaattaattagaagagatcgcaaagaatcacgcttcgcaaaaggattaggacggtattccgggatttcaatccttattacgattacactgaattctgttttgtttttcacaaaatcattggtcgcgactgactagtgcactaccgctacaccactggtatttcatcattaaaaagtttggcattttttatctcggcacagggggtcatttggcagaaatttaaaacattttttcttagaaccccaggtgtgctctatctacccaaaaaatctca

SEQ ID NO: 41588 - DNA, 709 bp, Heterodera glycines
ctcttctaatagctgttgtacctcttctaataactgttgtacctcttctatttactgttgtacatcttttaatcacagttgtacctcttctaatcaccgttgtacctcttgtaatcactgttgtacctcttttaatcacttttgtgactcttctgatcactggtgtacctcttttaatcactgttgtacctcttttaatcactgttgtacctcttctatcagcggagcgccctttgaggccgcgaagcggccgaaagtcctccacaaaattatgaatgcgtcctcacttttgcttgcgtttgatggcccataactttttttctaaaactctgatcaaaaaatgcttgctggtaggaaactaagttgaagtgttttctaattttcaaaaaaaattccaggcctctacctatacttggaagggctgcagaaattggcaacttttcagtaccaactttttccagttcagtccccgttgaataactcattaggctttgacctgagcgcaggatggccagcagacttattgtagagctttggaagctcgattttctgaaatttaaaaatttcgaaaattttcaaaatttttcgagctaggcctaaaaaacggttttttggtttttgaattttaggattttttaacgaattttcccagaaaaaacgagaccacttccaaacatagtttttcgagctctatcgactggtatttttt

SEQ ID NO: 41589 - DNA, 701 bp, Heterodera glycines
tttttataaattttagaccctttttgagtagattaaactagaaaaaatagaaaattttgatctcatttttcactctcccttctcccgggggtattattttgaagtctttttttccccaataaacttttcaaaccccatttttcgcaccgtgaatgttatttttatggaattttgaaccgttttgagtagattagactagaaaaaattgaaaattttgaaatcatgtttccccctcccttctcccaggggtattattttgtaaagtctttttttccccaataaacttttcaaaccccatttttcgcaccgtgaatgttatttttattgaattctgaaccggtttgagtagattagactagaaaaaattgaaaattttgaaatcatgtttcccactcccttctcccaggggtattattttgtaaagtctttttttccccaataaacttgtcaaaccccatttttcgcaccgtgaatgttatttttattgaattctgaaccgttttgagtagattagactataaaaaattgaaaattttgaaatcatgtttcccactcccttctcccaggggtattattttgtaaagtcttttttccccaataaacttgtcaaaccccatttttcgcaccgtgaatgttatttttattgaattctgaaccgttttgagtagattagactagaaaaaattgaaaatttgaaatca

SEQ ID NO: 41590 - DNA, 882 bp, Heterodera glycines
gggagaagggagtgggaaacttgtagtctaatatactcaaaccggttcagaattcaataaaaataacattcacggtgcgaaaaatggggtatgaaaagtttattggggaaaaaagactttacaaaataatacccctgggagaagggagtgggaaacatgatttcgaaattttcaattttttgtagtctaagctactcaaaccggttcagaattcaataaaaataacattcacggtgcgaaaaatggggtatgaaaagtttattggggaaaaaagactttacaaaataatacccctgggagaagggagtgggaaacatgatttcgaaattttcaattttttgtactctaatctactcaaaccggttcagaattcaataaaaataacattcacggtgcgaaaaatggggtatgaaaaatttattggggaaaaaagactttacaaaataatacccctgggagaagggagtgggaaacattgatgtctaatctactcaaaccggttcagaattcaataaaaataacattcacggtgcgaaaaatggggtatgaaaagtttattggggaaaaaagactttacaaaataatacccctgggagaagggagtgggaaacatgatttcgaaattttcaattttttgtactctaatctactcaaaccggttcagaattcaataaaaataacattcacggtgcgaaaaatggggtatgaaaagtttattggggaaaaaagactttacaaaataatacccctgggagaagggagtgggaaacatgatttaaaattttcaattttttgtagtctaactactcaaaccggttcagaattcaataaaataaccttcacggcgcgaaaaatggggtaatgaaagtttatttggggaaa

SEQ ID NO: 41591 - DNA, 185 bp, Heterodera glycines
caaatttgacgacattaaggattgctgctggtcgagttggccgcactttgcaccggcatccgatggaccatttcgcaactgatcatgcagggcgaagagtgcgcaacgccaattcgacacccattggacattgtcagtgccaacacaaaaccaatttatcacagcataaaattttggaaatttaa

SEQ ID NO: 41592 - DNA, 873 bp, Heterodera glycines
cgaggcgcaaccagaccatacccagcctaaaaccctctcctaatattaattgaggaacgtaatcggggaaaggaaatattaaggatgagacgagttggttcaaagccgtgccgttttgaagaacaccaacttgaccggtgttaaatgcaatcaaacgctcaatgtccaagaaattgcgcgccccagcacgaattcgaagaacagcaccgcggacattgttcggagcaagttgagcaatcacctattgaatattttcaaattaatattcaatgttccttttctgcacctgttgtgcgttcgtatcaatgttcagattgatccgccgtcgaatgtcgtgcatctgttgggcgagggcattaaagtctgtcacgtagtcgagcaaagtgtcctaaacaaaatgttgcacttaagtgaacacaacagaaataacagacgtcaaaatcggccaactccccgcctccctcgacttcggtctcgtcttgttcgtcctcctcgccatcgtcgtcgtcatccatctcctcgaaatcatcatcagcgaccaagtgcgattgcagaacctgctcattggcgtcggctgcctcggaaatgttggctggcggtcggttcaactcaaaggcttcgcgttccaacagggcatcccagtatcgagctgggccaaattctgcgccgtttttcgtcatcattccttcgaacagcttcagcaatgtgttcacagtgtcgatgcccggcttctcatgtaactaaaagttgtttctaacatttgtaccaactaaaattaattaaacgcaccggaaatcttcccaatgcttcttgacaaaaagatttgccaagttctgctcatggaagcttttgacgataaacatggccctgctt

SEQ ID NO: 41593 - DNA, 1034 bp, Heterodera glycines
cttttcattgctgccatttttcatcacttcggcgcatattttccactcaaatccctttaaatgcaccgttccgctgctccgttcactcttcaaaatctctcgcgcaaattctgacaatttttcgatcgtccacaaaatgctcccgttggatttggttggatcggcgatgtccgttttcattccctccacaatgacatcaatggccaaaatgactttgtcctcgtttttgttatacaaccctttgctcgtgtccataagttcctggattttgacaataaaagtacctaaatccaattggcacccaccgaaaaagtaatgaaattgaagaagcctcgatacttttctgtgctattaaaaattatgtcatcgaatcgtccagttaaatcttccactccgcactttcgtgaaacaatgcgaaaggttgccgaacatttgcaactccaattctttttttcttaatcatataaaatatttttctaaattgtctcattttgtgcccatcttttttctctggaacggtgcaccaaaggaaaaagcccaaacatttctcattgctttctttatccgtcattatctccgcatttatttcccatttgaatcctttcatgagcactttctcttcactgtaacgctcagttcgcactttcttttgtgcgaattttgaaaattcctcaatttccaatgcgagtgtcgtccctctgttgccatgggatatgttccaatccgaaatgcgtccatggcttgggaatttcaacggataaagcccgggcgtaccacgaaagttcggatggcaatggaattggtaaacgccaacaatttcttcaattgttaaaatgccggagggaactgcgaaataaaaaagtcaaaaattagaaatcaaatgtttaaactaccaatgttcttcacaaaaacatgtggtaacatgcgtgggaaatggattttggtcagtgccgggccaagcgcagaacgaagattctcagcggaacattctttgccattttgacggcacttttcgtcggaccaacggagtgcct

SEQ ID NO: 41594 - DNA, 699 bp, Heterodera glycines
tcccacgccattattctgcaccctcatttccgggaatcttctaatcaaaaaccatagattccacttttaaaatcttctctctcaacacacataacatatacaaatcatttttggttgtgttgttgctgttgtaaatgttccattttttttttgtctccgtcgtccatcattggttgtcctcgtccactgttccgctggtgctcgccacgagcgccgagtcggaggccatcatttcggtgatgttcttctccaggctgtccacccgctgggtcatctcgtcaatgcggtgaatgatttggtcggccatcgcctggaaacggtcccgcgtctcgcgcaaaacgccctctatctgaaaacaattggttttctaacaataagttacaaaagcgcggaaaattttttagcaaatccgagtggaaaaaggaacaaataaatccatcatgacttgacccctaaaactcggatatttaggttcgccaataaaaaagtgctaaaaacacttaaaaaattttaaaagccaacgtcattttcggcactactcaaatagggactttttgttttacaaaatggatatgttaggatcgtgaattaccaaattactagcaaattgtgtaagaaacagctccattttccagattgatttatatttttctagtgtctggcgaattttaaaaggttcgctaatttcaatcccccccc

SEQ ID NO: 41595 - DNA, 1012 bp, Heterodera glycines
  unsure (1)..(1012): unsure at all n locations
agagctgcggtagttgtgaattaattctcagaaaaatggctatctctttttaggacaatattctatctcgtaaccccgatgctaatctgttccgcagagcctcttcaaaaattttttccattaccgcaagagctgcggaaattgtgaattaattctcagaaaaatggctatctctttttaggacaatattctatctcgtaaccccgatgctaatctgttccgcagagcctcttcaaaattttttccattaccgcaagagctgcgctaattgtgaattaattctcagaaaaatggctatctcgttttagtacaattttctatctcgtaaccccgatactaatctgttccgcagagcctcttcaaaattttttccattaccgcaagagctgcggaaattgtgaattaattctcagaaaaatggctatctctttttaggacaatattctatctcgtaaccccgatgctaatctgttccgcagagcctcttcaaaattttttccattaccgcaagagctgcggtaattgtgaattaattctcagaaaaatggctatctctttttaggacaatattctatctcgtaaccccgatgctaatctgttccgcagagcctcttcaaaattttttccattaccgcaagagctgcggaaattgtgaattaattctcagaaaaatggctatctctttttaggacaatattctatctcgtaaccccgatgctaatctgttccgcagagcctcttcaaaattttttccattaccgcaagagctgcggaaattgtgaattaattctcagaaaaatggctatctctttttaggacaatattctatctcgtaaccccgatgctaatctgttccgcagagcctcttcaaaattttttccattaccgcaagagctgcggtaattgtgaattaattctcagaaaaatggctatctctttttaggacaatattctatctcgtaaccccgatgctaatctgntccgcagagcctcttcaaattttttccattac

SEQ ID NO: 41596 - DNA, 1072 bp, Heterodera glycines
  unsure (1)..(1072): unsure at all n locations
tcaaaagaagaggatagtcattttttcttggatataagataaattnaaaaattctctgtgaaattaaatggcgattgcgcaccgccctcccctctcacgctcgagcgcttttgtaacgtataaaatttctcaaaagaagagatagtcatttttcttggatataagataaatttaaaaattctctgagaaattaaatggcgattgcgcaccgccctccctctcacgctcgagcgcttttgtaacgtataaaatttctcaaaataagagatagtcatttttcttggatataagataaatttaaaaattctctgtgaaattaaatggcgattgcgcaccgccctccctctcacgctcgagcgcttttgtaacgtataaaatttctcaaaagaagagatagtcatttttcttggatataagataaatttaaaaattctctgagaaattaaatggcgattgcgcaccgccctccctctcacgctcgagcgcttttgtaacgtataaaatttctcaaaataagagatagtcatttttcttggatataagataaatttaaaaattctctgagaaattaaatggcgattgcgcaccgccctccctctcacgctcgagcgcttttgtaacgtataaaatttctcaaaataagagatagtcatttttcttggatataagataaatttaaaaattctctgagaaattaaatggcgattgcgcaccgccctccctctcacgctcgagcgcttttgtaacgtataaaatttctcaaaataagagatagtcatttttcttggatataagataaatttaaaaattctctgagaaattaaatggcgattgcgcaccgccctccctctcacgctcgagcgcttttgtaacgtataaaatttctcaaaataagagatagtcatttttcttggatataagataaatttanaaattctctgagaaattanatggcgattgcgcaccgccctccctctcacgctcgagcgcttttgtaacgtataaaatttctcaaaagaagagatagtcatttttcttggatatnaagataatttaaaaatctctgagaaat

SEQ ID NO: 41597 - DNA, 1166 bp, Heterodera glycines
gcccacatttggacaaatgtaacccaagcagcgatgagcaaaatccttaaattgaaggcttaatttaatttggaagggcatctctgggcgaaaattatataaaaatttatttatttttaatatatattttatttcaacattttggttgagaaaacaagcttggccataagcgagcaaaacatttggcaattcgttaattggaaagtccaagaaggcctttagcagcaaagcgatgttatatttatttgcttaataaataaaaattaaaaaattaatattttttaaacattttcaccggcgtaaagcactgccatggcattttgtccgttcaattcgcttaaatcctccgcgtaaatgaagctcaacatcgctttgaacgcttctgcttcaacatcaggcacctcaattacgtgaggacagtcggcagaggctaaaaaatgatgaaaaattatttttagaaatattttcggtatttttttttgtttacttttagtctttgagtttttgtcatcaaaacggaacatcgacccaaacacagcagaagcgaacatcatcacgcatttgtgtgctttaaaaagctaaaaaaactcggaatagaaatggaacgatggggttttatcggataaagattcaattaaattataaaaattatccggtgtccttaaccctatcctgcaaaattttgtaatatttttttcaagggcaaatttatgccctaacacgaatatgatgtttgtttttagctcttatgcgtttttacaccgggcccccttacgacgaggggggggggggggtgtcgagacaacccttgtatatgtatgcacgaatctgacatccatttctatgaattccgaaccctgaacgcgaatcgaacaaaaaatcaaaaactcaaacttatcaaaaaaaaatttatcttttgcaaaaaaaatgattaaaacaaataaaattaatcagataataatattaaaaatataaatttcgactttttattcgaattcgggtttaaaaattcgtcaaaactggtgttaggttcgtgttcagcgcataaaattaccctaaaaaattgttaaaaacaaaaattcagggagggtgaccggggacaaaaaacggctacaaatccctgctttacgcagccgtgaaaatttaaaaaaacactggcaaattct

SEQ ID NO: 41598 - DNA, 1833 bp, Heterodera glycines
  unsure (1)..(1833): unsure at all n locations
agatagatcagatcagcggtgtaatcgcagagaagccaaagcgaaaggttggacgaagtctgaacaatgagggnaagggggagggatgnggagaggaagtcggacaaaaaagggacacgaaaagcgatggaaatggacccaattaagcgatgaaaagcgacattgcctgataagggtaggaacagcggagcggaatgacaaaagcattgtacagaaaagcgaccagcacaaaggaaagccatccgacgtacaaagagccttcagaatgggaaaagcgatcagaaacagtgaccaaaggagcgaagaagcaccgaaagtgtcaatgtgagaaggcaaaaggcgcgacggagtggccacaatgtcctccaattggtcaccctttaaattttcaatagtttttaggccccaagtcattcagtgcccccgggggatcacccggtgcagtccgatcagtgacaccagcgatgcttttgcccccgcttccgagtccgccaccgtcgtcccctcctcctccgcgcgttcgtcgtccggcgtcggctcgcgcactaactgaacgtccagcaaaagtcaatgaatcggctttccctcccaaatgctcttctcattttacctcgtcacgaactgcagaagtgcgtcttctaaggtcgcgcgcaaattcgtgcagtttttccttgacaatgaaagaaagttgagaggcggtgtccgtgtgatggcgggaactgaaagaaatggacgaaaagccgagtaaaaaggccggggggggggggagtggcgccaaccttgcggaccaggccgttttcgcgccagcgcagtttttgaagtataactttttttcattgtcaaccaaatcaaaacagaaaacttcaaaaaactggttttctaaacatttttggccggaacttttttgaaacttaatgaaaatttcacaattttgcaggctaatagaggaaatatagggctatcgaatgatagcaagaaagttggatttggttgacaatgaaaaaagttatagttcaaaaactgcgctggcgcgaaaacggccggcgcgaaaacggcctggtccgaaaataggtttttcaaaaaaaattatatgcttaaaaaataaaaacctagaatggctctattaactcgaaattatgtttataaccatcataaaaaaaacattaccattggatagaagagggtcgacttctactgtgaattttaaattagaaatatctgattcaaaaaataaaaaagttatgcagcctcaaaatcggaattttaagcctaaaaaatgtttagtttttattatacattaattaaatttatttattttcatgttgggtttgaacccagccagacctccaaaaataggaattaaaccaaatgagccaccaattttgttcattttcctcactttcaccatcgcggaatggaaaatagcaaaattactatttttgaagctcatttttttcaaggatctatacttatggccccctctattaaagcagcctctttgaccgacaccctcaagacaatttaaattcatgagccaaaaggagaattttttttatccaacataatatatttcagttttattttgttctaattaaaatatttagtttttctggatgggataatctggataatgtactttcatctaaaccggcaagagaaatgaacgcgtggatggacgcatctagatgtgtttggcgcgaaggagtgccgaaatcaggatgttgtgatgaaaactacattctcgtaacaccatcaaaaagcgtcaacgattggttgggaaagaatcggccgcatactgacgacatcgaaagctttttgtaaaacggccaacaa

SEQ ID NO: 41599 - DNA, 729 bp, Heterodera glycines
gttttcccaaaaaagtgcggtttcgtccaaactttttttgataaaatcaaactttataattaatgaacatatgcattaaagaaattttgtaaatgtttttttaatttgaaggattgaaaaataatagtcaactaattaagcattaattattagtaatttaattttatctttcaaaagcttttcggtaaattggtactcagcggtgcgaacagccaagttggtttaaaattttctaaagaaatcttgtgtaaattttgatattatttgaagaataatcatggtgtttttaagagttaacccccccccccccccaataaattcagggccaacaggcgccgtgaacgaaagaaatgccatgaatgaaatgcatactgttccaaatttgagaaagtgtattggcgactgattcaaaatgataaataaagtggatataattttaaaacagtgctccatttttattaaatgaatgagtgatcggattagttctctgatcactttggtgagattgacttgtggaaacagccataggcaccaagaaattttcaaattttgaaaaattctcagtatgttttcagagtttatatttttgcgtaatttacaattaacaaattattatgttttttcttggtacgatttacgttttctttttgaatattcagtgttcttgattgaattttaattcagcgacatattcagtatagtttaaaggatcagctatagtttgtaatg

SEQ ID NO: 41600 - DNA, 973 bp, Heterodera glycines
  unsure (1)..(973): unsure at all n locations
actgaaaatggaaagaatggccttaactcctccgtttcgtttatgcagtaacacgccgagtgaagcacttccttcaaaaaatgttctttcttttctcaatttgatctcattgcctggggctgtcgggtgatcggtgcctcgtaactgatctcgaacaacttttcgaatgcttggatgatgaacacgatcgagatcagagtggcaaatgcctcctcagtgaagcgagtgatcagtgcgaccaacgcggacgcatcggtggccaccaaaatgatcagataaaagctcatccaaaggccgacgtaaaagcgaaagggcagaaactcccaatgattggtactgaaagggaagggcggaaatggcggaaattttaaaaaaaattgaaaaattacgtgcaaaaatcaaaaagaattttctcaaagatcaaagtgggaccggtggcggacagaacatctgaaggatgggagagaacattgacagaattagggaaacaaactcagcggttgcccactgaataggccaaagagaaggccggacagagcgccacaaattatatttgaaaagagagagacaattaattaacaaattaattggggtaattagttaattaattagttggattaattaatttaggagaacaactatgagtaattaattctgtaattttcaaacgtattttcaatggaagcaatttggtggtggaaagaacgctccataatggcgccgaaagtgattatgttggacagattggcgaagaacagaaggatggtggcggcgagggattggctgagacggccgcggaagaaatccgagaaatccgacggaaaccaaggcaatttgcgcctgatgaagaaggngggggaattatattttgggataattatatatttatattttggaatatttatttttgttttttccccaatcccaccgtatgtcggccatcagtcccccgaaaagtctccccggtacggta

SEQ ID NO: 41601 - DNA, 1285 bp, Heterodera glycines
attttttcaaaattataagatgaattattattatttttttctatttcaaaaatcgcttgaaaagattttcaaaaattttttcttgttttttattaaaaatttttatatttttaaaatttctaattttaaattaaatcggaaacggcggtggaaagtgacctgctccaacttcatccttccttacttttttcacacattgccattctcccatcaccacaggtggacttgaagctgtacgagatctcctggtactggtccgactggctgcgcaatgcgatgactgaggcggcccgggcgcgtgacgagcagcacagacgcgtggcgttggatgccgcttcgatggcacagcagcactatcagcagcagccaccgcagctgtaccaacaacaacaccatcagcatcatcagtaccaatggttgattgaccatcacagttaattggacacattgctttacgtttttttatatgttttgctgacaaatgaataatttcgctaattgggtttgatgaccgaagaagaagaagcattgttattttatagttaactctcattcattatcacattgtcaacgcattaattattattttgtcatcatcttttaattgtcttacacacgttcattcggtgctgggacgttagtcaaaaaccatcaaaatgggcgttagtcaaaaaaccatcaaatgaataatttttgacagaaaattattcataattttgtctaaaatggatcaaattttataatattgatatttttcgatagccctaagtgttttctattatcctgcaaaaattttaaaaattctttaagtttaaaaaaagttatgacctgagaagctcaaaaaaccaagtttttttgaacatttttagtcataactttcttgatacttaacgaaactttttggaattttgtaggctaatagaaaacacttagtgctatttttctaatcaaaggttgaagcccttaaatccttttcaatgcacattattggaatttttagcatgtatttaaaaatggttttaaggatagatgaatgaaaatagtgggctatctgtatgcaaaatttctaacatttttgacgattttttaccgtccatgaaccgaaaattttccaatgtgtattttagagccccacttaaattgggagacaaattttagtgtttcaccaattcctcaacaatttcgcccatgggcacaagaaaattctccaccaccaatatgtacagagaagacagacaatgaatggtctctctcccatctattaaattcgggggagggggggggg

SEQ ID NO: 41602 - DNA, 1043 bp, Heterodera glycines
  unsure (1)..(1043): unsure at all n locations
attcttttttgatcagttggggaaatgtcagttggcgaaatgaatgttttggctgagttggcgaaatgaatgtttttggctagagaccggaaatttcaaatttgcggatcctgttgcaggattggaattcaaaattttttacaggacaggatccggcaggattaatcctgcaaatcctgcaatcctgcatttaaaatctgcaggatcctgcgcacgatttctgcgcgggggggggttggaagccccanccccgagccgcgaagcggccgagtgagtaccttcggtgcaggaaaattattaaggaagagagttcattatttatttgttttttgcataattaattcataaatatttttttcagaaagggttctgaaacgcaccaaattttatttacatgttagtttaggcactcagatgctttcactatcaaaaaagggagatgaataaaaaatctaaaaattttaattgctttttaaacaggccaaaaagtttaggcttaacttttttttcagaaactgatcagaagcgaaccagattttgcgagagcatcaaaaagacaaggaaaagcactgctatgatgctaacaccagtaattctgaatttaaaattttttattaatttttaaagcttcactattttatttttttagcaaaattaattcataaatattttttcagaaactgctctgaaacgcatcaaattttaattacaagttattttaggcactcagatgctttcaatatcaaaaagggagatgaataaaaaatctaaaaatttttaattgctttttaaatatgcgaaaaattttaggcttaacttttttttataaacttatcagaagcgaaccagattttgcgagagcatcaaaaagacaaggaaaagcactgctatgatgctaactccagtaattctgaatttaaaattttttattaatttttaaagcttcactattttatttttttagcaaaatgaattcataaatattttttcagaaactgctctgaaacgcaccaaattttatttgcaagttattttaggcactc

SEQ ID NO: 41603 - DNA, 893 bp, Heterodera glycines
aaattggaaatcaaacatttcccatttttggcaggacgtcaaattagtcagccctaccggttggcatattaaaagggtggagtatttttatttcttttactaattcagggcacccacgagcgctcgctatggccaatggcacaaggatcagcgttactcgcagatgcgctcgggcccgcgactgatcattttcattgtcggtggcgtcactttttccgaattgcgatcggcttacgaagtgaccagaacgcaaaagacgtgggaagtcgtcattggttggtcatatacctgtttgtatcatatttaatgccaatattttgatttttaggttcagatcagatcatcactcctgaacgttttctggtcaatttgcgtgagttgagcaaaaaatctcacgattgatactgacttcacttttgcacattcctttggttggtcactattttcttttttgcttcgtttcttttttgctttggttcttttattccccaaattgatttatgtaaatttaaaaaaggtaaattaaaacgcaaggaaaaatacccttttctaaaacataaatcattgtacattatatataaatgatttgcacattatttattctccttttgatcctgtcgcacctgattaaattttgattcttttgatcgaattcaagtcacattcaaatttcgaagctttaattcacattccagtcaattctctttttgtcattcatcctttaaaaaaacataacctgacaaaaaaaaatttgaaatcctttattaaagtttaaaaaaggttgtgctttttatcacccccacccctccaccataaaagcacgataatttgtcattgtttttgtccgattgtagtctaaaaacaaatatgtgaagttcaaatgcattaaatat

SEQ ID NO: 41604 - DNA, 819 bp, Heterodera glycines
ttttcattagaacgtcatttttagtcaaaaaaaaaatatatatattttttaggttttggaagaaaatagttatttaagcatttttaaattttgccaatatttttgttaaaatgcattcaaaaatttcgaaaattataattcatttaggcatcagtcgataaattttcaaattccgtttaattaatttttcattttttaaatttaatttattatcacctggcattgcgccaacaattttgtcatagccaaaatatttccattgtgaaattgttggcgaaatgctttgtgagccgacaaattttttgatggttggaaatgcgcggagaatactcatcgaaaaatcacccatgcctgtctccaaaatgcccacattgaattggaatgatttcaattcgttgatcagcttacgattggcaattaaaaaatctaaaaattaatttatttttgaaagaaaaaaaacaaataccgtaccaaattgtgccatgtacggtacgtcacggtgtggtaaaaaattggtacccttccaaatttgccaccataaattttgctgctgttttaactgtgcgacggcttcggaacaatttttggcattgccaaagctaaaagtcattctgtgccacaccataagtcgtccatcaaattttgatggcacttcagttggctcggcacagtccgcttcactgacgagaagaagctgaaaatggcaattttaaattggcgattaagccaaatcagtaatgagataaataatttttaaaatcaaaaattattgtcaagaataaataaataaattttgagagtgaatttttgagaatattt

SEQ ID NO: 41605 - DNA, 1056 bp, Heterodera glycines
atttaaacagttaattagttttttattcaatctcacagtgataaatattaaattttcattatttatctctttctgttcaatttgatttttatattctttaatacttacgaaacatagtttatcttcccaatctattcattttttatgatttaatccatcataaaaaatttaagacatttattaatatattttcaaaatcaaaatttttatttctttataataatttataattttttggatttttatttctaactaagtaaggctcgccttgttgctacaacttgtagtaggatccttcttggaatggcattgagcataggataaatttgtgtttttgatttatatattaattcatgaatatctttttactttttatttataaaaacttttttttagattagattttcattcctattttgttaaggtcggtatttcattatgaagcgtgtatattaaaaaaatatataaggcgacgttttaaaaggagtgagactgaaacaaggagagacagatagagagaaaaatagagaaaagaggagaggtgaacgagtgagaaaaaaggagagagtaaaaagaagagagagagaagagagagcaaaggggggagagagagagaaagcgataaaagggatagaagaggagagagagagagaaaagaggagagagagaaaaaagaagagaaagagagacagagagaaaagagaagagagagaaaagaggagagagaggagagaaaaaaaggagagtgtgactgaaacagggagagacagatagagataaaaaatagattaaaaagaagaggagaaagagtgagaaaagaggagagggaaaaaaagagagagagaaaaaaggagagagaaaaagggggagagagaggaaagagaagagataaaaagacgggagagagagagagaaaaagaaaaaggaatgcgaggtgcgcgagcgaagcgagcgcatctgcgctagttgatattaaaaatttgatttaatttcacatcaaaaattaaattttactttttgagatattcatgaaaaaatttttcaattcttccctgg

SEQ ID NO: 41606 - DNA, 1287 bp, Heterodera glycines
cgattttccctacaattttataaaaaattatattggcattttattaccattattttctttctgttggcatttcatttcattttcggcttttcctccccattcaatcaccttttaagctggtgatattaaactctttgctcagccgttcaaagtcctcctctctcccgtagtgacagtaccccgcttcgccttcccccgttcctcgggcagaatatgtcaaccattggatggacgagcgcaggtcctccgaattgggcgccataagttcgggactgactccgtccatgcggaaattgacttggccgtcggcggacagaacggagagatgattgggagaagagaagttggggtaggagaggagcacgtcgtaggggacaaaatgcacgtctgggaaagaacaatgaagggttggccaattcagtccgggaagagcccgtccgatcagtgattctaccactgatcgtcctctccccccccccccaattaccttcaattccgttttgcttccaaatctttgcaattttctcagccacctccatttagtcaattagcgtgcattagtcttttacctcttttgttcatttacccttttattcgcttctgtccccgccacgtgcggctcttttgtgaattgccgcaaattttccgcaattcgttttgggtcaatcgttgcaaagattgcctcgcgaatttctgaaagttttttttcctttgctttttgccttcgattgattacctttggcattatttgttctgtgatttggtgtcattttgtggtgaaaatgattttttccgctgaacaaaatgatgaagagaaaggagccgaagcaaaatgcggcgagcatcgaatatttacggaacaaaagcagcgaaagtgccaacagagaggtgccatttggagggggcgaatgggcgggggaaaaagggacggagtcggaggagtggggacacctcccgggggcattgcgcagctttgagctcatctgttaaattgtggaacgcataattggccatgcttatgggattgcttggccaaatgaaaagtgtcaattaaaaaatgccattggtcgcaatatttcccccccccccattttgaacgattcatttggcatttgatgcgagtgaggaaggatcatttgtagaaaagaatgaatgaatttggggagtcaatgggtcagcagcacaaatcattagcacaatttgaccatttgggtgatttccttccccccccccccccaattcactttcttatcaacaaaaagttgtttatatttttacaaggaatta

SEQ ID NO: 41607 - DNA, 853 bp, Heterodera glycines
aatttccaaatttcccggcctcgactcttataacatttgctcaacatgtaaaaccatgtcagtttttgaacaaaatctgttaacaaattacaacaaaaattttcgaaaaattttcaaagaggcgcctaccggcgccgccggcccccttgctcccgatagtttttttttgaaaaaagctcgcctcaaaaaaacattcttaaagaccaaaaaaatcatagaatttacatggccggatcacccctcagccgattcgatcaatcatcatctttttcgaacactttgttgtacatcacagtgaatattgaggctatttaatctcagctttttgttgctctgatcagatctttaattccctctccgataactgcttggttttagatagtaatcatggcaattccgcttaacattagtgcggcatcgaattttttatattttacgaggtaaattaaaattaaaatgattttaattatacaacatatttttattataattttagcacggaatatcgacaagcatttcgagataaatttccaacgaaattttaaagtcatccaagtttctccacagcaaacctgaagctaattgaggaattaggggtagaaaactcgtaaaatcccgaaggaaggtccccatggcgtgatcaagcccagggatcagggctgaacgaaatttcgtttcgttttcggcactctttgagtttctttttcgttttcgtccgtcaaaatggtttcgtttcgtgtttcgttttcggttttcaaaatttctttttcgtttcgtgtttccttttcgtatcgaatgggctttttcgtttcgttttcgtaaccaaaaattttttttttgtgattttcgcaca

SEQ ID NO: 41608 - DNA, 874 bp, Heterodera glycines
ctagagccaaatttatacttgatgaaattcaggggatgcgttaaagtccagggacgcgtattctgcgctagaaccgaaaaatcaatattaaaaaaacataaatttattaattaagagccattatttggttatttctccaattttgatttttctgttccgaatatttcggctcaatttgccatgaggcgaacaacaactcaacaccaatgatcgccaacagcacaaaacagtagcaacagaaggaaggtggtaaaaatgaaaagcgacgaatgcccggcgatcaaaaaattgaaaattttaattttgtcaaatgacattttttattcttgttggttttatttgttggagtgagaatttaaagaattgcagctcagaaataattcaaattgaagaatgtaatgggataaaataaatgaaaaataaaattttaaaatttaatgaataaacaaatcttttaaaaaagcaaccggcggcggatgggaaaccaattaattaaatgtatacacaaattgaaacatatgattagacaattaaattcaattaggttggctaatcacaaattatgattgatttgcaaaaaaaaaaaaattgttacaatgtttggaccaaaaacaactgctgaatgacatgcatattgtaaaataatgtgactcataaagatcataaagatatgcgaactattaaaaagaagaattggaaaactttttatgcttcttaaagggtcatccgggagccggaaaatccgacactagcggtaaatccgacactagcggtaaatccgacactagcggtaaatccgacactagcggtaaatccgacaccggtggaaaatccgacactggaaaacccgacaccacaatgaattttaaaaata

SEQ ID NO: 41609 - DNA, 1114 bp, Heterodera glycines
cttcgatcagtttgcgcctctccaacagttggtccttggtcatgctttcgcggatgcggacagtgtggagaccattcaacgcttgcacctttccgcgcatgcggatgacgtgccacgctgcgtgtttgctcgggaattccattttgagggggcgcggtcgaccatccattcgtttgccgacacggaagacaattggtgcctgatcgacgtccgtggcattcaaaatttcgtccacaacggcacggtcctcccgggctctctccgtcgctttgtccgatttgctttcgtgcacatttgtcacaacgacggttctcagtcgtcgttcctcttcgaccgcgtcgactgccgcagcctgtgaatgaattaggacggaggcggtgcttaaaagggagtgaagctgcttaataagcaacttggcgtagtcgggaatggagttgtctgagtcaatttttttggggatttgtagttggtcaaggtcggataaaaaattttttggggcagtgttgtcagaaggaggagaaaaatttgccattctctttgccatcgattaggagaggagatgacaatttttaaggaaatgacaaattttaatttttttttttttttgaaattgtgtatgtcctcaaaagtcgagtcctcaaatgtctggggtttttgataacttttaatttttgcacgaattttttattccttttaaaactataaaaaaaattaattaaagatttaactttatgaatcactttcgagctgctttctctgttctccactgattgttcctaaaaaaaccacgaaaatagttgctaaaaatttagggctgcatttttgaaaaaaatttaggtcgtttcttaggtgtttattttttgaaaaaaatttaggtcgtttcttaggggtgtatttttcgttttattgcatttttcatctaataaaaaatataaaaaaaaattaatataactattaaatatttaaatatgtgctttttagcaaatttttattcacatgcaaaaaaagttttgcgaaggcaaaaagaaaaaagggggcaaaaagggccattttggggcggggggtgggagcagctaaatttttatttttttgatatcattcgatagccctgtgt

SEQ ID NO: 41610 - DNA, 635 bp, Heterodera glycines
accacccacaacccattgttgctcggactgttgttttggtgcttttgtgtatgtcaccgtcctgcccccccccccaaaaaaattgccaaaaattcccgtccactcccactctctctaccctttgttttgtttgttcgcgcacgcgcatagctccccccccctcccctcccccctgagttcccatcgtgttttcacaaattatcatcataaatatgtgagggttggatggatgaatatcatcaaaattgtatctctgttctgtgagggtttcaaaaactgtcggcaaattgcattgtcaccggaatattattgttagaatttcgatttatgattttttgtaaaaaatagggctacagaattttcgctttaagtttaccgactgatcggtttaaattgattatttcctcattttgagacaaattatctttgatcagggcagttcaaattgtccaaattgaggtattcgaaatctttcattcagtgactaaaacaattagcgttaagagactcaatttaattcgccaattaattgaatattttatgcgacctaatcaaatattatttcattgtgtccctttaattgatcaattagttagatgatgttatcattatcatttgacaaacattaattacga

SEQ ID NO: 41611 - DNA, 1056 bp, Heterodera glycines
aaaaatatgtcgcaattaaaatctaaattttacttgctaatgttcggcccatatttttctgctcaaagattgaatcgttaaatttttccgctaatttttgcaacatttcggcatttattttttccaattgttcaatttttggaattgcgaccagcgaaatgtcaaattcgatgccatcaaattgaaagcggacaatcaaaagtgagtccgactcaattttgataagatttgttgtgcttttgtgctaaaattttggttttaattttattttaattacaaattgctcaattaattaaataattgattaatttaccgcgcaaatttggcaaaaaagtgaagaatttgcctcatccgtgcatttattttcctcacatttcgattttctgtcatctcccataaaatcgctgactttcagcttttcacccggcgttaagcacaccaaattaacatcggagccaattgtgtgcgaatggagcagaagggagcccgagatgagcagttgggcgaggccatttgactgaaaatgcaaaataaaattaaaataaatttttaaatttaaaaattttgaataattttctcgagaatttatgagttttttttgtatattttcccttttggtgtagagaaaaaatatgaatagatttttcaatttttgcatgatgttatcggtccccaaaatccttttgataattaaaaaatctctttttcggatttcctttaggaataattttaaaacaatttttttagttaaaatactgtttttaaataaattctaattggggtttttgtcatttaaaatacatcttcatatttttacagtttaatcatacccatttttcaactacggtaacaatttgctgtaaagctccttccatttttattcgatagaaattttgttgaacataaatatttttgaagacattcgacgtcaaataattttcaaactaaattaaaatatattttaattgctattttaaaaattcattaaattcactaacttcttttgctgcttcatttgccacaagcattggattcaaaatcgtaatttgttgtgag

SEQ ID NO: 41612 - DNA, 1030 bp, Heterodera glycines
  unsure (1)..(1030): unsure at all n locations
tcgactccgtttattaattatttaaaaaaancaatttgctttctcagtcaaacatttctgaagctcaatgtggacgcgtcaattaatggctacgatggtaaacaaatatgtgctcgatcattattgatggctgatcagtgatcataattttacacttttttaagaaaattttcttgttcgacaaccgtttccgctccttttacggtgccgaatgcgttcggtgaacggtgccgggcttttttcacgtaaacttttcttttatttatttcacatcccctcgttagcgaaaaattttcaataaattttaactgaggtggggggtgcgattttacggtgcaccccaaaactcagccgccgaaactcagccgaccgaaattcagccgaccgaaactcagccgagacataattcagccgtgaataaattttttaaaaattttcaaacttagaaatttttcaaaaaaaaatcttagaaaaatttttcttagaaaattctatgaaaaatagaacaaaactttggaggagaaacaaacaaaaaaaaacaacaacttacatatttttattggatttagtgacttttcgggtcacgatgtgccaaatgacttcgcccaaacaaatatgtaactttttttgtttaaaaatcaccttggccaatgcgagcacttcctcgctggagatgcccatttgtgccaatggagaaagacagagacgttccgccacagcgcggtctaacggatcagcactggacgcgtcgccaagacgagcatccaagacaaaatcggtgttcagccgtgacggtttggctttcgcagcaacaatcggcaaccgctgccccggtgacgaagttcaacaggcacaaattgtccaaaattgctgtcaaaaggaaggcaggcaccgtcggtggatgggtatgaatatggactcaaattttatgtaatgtaatttatgaaaaactcatgaaaattgagttttcccttcctattcactatttttgggaggagtgcgccttcctttaaaaattttagaaaatttt

SEQ ID NO: 41613 - DNA, 953 bp, Heterodera glycines
  unsure (1)..(953): unsure at all n locations
tgttttcaggggcagtccccccgaaccgatgcgcccagatttatgggggagaccgaatccttaaaaaaaaagaatagaaaaataaaaaaaaatagatttttgctccccataattgtttgagtaccccaaacggacacttgaaaaaatcgatttttttgttttcggggcagtccccccgaaccgatgcgcccagatttatggggagaccgaatccttcgggaatagcttccctatagtctgtactttaattctgcgttggatttttgctccccataattggttgagtaccccaaacggacacttgaaaaaatcgatttttttgttttcggggcagtccccccgaaccgatgcgcccagatttatggggagaccgaatccttcgggaatagcttccctatagcctgtactttaattctgcgttggatttttgctccccataattgtttgagtaccccaaacggacacttgaaaaaatcgatttttttgttttcggggcagtccccccgaaccgatgcgcccagatttatggggagaccgaatccttcgggaatagcttccctatagcctgtactttaattctgcgttggatttttgctccccataattgtttgagtaccccaaacggacacttgaaaaaatcgatttttttgttttcggggcagtccccccgaaccgatgcgcccagatttatggggagaccgaatccttaaaaaaaaagaatagaaaaataaaaaaaaaatagatttttgctccccataattgtttgagtaccccaaacggacacttgaaaaaatcgatttttttgttttcggggcagtccccccgaaccgatcngcccagatttatgtggagaccgaatccttccggaatagcttccctatagtctgtactttaattctgcgttggattttgctccccataatcgtttgagtacccaaacagacacttgaaaa

SEQ ID NO: 41614 - DNA, 1304 bp, Heterodera glycines
cattttcacattcatcttttgtgatcttgcataatttgtcgttaatgtttaggtgaaatgaatcgccaaattgatactaaaaggcaaaagtctaaaatcacgcatgaagggcacctttacactttcgataaagcaagtgcggacgggatgacaaaattttggagatgcgaattcaaggacatttgcaagggaagtatctggacgaatttggctgatcaattcatacgtttggcgactgctcataggtgccctgcgaacgcatcaagcgttgaggtgcagaaagtcaagacggcgataaaacggcgtgcgctcgccacatatgaaccgccagcagtgatccgttccgaggcacttcaaaatgtgccgtctccagcaggactttaggttacacagaatagttcaagacaggtactgttcaattaatgatatacaatacaacgaatgaattgttaagatcgtcaaaagggcacgacatgaagtaatgcaccacctgtggttcctaaaagtgttgaccaactgattgtaccgccggcataccgaacatataagcctattgacggtgatgaatagcagttcctattgggtgactctggtgtgtattacgaggccggaaacgaaaatccgcagaggtagttttttgaataaaattccactttcactacattttttcaagaattctgctgtttgggcgtgcatcttttgggcgatgggctgatcgcatgaaggagtgtttcggagacggcacattctcattggcaccgccaatgttctatcaaatttacacaattttggccaggtaatgttttttctcttgtgatttaacaaggcaaattatttcaaggcgtggtgcgtgggttattgttgtgtgccattgcctcctgacgtccaagtcgcaggcatcctacgaaaggatgtatgaacttctgcggcaagcgtggccgacattctcgccaacttcgtttaccattgactttgagacagcagcgcgaaacgcaactgttaattcgttccctggatgtgcaatcaatttttgcttcttccacttcgtgaggaatttgcaaaagaaaatcaaggagcgaagtctctggcaggtacaataaacattttctattctattttttaatattttcgagtttccagcgctattgcactgatacagtgtttgcagaaacagatggaacttggtcacagccaacaatcccaccaaaacagtggaacgtctacactcgcacattgaatggggaagcgaggacaaacaatcacgcagaggcagaacaccaccgtcttcaaggcgccttcaattg

SEQ ID NO: 41615 - DNA, 282 bp, Heterodera glycines
ctgtgggctttgttgcaatttaggtttaaacaaaatttttaaaaactttatagtaattgaaagttgcgtaaatccattttaatttatcttatatcagttaatgatatttatttgtttgacactgatgtctctgttcaggctgccgaagctcatttgaacatcagcagcttttcctcttcctccgtttcttccttttacgactctccgcccgcgacagcggcggttgccaatggcttacaacgcaattccaacaacggggccaacaacagtttctgagtgcta

SEQ ID NO: 41616 - DNA, 706 bp, Heterodera glycines
  unsure (1)..(706): unsure at all n locations
aattaagccattttccctttgatcggtacacaattagccgaaaaagagatagccattttctgaggcccgaaggaaaatttgagagggctaatttatatgtaatattcgaaagtgccaagctaattagcgattcaggcgcacattggggcctgaattaagccattttccctttgatcggtacaaaattggccgaaaaagagatagccattttttgaggccagaaggaaaatttgagagggctaatttatatgtaatattcgaaagtgccaagctaattagcgattcaggcgcacattggggcctgaattaagccattttccctttgatcggtacaaaattggccgaaaaagagatagccattttctgaggccagaaggaaaatttgagagggctaatttatatgtaatattcgaaggtgccaagctaattagcgattcaggcgcacattggggcctgaattaagccattttccctttgatcggtacaaaattggccgaaaaagagatagccattttttgaggccagaaggaaaatttgagagggctaatttatatgtaatattcgaaagtgccaagctaattagcgattcaggcgcacattggggcctgaattaagccattttccctttgatcggtacaaaattggccgaaaaagagatagctattttctgaggcccgaaggnaaaattgagagggctaatttatat

SEQ ID NO: 41617 - DNA, 1029 bp, Heterodera glycines
  unsure (1)..(1029): unsure at all n locations
tcttttctttgtgccggacggcgcggcattcattgtttcaataagcgtctaaatgtccgtttatatttaagtgaantaccttttaatataagganaanntatttgtatggagaattgtntttaaaaagttttattcaaaaatccaaataatttttattatttatttataatttccaccaattttaattttgttgtcatatttcaagcttttcatttaaatatttttacaaattgatattatctttgaaatatgatgctttaccttactatttgtgagcattaaatggtcttcggccatttcgggccattccaagcagacatggacagttttgaagcatcggtcaataatttaaaaaatgaataattaaaattataaatttaattagcttgtgctagaatatattttctatcattttgtcagatgcgtgccgtcaccgtcggtggcattgtgctgatcggcgtattactctgctgcctgatcatctgcttagtgaccatggtcgcctcgctgacattcagttgctggtggacacttggtaagacgaactattcataaagtttatatctgcaaaattcaaaaaatcagaggtgtgcgaattcaaatttttaataccctaggaattttttagccctttttcaaattttgttcaaaaatgacaattttcacgattttttagtcaatttttttacaaattattgagttttggagtctgtatgatgcccatagacgctgttgtgagaactgtaactcgagattttttctttattaataaaaaaataaaactaaaatttactcatattcctcaattttccccaaaaaactctaaatagggaccgcctcggcttaaaagggtgggggaatcaatttttaggttttttggccataacttttttgtaaagtgactaaagtttttaaaattatatagataaaatttagtagactaatagagaaccttcagatctattgaatgataccaaaattatttaatttgattgataatgagaaaagttattagcaacggcgccgaa

SEQ ID NO: 41618 - DNA, 898 bp, Heterodera glycines
tactgaagtgtcgattttcgctgggactcagttgtcctagtgcttagatggcatcggaatttataccgtgttttttagacttggctcatcaagatctttcgaatgataccaaatttgtccgagtttggccgtttcaaaaggtcaggagccccccttttcactcaaattttcgagttttaaaccgattaaaaaaccggttttttggcatttccgcaactggagacctactttttcgtgcatagctcctcgagatgaatcgattggtatatcatttatgccttttttccggggggttgatagtatatccgaaaatttttaaaattttttttttgaaaaaggtacaccatctaaactattacccttctttctctccctccgatcatctctatccttctcatatgagcatttctctcgctctttcttctcacccttcccctctctctctaatcagtgatcactcaccttctatctctcactctgattatcccttccgttctctctctaaattcctcctctttccccgacttgcctccgcttcctctccctcttctgctggtccttctctctccgtctgtcccttttctctgtctctcggaatgtctctctctctacgatcgctttttcgccctcccccacaacaacagcagcaacacttccaattgttctgctgctgctcgttgcgttgtctttcctcttccctccccatttttccccagtgtccgttaaaatcggccgaaatgttttgcattttccgtctcgacaggtcgtccatacagtcctccttttccaattcaattttctcacttccgtttctaatttctcacctcaaagtcctgcagttctcccaattcttccgttggcattgcatttctgtcgaatatttccaaataattcccaa

SEQ ID NO: 41619 - DNA, 983 bp, Heterodera glycines
  unsure (1)..(983): unsure at all n locations
agcaaagcactaacagggtgtttgactcacttcaaaaaataattcaataccaaaagtttttacaacaatttattgcctatctaatttcttgcagattgaaagccatccattgcctgccggttctcggcacagcaaagcactaatagggtgtttgacttacttcaaaaaataattccatacacaaaagttttttacaaccacttattgctaatctaatttcttgcagatttaaagccatccattgcctgccggttctcggcacagcaaagcactaatagggtgtttgactcacttcaaaaaataattccttacccaaaagttttttacaaccacttattgccaatctaatttcttgcagattgaaagccatccattgcctgccgatgctcggcacagcaaagcactaatagggtgtttgactcacttcaaaaaataattccttacacaaaagttttttacaaccacttattgccaatctaatttcttgcagatttaaagccatccattgcctgccggttctcggcacagcaaagcactaatagggtgtttgactcacttcaaaaaataattcaataccaaaagttttttacaacaatttattgcctatctaatttcttgcagattgaaagccatccattgcctgccggttctcggcacagcaaagcactaatagggtgtttgactcacttcaaaaaataattccttacacaaaagttttttacaaccacttattgccaatctaatttcttgcagatttaaagccatccattgcctgccggttctcggcacagcaaagcactaatagggtgtttgactcacttcaaaaaataattcaataccaaaagttttttacaacaatttattgcctatctaatttcttgcagattgaaagccatccattgcctgccggttctcggcacagcaaagcactaantaggggtgttgactcacttcaaaaataattccatacacaannagttttt

SEQ ID NO: 41620 - DNA, 939 bp, Heterodera glycines
  unsure (1)..(939): unsure at all n locations
gtcggtnnggaaaatggctccatactaaagaatagatatctcagaaaaatggctatctctttttcctacaccttcaacatgaggtttccccgaaaacgcattactatatacggttgagccctacaaatggtcggttggaaaatggctccataactaagaatagatattctcagaaaaatggctatctcttttgcctacagccttcaacatgaggttttccccgaaaacgcattactatatacggttgagccctacaaatggtcggttggaaaatggctccataactaagaatagatattctcagaaaaatggctatctcttttttctacaaccttcaacatgaggttttccccgaaaacgcattactatatacggttgagccctacaaatggtcggttggaaaatggctccataactaagaatagatattctcagaaaaatggctatctcttttgcctacagccttcaacatgaggttttccccgaaaacgcattactatatacggttgagccctacaaatggtcggttggaaaatggctccataactaagaatagatattctcagaaaaatggctatctcttttttctacaaccttcaacatgaggttttccccgaaaacgcattactatatacggttgagccctacaaatggtcggttggaaaatggctccataactaagaatagatattctcagaaaaatggctatctcttttgcctacagccttcaacatgaggttttccccgaaaacgcattactatatacggttgagccctacaaatggtcggttggaaaatggctccataactaagaatagatattctcagaaaaatggctatctcttttttctacagccttcaacatgaggttttccccgaaaacgcctattactatatacaggtgagccctacaaatggtcggttggaaaatggctccat

SEQ ID NO: 41621 - DNA, 978 bp, Heterodera glycines
aagaagcacttgagatgaccgagtttattgagtgctgtatttataattggcattatttaaatccaaaacaggcaaaagaaattgactgggtgatcccggcccgattttgtacgggtcgttatgacagcaaaaagatccgtcatagaattgaagtccaactgggcgaggagagcaaagaggagcgtcttgaagctggcgaatcgcagaccaaatggccaaacgcatatgtgatcccgtcaaaaggtgggtcccaaaatggttatgaattctgaaatgggtcggtcgtcattcgcatttcagatggacacaaagtccgaataatcgacgcgccgggaattggtgacacaaaaggcgtcaacgaagacaaaatcaactttgacaagacgctcaacttcatcagcacattgcctgaacttcacgccgtttgcattctgttgcgtcccaacaccactcgcgcaacgcccgcaatcacatattgcattaagggactgctcacgtacttgcacaaaaatgcagccaaagtactgtactcatcttctataatggataacacggattataacacacctttttagaacattgtttttgtgttcaccaacgcacgcgggtccaattatgacatgggcaagttttatgcttgaaaatgttttcgctttctgtaaaggtaatagagagcatgtgaagggctttcgattgatcacaacaatgtttgatttggatgccaaagtaaaaagctatcgggcaagctgacggttcagttgaaaaattttaaaaaaatacatagatattttgttaaatccatggccagatgtaatcagctatcaaaacaaacaccattctgtgtctcgtggccagggaccttgaaaaccaactccaagatatgattttttagtttagcggggggggggggggtagcaaaacacggaagtaccaaagcaggatttatatgacattaaattttcaggaaagactgatatc

SEQ ID NO: 41622 - DNA, 1203 bp, Heterodera glycines
  unsure (1)..(1203): unsure at all n locations
aaaattgggagagattatatcgattttagtgcgctaggttcgataaaactttttaaaatataagcctaactttttgggcctgtttaaaaaggaattaaaaatttttaaaaatttnattcatctcccttttgatagaaaaagcatcagagagccttatttaacttttaattaacatttggtgcgtttcagagcagtttctgaaaaaatatttatgaattgattttgctaaaaaaataaaatagtgaagctttaaaaattaataaaaaattttaaattcagaattactggagttagcatcatagcagtgcttttccttgtctttttgatgctctcgcaaaatctggttcgcttctgaccagtttataaaaaaaaagttaagcctaaaatttttcgcatatttaaaaagcaattaaaaatttttagattttttattcatctccctttttgatagtgaaagcatctgagtgcctaaaataacttgcaaataaaatttggtgcgtttcagagcagtttctgaaaaaaatatttatgaattaattatgcaaaaaataccataaataatgaactctcttccttaataattttcatgcaccgaggtactcactcggccgcttcgcggcctcgtggtgggccttcgccccccctccgcccttcaaaattttgaaaaaaaaataaaataataggagactcagaattttgaaaattttttataaaaactgatgacaagctaatgtgataaaacaggttaattcttttcctttcagtatccctgcaaagtttggggcgcttctgataagtttctgaaaaaaaagataagcctaaactttttggcctgtttaaaaaggaattaaaaattttaaaatttattcatctccctttttgatagaaaaagcatcagagtgcctaaactagcatgtaaataaaatttggtgcgtttcagagcattttctgaaaaaaatatttatgaattaattatgcaaaaataaataaaaatttctaaaaatttgatcgtccataaataatttgtaattgatcaggggctcaccaaattatgcaggaatacgtatcggaacactacaaatgcttactaattttcctagattttttaaacccggtgaaaattttttgcacgacaccaccacttttgcacttaaaaaaattttcaaaaaactttaaaaattcatagaaaatttaaaattcata

SEQ ID NO: 41623 - DNA, 973 bp, Heterodera glycines
  unsure (1)..(973): unsure at all n locations
atttttagaaattctatccgtcaaatcggcttttggacttttaatgagtaaatcagtaaccgtaaatgacattctatgcttctcttgttggatacacgggaagaaataatagttagtccttttgttgaatttttagaaattctatccgtccaatcggcttttggaattttaatgagtaaatcaggaaccgtaaatgaaattctctgcttctcttgttggatacacgggaagaaataattgttagtccttttgttgaatttttagaaattctatccgtcatatcggcttttggaattttaatgagtaaatcagtaaccgtaaatgacattctatgcttctcttgttggatacacgggaagaaataatagttagtccttttgttgaatttttagaaattctatccgtcaaatcggcttttggaattttaatgagtaaatcagtaaccgtaaatgacattctatgcttctcttgttggatacacgggaagaaataatagttagtccttttgttgaatttttagaaattctatccgtccaatcggcttttggaattttaatgagtaaatcaggaaccgtaaatgacattctatgcttctcttgttggatacacgggaagaaataatagttagtccttttgttgaatttttagaaattttatccgtcaaatcggcttttggaattttaatgagtaaatcagtaaccgtaaatgacattctatgcttctcttgttggatacacgggaagaaataattgttagtccttttgttgaatttttagaaattctatccgtccaatcggcttttggaattntaatgagtaaatcaggaaccgtaaatgacattctatgcttctcttgttggatacacgggaagagataatagttagtccttttgttgaattttagaaatttatccgtcaaatcggcttttggattgttatgagtaatcagtaaccgtaatgacatctatgcttct

SEQ ID NO: 41624 - DNA, 769 bp, Heterodera glycines
aattagggttgcatccccgacgtcggggttggaaaattcggggttgtcggggttggaagtgtcggggttcggggtcggggttgccaaattgttcggggttcggggtcggggtttttcaatttttgccttatgccaaatagtcaaaaattttttaatattttttcggaaataatatttattaatttccataataatatttgtattgtttttatatttttttatttcttttttatcagaaattttgtatagaattaatttttttttcttgaaattttaaaattttttattacctttttgttttccaaaacatcttttttcacgtcgctcttttctaaagacttaaggagaaagggtacggcgtccggcggtgccgataggcgccgccgggaaaattttgaaaatttggttagatctgttaacagattttgtccaaaatatgctaaatttttgcgattttgagccaatttttttaataaggtttatgactttttgggccctgtgatgccgataggcagcgctaaattttggaattaagctctattttctaagatttttcaccaaaaaaatttatgaatttcggtaaatttttgtttttcttcgatatgtattttgtcaaaatatgccaagattggtcgatttctatgagtatttaattaaaaaaacaatttgtcacaaagaaaataattaaagaagaaaacatcaaacggtatcgaactcacgacagaaggtaatgtcaatggcactaacctctacaccgcattccaaattc

SEQ ID NO: 41625 - DNA, 1024 bp, Heterodera glycines
tttatgcttccaaataagtctattaatattgaacgctctttgttgcattaaaaaatggggtgtgccttcaaaacaggaaaataccaagataaggaagagcataatgataaagataatggtaataattaggaagaggataatgataaggataataagagataaaatgataataaaaaattaatgataagggtaaggaaaaggatgaggacaatgataaaggataaggaagagaattaggattagataggatgataagcactcaaaacattaattaaataaaccaaaaatgattaattatttgattcagaaaaaatgataaaaattatacggaataacttttaaaaaagaaatccaaaattaatttataaatcgtagaagaaaatataaaatgagcaaaggaagctaaaattttattcaaaaataccaaaaataaataaacatatccataacgaatgaacccacacgagaagtgaatgagaccgagagagttcattcggcgcaggaaaaatactatacaataaaaataatggaattgcttttaatatataactaaaaaatgtagtcttaatattgtagtgaaaattcgatcaatcatatttcaagcagattgagcagaagcgttctaacatttgcagggatactcatgggtaaaggtctatcctacaaagaaaggagcgtcgagtctagctggcgcaagaaaatgtttgatagtccgagtaattagtgagtattgaatgacagcaaaactaattccaaaatattttgtaagaaagggttctgacacgcaacagaagttagttgcaggttagtttagacagtatgattctgatgatatcaaaaagcgagatgaatataatgataaagaagtgtcaaacaattgaaaacagaacaatatgtattagaattataattaaaatttcagtatttttatacagaagggctgccatcgttagagcgattcagaaaggcagagaaatatcatgtaataaatggtatataatcaggtcacatatataatcattat

SEQ ID NO: 41626 - DNA, 1189 bp, Heterodera glycines
  unsure (1)..(1189): unsure at all n locations
aaattttaggcattttcgatctgaattggattggcacggtgcacancggcattccgcttgaccagctgacatttcgacttaatcccggcacatccgagtgcccctatttggcatggatgggccgaatggcaccggaaaagggcgtggacattgccattgaatttgcgctttggtccggcattaaattgaaaattgcggcacaattggtggacgagcacaagcattcatattggcacaagcaaattgagccgttgatcaatgctaatcaacatttggttgaatatgttggcgaaattggcggtgacgaaagagagtgcgtttgccattattttcaatacattttaatttatgatttttaattaaaaaagaaataataattacataaacaaatatatttttagcagttttttgggcaatgctttggcatttttgttcacgccaaaatgggacgagccgttcggattgtccatgattgaggccatggccaccggaacgccggcgattgcaaatcggcgcggtgccgtgccggaagtcggtttttatattattcataaaataatttattctttgaaattaccgtaagattaagcaaaacccaagagatatactaatatttaaaaagttccattattaggtaattaataatgcacttgtcactgtaattactggtatttagcgaccgttaaatttatcacaatcacagattgtgcaaattggccgcaacggttatacttttgactacaaagatcggcttggtgttgaacaggtggccaactttgtgcatttgatcaaccaagcggccaaattggaccgtgccacggtccgacaaactgtcgaagaaaaatggtcattggacaaaatggcagaaaattatgagaaagtctatcgccgcatgttgaacaaaaatttcatagcaaactgttatgatcattagtagtttagtaaatattatatgaattatatatattacaggatgatgaacacaattaattgacttggaatttatgaaattaattttagacagttgaaaatttcgaatattttttcaggctaatggctaattttttgctattttctattttaattanatttattattanacttattnatgtaacggtcatcatccctgntgcatataattagcataatatgtctagtgaacattcgtatatgccctaaactttgaatt

SEQ ID NO: 41627 - DNA, 726 bp, Heterodera glycines
taatttaaatttaattaaattttttaataaatcatttttcccatgttaattcactagcttccaccggaaatctgggacttttttttcaaaaattgcattccattgcgcatttcgcatgagtcactctgacttttgcagcgatatccccccccccatgttttccatccattaaagcatgaaatcgaaaatccgcattaatattcacgactcattgagtaacggcacaaaaaataaagaatccttgaaccaaaattccaataatagtagagaaaaaaacagtttagttgctgcagcagcgtcaaaatctgatcacaacagtgaaagtgattttatgtgtatgtcattcatgtgcagcacattattcattactgttaattgctttcaccctcttttcattccaccccaattccattttttgttgggaaggggggcagggggagatgtatcgccaaattaatcaaagcagataagtttctgatcagatcttccccccttcattcactttttttgtagtcaccccacatcaatcgtttcttctttcgatgaaagcgaagtattggggaaaaaaagccatctgatttatggaatggaaatcggcatgcgtcagggggggggatgaccttgggacggggcgtcgaggggagagagagacaaatctccgatcggcgtgcgcaatgattcttcccccccccctccccgcttccccgtcgggcgttttgtttcatt

SEQ ID NO: 41628 - DNA, 1019 bp, Heterodera glycines
  unsure (1)..(1019): unsure at all n locations
ctgatgatcaatcatcattttaaatatctgcgtcattatttaatataatatgcaaattatatgaagtgaaaaatagatttggataatcctactgatgatcaatcatcattttaaataactgcatcattatttaaaataatatgcaaattatgtgaagtaaaaaatagatttggataatcctactgatgatcaatcatcattttaaatatctgcgtcattatttaatataatatgcaaattatgtgaagtgaaaaatagatttggataatcctactgatgatcatcaatcatcattttaaataattgcatcataatttaataataatatgcaaattaaatgaggtaaaaaatagatttggataatcctactgatgatcaatcatcattttaaatatctgcgtcattatttaatataatatgcaaattatgtgaagtgaaaaatagatttggataatcctactgatgatcaatcatcattttaaatatctgcgtcattatttaatataatatgcaaattatatgaagtgaaaaatagatttggataatcctactgatgatcatcaattatcattttaaataattgcatcataatttaataataatattcaaattaaatgaggtaaaaaatagatttggataatcctactgatgatcaatcatcattttaaatatctgcgtcattatttaatataatatgcaaattatgtgaagtgaaaaatagatttggataatcctactgatgatcaatcatcattttaaatatctgcatcattatttaatataatatgcaaattatatgaagtgaaaaatagatttggataatcctactgatgatcatcaatcatcattttanatatctgcatcataatttaataataatatgcaaattatatgaagtaaaaatagatttggataatcctactgatgatcaatcatcattttaaatatctgcgtcattatttaaaatatatgcaaattatatgaagtaaaaaatagatttggataatcctactgatgat

SEQ ID NO: 41629 - DNA, 872 bp, Heterodera glycines
  unsure (1)..(872): unsure at all n locations
cggctccgggttccgatctttaaaaaanggangcctggnncgngagcagcgaccctgcctttcataggaatttgaatgtaattttttactttttgttttgtttatttattgcatattttataatttttatgccgataaattctgtatattttcagatgagttaatatattcatttaaaatattttctattcgaaaaatttccctactttacttagtctttttttttaatattttcttatgtatctaaaactgacccttttcgcccttcacggtacaattttcgccatattcaactttttttgctgctccaagtgacccacatcatcattaattaatgtgattgcttcttccttaacggcggctaattttgcccatttgccattcgattgttgacgattggcaccataattctgatcataagcctctgctggttccgttttaatccgtcgttttttgtccatgcgctttttgttgtatggcattttggtgcttttcgatggcatttttttgtgccgcttctccatgctggtggacgggaaccaaaatttgttgacacacaattcatcaaataaatcggttggaacggcagaagcagaaggaaatggatttagtgcaaaacataatattattacttattattagcatttttggctttatctgctcacattaaaatttttttttgtaattattgagaagagaaatgcaaaaatttttaatcgcacaattatttttaactttttttagtttcattaggtgcttatttttcgattttttaatgcctaaaagtcctgctgctaagttgcagacccgagactgaagtggcaaatacccttgggactgaaccgtccaacaggtaaaaacgcatgaatggt

SEQ ID NO: 41630 - DNA, 1098 bp, Heterodera glycines
ttgcaaaattgtataccatctagttaaatttaatacctcatttatatttatggcaatttgacattaattatttaatttttatttttcaaaaatttggcgcaaattacataaagttaaatttatttatttaattaaataaattcgtaaacttcctttttttaaaaaaaaaagactttcataacattttcccccttaatatggacatagataatttacatagaagcttcaagccaagataaaatatatttttgtccgtttaagacagtccatgaaaaaaaatggaatttcattataattttacgccccagtcaaaacttttccaagattttttcgtgcctggttttctgagttgccgctcgtaacagcagagaccaacttggattgtagtcccattcatcagcagagtcaacaaacacgggattggcaccaacattgaggacggcatttgagacagcaacaaatgttatggacggcatcaaaacatcggcacccgctccaatgttagctgagcgtaatgctaacaccaacgaggtgaagccgttgcagcacggaacggcaacctgaaaaattttggaaaagtgccaaaattcgggccctcaaaattgggacggcccaaaccaattatcataaaaccaaagaaccttcattctttgtagttttacttacaggaaaatcgtagatggcgcatagttttgctgccagctgttttggccatgtgccagccgatgagatttgtttgctcattaatgcgtcattgacattttggatggcacccggcggaatgtacggctcgacaacccggatgatttgtgagttgtgcgcacaaatatgcggttcaggttcgggaagaaagtgggctaatcgcggtggaagtttggaccgtaattgcaatgaatgccgaaaaagtgccggaggtgtaccatatgatggatagcatactgtgttgaatgggttaacatactgtaaattaattttttaatttaatataaagtttattaaaatttaatagagttagttcctcatattgcaaaaatcttgaacctagctttctgggccttaacaatagtttcatggataaaaattcaataaaatgaagac

SEQ ID NO: 41631 - DNA, 943 bp, Heterodera glycines
  unsure (1)..(943): unsure at all n locations
ccatatgaaatnncgggcggagaatgggagaaaaaattgtcctttttttgagattttgagctaatttttacgaaaacaaatgatttttagggtccggcggtgccgttaggcactgccgtggtaaatttttaaaatctgtgtgacattgcaccacaaaattacaaatttctgaagaattttaagaaatcaacaaaattggatcactccctccaaatcaggacatttctgataaatcagaacagatccgcaccagggctgggcgaaacttcggcttcgaacttcgtgcttcggctattttacccgaagtttctggaaaaacacacccctaaagattgagtttaattggcttttgataaacttaaagttaatatatgtttattaactttttgctttctgttccttattcacatacatggtcaaggggtatcttggttcttttcagtattcttcctttagatcaattccccaagtagttgtttttcttctaattttttanaattattccttttttcaacggaaattcaatacaaatttaacaattaaaatcgcaaaatgtttttatttttggactanatctgttaacaaaacgcactaaaaatttcaaaattttcccaggcggcgcctatcggcaccgctggaccctaaaaatcctctaaaaatagctcnaagtcgcaaaattggtaattttttgctgtaaatttgttaacaaattgcactcaaattaaaaaaaattttcccggcagcgcttattggcaccgccggcaccctaatttccatttcattttttaattgagtcaaaaaccgtgaatactctaagaattaaaaaaattttcaaatacattgatcaaaaaagtcaatgtattattttattaaaaaggttgggtgatctctaacccgtctggttattgtataaaatttgatatttaaaccgaaattttgggat

SEQ ID NO: 41632 - DNA, 941 bp, Heterodera glycines
  unsure (1)..(941): unsure at all n locations
cctttgctaattgttcctctgattttgctcacttttctctcctccgatgtccattcttcgtttgttgtcccaattgaaccaggtgaatgactgactgacttctcattataggatgtttcttgtttcgtacctcatgtttttgaggcattttgaatttcctttacttatttttaatttacattcattttttattaatttaaatttaattatttatacctaaatttcctatcataaaaataataaatattaaaatattttttcctttttacataatacttacctaaaaatctacaaatcgtataattttaaatcgatgcaaaatctacgaaaatggtctttttggacaaaatctattaacaaatctcacaattaattttcaaaattttactcgacggcgcttatcggcaccgccgtccctctccatccaccagataattttggaaaacatttaaaatcaaaataattttaatttatgaatctattgtaaaaaaacaattgtgattgatttagaatattttttattgattaaatattgagttgaatttccattttatggggcctgattgaagaaaattttggtccgagtttaaaaattttcttaactaattttcagtaaaaaatttagtgtttcgttcgtgttttaagcgcctttcgtgtctcataattgatttttaatttttgcaacatctctgttatgtatttatttatttgttcacagcttcgcatttgtttggacacccaaaaacactgaaaattgaaaaaaaaggaaattatttcggtgaaaaatagaaagaattcaacctccttattgtgagatatgaaaaaactcatcctcacaatcagccgagtttgtctccctcatttgtcagctgactcttcctagnncgagaatcaatctttttcatacattttcaccaggaggaatatttaaaaaattaaat

SEQ ID NO: 41633 - DNA, 808 bp, Heterodera glycines
attcaaagcaattagtgattcactaggataatccagctattgtaattgaaaatgggagaacatttgatcctatccaaatctcaaatgcacacataaaattcatttgaaaaatatgaaaatttggatattatttcgcaaccctttccctctaacagttaaagaatccgacagaatgtgtcgtttttagaaatttatatttagttttatttgcaacaaaatttggttcgatgtttttgagttcttcggcccgggaccagagcgtttgggcccccgtttttgggcccccgcgtttgggcccccgtttttgggccccggggtcgtttgggcccccgtttttgggccccggggtcgtttgggccccaacccaaaaatagaaaaatgtgcttttttaaaaattaagattctaaaaactaagcctgagggatccctcgccacttggcataagttaggtttaattacattcgctcattttttacttattccaaatcctattattttttaatagttaaccaatttgatgtacattctgatttggacatttttcagaaatggctaacccaattgcaaccaaaaaacaaaaagtaaaattgactctaatgcactttatgagtccaatcaattgacaatccatggtttttatacaataactttttccatgttcgaacaaaccctatctttttggtatcattcgaaagcacaaagtctgaataatgtaataatacgagaaaacaagagaattctaacatttcaagaaagttacaaacgaaaatagtcagcaattacttaattaatcaaatcttttgtggta

SEQ ID NO: 41634 - DNA, 1206 bp, Heterodera glycines
aaaagctacaaatcaaaaactgatgaacaaaaatttgatattgttcaacgctttattgaaatgacaaatgaatataagcaaaagagaaaatattcaaaaaaagaatgggagaaaaattatgccgaaatttgtaagaaaattggagtcagccgagacataattaacaaatggaagaaacaatttggaattcgctgtaaaataacggagaacgaaaaaatggaaaaaatgaaaatttattggcaaataaaaagtgaaaatccaaaaatgactgacaaagaaattgcaaaaattgtgaacacttctcaacagaatattttcaattggaagaaacaatttggagaagaaatttaaagtattaaaaacagaaaatgagaaaagggatcaataaatatttcgatagaaaattgaccaattcttttattttataaaattattatcttggctaattgaattatttaaatttatttaaataaatttctaattatttgcctgttttatactgttgttgcaaataatcaaagaaaaacccaaaaagcgcatttatttctattttattaagaattttcaaaaatctttataaatcttaaaaatggagtaattaataaaatatgcaattagcctcgttaaatattatttagtcaattttaaattttcacaattttatgaggttttttagattcattttttggcagttttaagggcattttttgtataactaactatctacatccaaatgaataaaatgtttttttgtatgaatgaattgtttttttttggaatgaaataacgacattcagtcattttttggaaaaaatttattcttaaaatccgaaacatgaattttcgattggtatcattggcataaattcgataatactcttttgaaaaagtgacaaaaaaaattatattgcttagaaaaaatgccggcaccgtaaaaatgttataatttattatcttgaatgcttggaatgtactaatttttcgccactatttgcgataatttcggcattttttgccgctttttaattaataaatttgggattttttgccgcttaaaatttgcatccgattgattatgactactctcaaataaggattaaaataaaaattttgtgatttgtagtttgttttaatttaaaaaaatccaatttattaatatgaaaatcatttcacgaataaataaatgcccattcattcataaaatta

SEQ ID NO: 41635 - DNA, 921 bp, Heterodera glycines
agatatgaattttcaaattttaacccaaattgtcctcctccttaaagggagtgctaaatatttacgaattttggggaaattctatcatttccaaaacttaaaatagacatcatatctcgtgctcagcaccccaaaataccccagaaaaaaattttacacccacacttttcaacccaaaaaaaaattccgaaaatttctagggggcctagctcgaaaatttttgaaattttccaaacatcgtagtacaccattcgatagagtttcgaaagctctacaattttgctctaaggtcatttttggctaaaaacaactcctgacgagttatgggcccgggactcaaatgtcccgctcaggccaaaaaatttttctatttccgggaaaaaatcgaaatttttctgaaaaaaataccagtcgatagagctcgaaaaactatgttttggaagtggtcttcgtttttctgggaaaattcgttaaaaaatcctaaaattcaaaaaccaaaaaaccgttttttaggcctagctcgaaaaattttgaaaattttcgaaattttaaaatctggaaaaatcgagctctccgagctctacaataagtctgctggccaccctgcgctcaggtcaaagcctaatgagttattcaacggggactgaactggaaaaagttggtactgaaaagttgccaatttctgcagcccttccaagtataggtagaggcctggaattttttttgaaaattagaaaacacttcaacttaaaatcctcccagcaagaattttccgctccctgtcctttaaaaaaagttacgggccttcaaacgcaagcaaaagtgagaaattagccgccgggactcagttggccaccggagcggaaaacctatagttttcccagatgcgccttaaaaagttgtaagacccttccactactt

SEQ ID NO: 41636 - DNA, 1809 bp, Heterodera glycines
tgtatgagactataaattcgcaattatttaaaatataaaaaaaagtttcccgtatcgtacaatgcgttaaactaatgtttagtcgaatttattgtaaagtacgtgcgcgaaaagagaacctaaagtcgcaagcgcgacaaaaaccttggatcagcaccgcgaaacatcatggccaggtcagagctgaactcgcggatgaggaacttctcaacatgccatcaacctctactgctcagcgcgctatttcaagacaacgaacaataccaggaaggattgcagttgaccaagaagcagtggacgcaattgtcttggatgtaatagtagtgctgtttgagatttaaaattctttttaaagggtgattttgtcgtcgatttggcgggattacggtttcttctgcatgattcgaggcaaaatgaacctgatttacctgtgtttattgtatttgctaacgatgcaggcattcggaggctaagaatgtatagacattgggcgctcgacggcacatttaagggttaaattaaaaaccattaattactcttattttcaacttaagtcgttccaagtaatatgctgcagttatatactgtaaatgtctttgttgacaaagcttctatcccttgtgtttatgcattaatgcaaaataaacagcaaagcacatacgcaagattgtttacttcgatcaggcaacatgttaatgacgtgattccattgtccgttatggcagactttgaaattggcatgttattaaaagggcttcctttttagacacgaaaatcgcaaaataggcattttaaaagtgatcttagacatccaaaaaaagtagaaattgggttttcgtgcttatctttgcgtataaaatgaacaaatttttggcatttgcctaaaaaagaagccccgttattaattagaaaaatattttgattgtattttggtttaggtgccagaaatgcgtttagacaagtttttggtgcagcagtgccttataagcactgcttgttccatttgggacagagcaccaatagaaaaattctaaatgatggatatgggcaaatttatggacaaaatgaagagttcagaaaagcagtcagatcgttgacagctttggcttttttacaaatagatgaagtgatcgatgcgtacccaattttgagggcaaatgcaccccaggccgcactcccgatttttgactattttcagacgttatgtttttataatgcaaattctaaatttataaattacagtacatatatttttcgagagattgatggagaacgtgcaacacctttattctcacattatgattggaatatgcacgattcgactattgaaaatttgcatagaacaaataatgctatggaaggatggcatcacgcgtttcggttgagatttagaggactgcaccccccactctctaagtaattggtttaaaaaatttttaaaattttataaaaaagattgattactgcattgaaagtggaggagcagtatcagcaaaatcgattgaaaaaatatattgaaaatgaccaagccataaaagaattaattcaacggtatgacaatctcgaagaaagaaatgatgaaatattattgcgacatttaaatgctcttcagtatcgtctcgccaatgctggcgccggcaagggcagagatgtctgaaagggggggggaaatttgggaaaaagaaaaaatgttacagaacaaatgccataaattttatggcgtacggccttttatagtcggacaaattgtttaatgtaaggtcggataaactgcagtttagccgcctttcaataggaaaagcacgttgc

SEQ ID NO: 41637 - DNA, 1286 bp, Heterodera glycines
aattgttgggatgccttcttaaaaaataatttcttatataattttctttaaaagaattgcattcagtcctcgctaaatatccgattttgctgaacaaaaattcgtctgacattttttatttcgaaattttggtcacaaaaatcaaaaacgaacgcaagtaagaggagaattttgaattttaactatttaattaaaagtgaaaaatttttaaagattttatgttatttaattcttcgctttcagtttggtcagcttcggattcgccgtcaaacagcaggcaagattggatgatggaattctgcttgaaaagggcacttatgcatatggaagtgctggttggatttggattaacggaggagtaaaagaagccgaatattcctacggtgttggcgatactgtaggaattggcgttaattcggccactcgacagatcattttcacgaagaatggacttcgtttggataggaaaataaataaaatgtaaataattttttaatataattttttatattttaacttaacaattgtgtgttccttttacagattccttcgattttttcgttgctccaacttatgaaaatgtttatttttatccgttcgtttctttgtggaattctgatgacaaaattgaggcgaactttgggcccgacaatttcaaattctatttggcaactctctgaggaataagaatattcgttaaactgatcaatgatcatttgtttcgattttatcttttctattaggcttttcttctacaattataaatttctttttcattttattcaattaatgggaaaattgattgtttttcaggtgtaaaattatgtcaacatgatcaatttttctctataacattttgtgtttttcttaaatcaaaagaaataaacaattttaaaaaataatttaatcatttttatcacttttagatgcttctttcaattaaaaaacaaaaaagataaagaaaagtcttaggcaactgataattttcaattttatcccttcttttgatgaatattttccccctttttgcgtgattttctcattaattttatggaatttctcaacaatttctctatttttcctcttctttttcattttgttcatttcctttttcttccaaattttctccaaatattcgtcaactgttttttgtttcaaatttttcttttctgttccaatttcaatttgcataattaaaaatgcaattatatggaaaataggcacaatttcattatccttaagttaaagaattaattcgaagtaaattttttgaggatattcatgct

SEQ ID NO: 41638 - DNA, 1642 bp, Heterodera glycines
  unsure (1)..(1642): unsure at all n locations
cggattctaggggtccgtgtcgtgtttttgaattgcaggatttttttttaaactcgtgtgccgcgcttttggattttcgacactgccgtgcccaccttggccttgcactcgcgcaactccaaccgcttctcgcgcgcgctttggctcaaatgatgatgaccatggtggttgtgccgtttttgttgttgcggaccgcttccggcaccgccggcaccatttgacgaggaggacacggacgtggcgggcgaccgctgttccgcgcccgcaaattgttgttgctgttgctgttcaagttgctgcttttcgtcctcactgatcgtctccaactcgggcggtggacgattttggtgtgagaagccgccaccattagccgccacggaatgttgcgcgggttgcccattagcaaccgaagccgccgccatttggccgccagaacatgccgtgccgctggcgggaacaccagcgccagcaacagcggcagcagttgtggtcaatggcgccgcataggttgtggaagtgccgggcaaagcatggtgatggtgttggtggtgccgttgttgggaagcggtgccattggagaatgaaggggaggaaccgccccccttggcaatgttgccgagggcactaaaatttggaaaaattccacaaaattttcgggtaatgggtttttaaaaccatttgttgaaaaaaaaatcagggaatttcgtaagaacttctaaaatttccatcccacgaggaaaaccctaatgatttttaaaagctttggatttaaaaattctgagaatttcgtaagaaaatttgaaaatttaaaaactataagaatgcaatttaaaaaagtttctttggaaaacgaatgtccccactggcactataatccatgaaaaataaatcaaatgtacgaattcctatgaatgtccttgaaaagtatttgcttttccgaacgccatgttgcgaaaaaatttcaacctttccanaatatttgttaatttttttaaagttttggcacggcttacagcagtgcgcactgcttcttctccgtctcgcgcctgatgatgtccgccaatttgttcttcacatcggcagcggtctcctccgactcgcattggatccatgccttggaaaaaaatagttagatcaccatcatatatttattgattttcactgatcagaaatgtttgccttatcaatcagaatgtgatcattgatcatctgagtttccgactgattggagataatcagtgaaccaatgatcaaagaatgtgccgatcagtgatcagctgagagatgaagatgactgattacaatcaaaattcagttaaaagatcattgatcagttaactaaccaaggaatgtagtcaattgaacaacaaactggtctaagaatttgacaatgatcagaaaatgatcaaagaatacgctttgaatgattattgaagataagataagttgtttgttgaacggttagtgatcaaagataattaattgaatgatcaacttttcaactaaaccggtcattgaacattcaactcaaataactaaagaagacgcttcattaattaattaagcanctgaaaaattcaaaaacgaaattcaattagtcctgctacaaacacaaagaaatgtggacctgcagnnngcatgc

SEQ ID NO: 41639 - DNA, 989 bp, Heterodera glycines
  unsure (1)..(989): unsure at all n locations
ttgaanagcatctgtattcagcctctttaaatcttaattttctgaaacccgaatntagaaaatatgaatttatttctgcgacgccttctatacttaattcatccataatgggccaaaaatcataggttaagaccaaaagagggattttagtttcagccggaatttctataaaaatgttcgtgtgtaacctatctttgtctattcggataagtaagaaattgaaatattcgtattacttttcctcccttaaagctttataatgaaagcgtcgttgtctatttaggatttgccgtcgcaattctgtaattccactttggaatccaaaggaatttgattcgcttttacaaaatagacagtgccgaaatttgtagatcggctaaaccttaactgaaacataccatatcagcgagacgccatgctgatttgttgtaatcataataaaaaggcccctattgtttaattctgcctttcctataagcacaatgtgtttgatgggctctacaaaatattgctagtgcaaagcaattattttcttggaggctgtaattttctgtagtcatttgatatgcatctgctatttttctagtcacaaacaccaatatttttcggcccgaattttataggcgtgaaaagtactgatttccaacttctttctattcggatacacccaaaatttgaaaagcatctgtaatttagcctcttttaaatcttaattttctgaaacccgaatttagaaaatatgaatgtatttctgcgacgccttctatacttaattcatccataatgggccaaaaatcataggttaagaccaaaagagggattttagtttcagccggaatttctataaaaatgttcgtgtgtaacctatctttgtctatgcggataagtaagaaattgaaatattcgtattacttttcctcccttaaagctttataatgaaagcgtcttgtggagttaggatttgccgtcgcaattctgtaattccactt

SEQ ID NO: 41640 - DNA, 471 bp, Heterodera glycines
gctgcacgcgctcctcccgcccattgtcgcccccgctcttcccctgcggttgtcccatggtttgaaacaattccacgaattgaccaattccgccaaatgaatttgtttctcccccgggcatcggttgctgcgcctgcatttgttgtgggatgaaagacgggtgctgctgctggtgttgtcccttttggccaagaaaaggttggaagaaagaaagaaagccttgctgggactgaaattgcatttgccaatgacacggagagacaaaaagcggcaaataattaccaaagttgaggcgaattgcacgagaaaaagcgaaatggcaaataatggcgatgagatcaaacgcttattagcatggaaaagcagaggaaaattgcaccagagatacattccgataaaacggctcatcatttttggcaaaacggacgaaggaccattctaaagtgggggggttgaatattatttcacctt

SEQ ID NO: 41641 - DNA, 1792 bp, Heterodera glycines
  unsure (1)..(1792): unsure at all n locations
ttttctttttcaagtattcatttcttctcctttcttccaaattgactatcactcatacgtgacggtcctgcaacgccaatatctgaattcagtgatgcctggctagcaacattcacatcagtcaaacatcttgctcgtttagcataattatgttcagacaaaacatcatctatatcatgttcaaaaatctcggtttcatcttcaataactaaaacatttccattctccaaaaactgttcatttccatctctaatactaagatttttctgaaaaacatggtccaaattcattgctcggataatatggcgtttttaaaatctgtattaaaaaacaaagttaattaacaacacaatattaaaacatataggtaaatttgcaaattgaacaaatgagaaaaaaaataaagataaaaatttattaaatgaaattaattgatgaaatgaaaattcaaccgaccttttcattgtaaaacttcttttacatattattaaacacaattaatgtagaaaaattcatttcaatacaaatacttttcacatagtaataaatcagcattattaatttttactttttttaattacttaactgagaaacaaaaaaaacattaatataaacatttttaataaaaatttacatatatgtataaaccaacctcataacgatatttaaatccacttcgtaataagtaactcctcttgttaatacacacaataaattgcgataaatccatccagttgaacgaaatgtacaatcgaataattgacatccgctttaattacaaacaaacaaaatttccatttcaaagttcaaaacaaattctcgaatcaaaactttttcaatgcaatatcaaacacaataacatttccattgagcttgccataatcaaaaacaaataatactaacataaatttattcataactaatcaaatcaattttaattcaataaaaaggaattcatttacaaaaacattttctttttctttacaaaagtgttaagagcattcatttccaaacgctttttgataataacaaaaacaaaaactttttctcttaagaaatgcaatagaaagcattaattgcgatttcattatcattaataaacatacaaaaactattttgtcattaaaaacgaaaaaaagagaaatttattttaactgtgctttttgcaaaaactgacaaaacaaaaatgaaaaaaagcaaaaccaaacatttcatttttcaaatacatttttaacgcaaaacaattacaaaacgccacacaaattcaaacactggacacacacaacagacactcaactttattatataagatggcagttataattatagagcgtagaatttttagtcctcattatctaattacatgccacatttaagcattttttgtttattctatatttcgtcatttggtgcatttttcgtacatattataatttatactattagccattaattatgcaatgagactatgtttaattaattcaaatatgcattttttatagtattcaattacctggttaaataaattgagtgctttaaatttatttcttgtaatttttctgttttcttaaaagatatttcttctgataatcttaaccgttatgttttatttcaaaatttgttttattaattanagtaaaataaaaaaatatattaaatatgggcgataaagattctaattattttcngcataaagaggttttgacattgataattttattaataattaaattntgattaatttattatagaaaaaagcttaaatttttttattcaataaagcgagtttttt

SEQ ID NO: 41642 - DNA, 1420 bp, Heterodera glycines
  unsure (1)..(1420): unsure at all n locations
gttttattgacaagtagtccaggcattttaactttaaaggtatcaggcaccgatnncgcgaggagaggcacctttaaaagcccagaccagggcagaggaacgcaagcnaaaaacgaagagaggaacagaaaagcggagacgccgaacggaaagagcaacacaacgcaaaacggagacaaggaacggcccaaagccgaggangaaccagaagaacacaagaagacaaancccacacaacagccagaaacgacgccgcagcagaacggacaaanggcagcagacccacagaaaggccgcggacgaaaaacacaaaacgggaaccgaagaacggaaaagcaacaaaaaggaaaagaaaccgacaaagncaaggcagaaacgcccggacgcgcgacgacgacccaccggcaacgggagcagncaaaggcacccgcaccgccncagaaacgggncacggaaagggaggaagaaancgagcangccaacgaggcgatcgctcgaaatgtcagcacaagatcaggcagttaaccaacgagacggaacctaattatgagagaatgaataaaacgcatagcacatagcatgtattagaaatgaaaaatttcgttgttttagagaaatagttcttttaaaaatttttcatataaagatttcaatagtgaaaaaattttctagcttttttaaagattttttgttgaaaaatttcaaaatatagtttcgagggggataaaacgacgtggggaaaacgatggggccaaatgatcacgtcggaatttggacgtcgtcgagtcgaaaagacaagtcggagattggagaggcaaagttggaaattgtcgtatgccttggccaccaatgaacgcaatctctgatcggttatctgcaaatattatcattttcttaaattgaatgatgccccaaacaattccctgacatgttcgtatgcttttgtggacggctcgtccaaagtgttcagtttcaattgcccaagttcggcgattaatgtcgtttttgttccaatttagcggacagttgagaaaaacgcagttccatcacatcgtccaacttcaacatgagtgttttcaggttcaatttgaacaggttttccacaaaatgtttcggatagtccgtcggtggtatattttcctgataaaattttgccaaattatacatttaaattgccattttcactctcacttggtagtcaatggcgtcaaagaggcgctccttctcctgaggggtcaattccttctccaattttttgaaaatttgtgcgtcttccggcgccgccgcttcttgaacacgtccacccagcccatcctctgcctcctgacaaccgaataaaagattttcagagcagaaaagcagtaatatgcgactagttttagttttaacctctcggtagtccctcgtgcgcgtcgtctca

SEQ ID NO: 41643 - DNA, 1216 bp, Heterodera glycines
  unsure (1)..(1216): unsure at all n locations
ccggtatttttggaaaatacgggatttgcaagattttttgggaattttcaggggctaatcccttgtattttttgacgaaatctgctaagaattatcgccattccgtccncaaccagaaattttttgaaagaggcgtgatgagaaattaaatggataaagaagaaaaaaggttaacctagaagaaatgttattaaaaatcttttatgaaacttcatagcttttacctcttttgtacttattttagcaaaaaccttgacaaaattggtcatgtttattattattattttgaagaatttttagttgaaatcgatattttttcaaatttaaataagctcacaatcccgcgctgattcccgcaaatttaacttcgggacttgcgggattatccagtgggatctcgtactgcaaaaagttttgatttacaatcccgcgcgggattcgtaaatttgaattttctatctctattcccaattttcctcttacccattctttaataatttttgtcaattcgccaattatttgtccttttttgcgcatttcttcttcagataaatatccattcgtagtcaaacaatttttaatctgcaaaaattattaaaattcggcaaaagttttaaaaaatggctaaatctgctaataaaaatggtttataaattctcaatttttcacatttcggtttttgtgagaataatttccctaagaattatgcgattatttactatcattgataatacaatacatataattgtaattattcacctcgattatttgttccgatttttctttcaaattttcctcaaaatttatttcttgccaattttttgcaacttcgtccggcaatgtccatttttcagaatccacgaaacttttcctcactttttcatccacatatttgtttagttcatttctgtatttattaaacaaatgctcatctaaatggttattttaattgcttcaaataaccaaaaaattacctatttgtatttgttcatttaattttttgaataaaattaaatatttttccaatttttcaattgataaaataattttttcttcattatcttctttcaaaaggtttgccattatcattttctttanatttttgttncaatttgtccaaaaattcccgttttcaaaaaatgccatcgncaatttgcgcaagtgcaactgaagccgaacttgnngcattcatcgtttatttccattttaaatttgc

SEQ ID NO: 41644 - DNA, 1433 bp, Heterodera glycines
cataaaattccgagataaccgctggacactatttagcgtttaaaacttaaataaaacggcatatttaaagatattataaatgaaagtattttattaatcttacatcgcaacatcttttatagaaataaaacaaaataacagaataaaattctaaagattacattaatatctttaatgaaaaggataaaaacttaattgatatttcaaatattccaaataaaaattcaaataaaacagtttttaataaaaattatataaagtaaaaaagaaaattaataaataaataaaagtgtgaaatttataagattttattatgaaacgtaatttgataagctaaacattttaaatgcatgtttgaagcaattgttctgtataaaaaacatagaacaaattgtgggaaattttatacatttctcgaataaaatattttttaattaatttaaaatatattaataatgaactaaatattttaatgaaaaaactttaaaatattatcaaaaaaagatatatacaaaaaaagattataaaattctcataataaaatgcaagccaaagactctgtcatacttgaaaccacgaaaagcaataaaataatttttctataaaattttgtatttgagtaaaaaccagttcaaaattacacattttgataatatacacttaaaattgaaattataaaacttgaaataattataaaaaatgggaatatgatttgaaataaaacaatctgttagaaaaatgtaaataaaaataatgtatttaaatgtttatatatcccattgatatgtgccatttaaaaggtaatctatgaaaaattaactcaacttcaataaaaaaaagctaaattaataatttaaaaaatgctttaataattaaaagctataaaacattaaactataataaatcatgcgaagattcacaaatcagtgtccttttaaaaaaaatttactttttcaatcttaatcgttaaacctggtggtatttctgtgatataaaattttgaacaaacttttgacggatttacaaaatttattattaaattaattatgagagaaattaataaatattataaataagtaaattattattattgttttacgaaaattaggaaaaaatagcgaatgaagaataaataaatttaataaatatttaaaagttgaaacaacaaattaacaaaaaattcatttgaacaacgaaataattagcaatattaaattaagcacccactgtcttactgttaagaattaattcgaaaaaaatcattcgggagatttcttaaaagaatgagaagatggaaagataccgccactgtcgtcaataaaccagtgaggaactcataaatgtgattaataaatacaaaaagtgtgataattaatatatttaatagaaaaaaatttaagaaaaacaaaaaaatttattaataacaattaaac

SEQ ID NO: 41645 - DNA, 1259 bp, Heterodera glycines
aggacaaattgacaacaaatttaataaattatttaactcgttttacataatagtgaagttaaggggaaaattagaccaattttctagctcattaattatgtgtaaaattcattgaaaattaaattatgctaattattaatttggaaattataggaattgaaaacaattaattaggaaaatatggaattagtggtaaattgacaaaacataaataaattaattcattacttaattataccaatttaatagataataattgtgtgaaattcaacaaaaaattataattttgccgattcttaattaggaattataggaattgatattaaattaattagggatatatgaaataagtgagaaaatagacaaaacattaattaattatttaatttgatgaatttgaatagtaaattaattatctgtgaaattcagggagaataaatttgccaatttttaattaggaatattatgagttagtgagaaattgacaaaacaataagtatttaattaattatacacaaactattaatgggagagaataattttttagattatttgtatatatacaaataaataataaatgtgtttacaaaaaaaaagcatttcttctccacctccctcctctttcttcatcattatcagcgtcattgatcagtgatcaaaaagtgatcagcgcaaatgcgccaaatgtgcgcagaccaatcgaaaaatgttgcttcgggcaaaattgtatatatttttttgatcgctggaggcaattagtccgcattccatcctcaaaaaaataatagcaataaagtcagccattttaacgaaaaaaaataatttaaaattaataaaaaatgtatgcaatgccagtggtagatttgctaataagtgtattaattaaaggaaattttgataaatttccatatttagaaattttaatgaaattaaaattgaaaatttacaaaatatgacaaatatttacaatgtttaaaattggatttgtacgcttttctttgagatcaaagcgaatgacgccgatataatcgtcagataaggcattggcacttggcattttctcccctaaaataaccaaaaaaaatttaaaaaaaaaatgcgaaaaaatattccgacggaattactttttgaaattatcggtgcaattccattcgacagaaaatgggctcaaatccatgtgtcccaagtgtttaaccattttctgttcaatcgtatgggctcgtggcttagtcaaatcaaaaatttggtgagtgtttaaa

SEQ ID NO: 41646 - DNA, 721 bp, Heterodera glycines
ggcaaagctgtagtacaaattattggaacaagtttattacgatcttaggtcaccggcaagttacgctggtattcaaaaagtgctggcggaagcccagaggcgaaatccgagcattactcttcgtgatgttgacaaatttttgcataaacagcgcacctacacgctatttaaacctcgcaaaaaccgcttccgcaggctaaaaactgtgcccagtggactacacacggactggcaatgcgatttgtgcattatggacgcactgaaagagcataatgatggatttcgttacatccttgtgtgcatagatgtgctaagccggaagattttcactgcagaggctgagtccaaaaaaagtgagcacatgattgcggcatttgagaagattttcaaaaaggcaggtgtgttgcccaataagctgtacagcgacgctgggcttgagtttcaggcaaagaaaatgatggactactggaaacaaaaagagatcatcaagcacgtgatgtacagcccacatttgcatgctggagttgtggaacgcgcaaaccgtacgctgaaggagcgactttacaaatattttagtgaaaaaaacacaaagcgatgggttgatgtgctggacagcattgtgcgtaacctgaacagctccgcgaaccgaacaaccggactaaggccaacggacgttaacattaaaaatgcctctgctctacggaatcgcctatataagcaa

SEQ ID NO: 41647 - DNA, 1151 bp, Heterodera glycines
  unsure (1)..(1151): unsure at all n locations
aattcgaatactntttggttatanagggtacaaaataacttgtgacatttagaatcaataaaaaattattagttttcgtattttggtagaaaacaacagtttagacgagttataacctaataaaaatttacttttttctgagacgcaaattgcttagcattcgattagaaaaaaattctcctttgcaaaaatttttttagatattaaatttgtccggtttggttggaactaagcgagttatggctgataaaaaaataataaaaaaggcatttaacagtgtaaaatttaaattagcgcgcaaaaaattaagccaattgcgctatttggcgttatgagcaattttgtctaacactgggatgacccatagtgctccaatcacttttcactcaatctctctctgttttctcctccaacttactatctctccctctcactttgactcactatacctctctcatgcgctctttccctcactctctttgtctttctgcctctctcacgcttttgtttctctcgctctttatctctctctctctcttttttggcattctctttttcacgctatctctctgattcactcttttcctctctttctctatcttctctctttctttcccttttatctctctctctctgctctctgtctctctctctgttatctctccctctccctatctcttcctctcactttgtctcactctacctctctcatgctactttccctcactctctctgtcatctctctctcccgtcgctctttctctccatcttcctctctatatttctttctctctctcacctctctttctctctgctctctctctctcccaacctgtcactctctctctctctctttctctctctgctcactttctcttctctctctttgtctctttctttccctctcccttctctctttttctcgctctctgttttctctctctcccttctctctatctgccctctctctctcccatcctctcactttctctctctctttcttcgctctacctcactgcttatctctttntctctctcttctctttcccattctctcacctctctcgcagctctctctctgctctctctcattatctctngaaccggnttaatcttagaatgcctttaacccaataatttttttagtttac

SEQ ID NO: 41648 - DNA, 1042 bp, Heterodera glycines
  unsure (1)..(1042): unsure at all n locations
agagaggagagtaagagtgaagtgagacagaggagatcaataaagagggagngaggagagagagggggagggaaaanaactttcaaagaaagggacaaaaaagagacaaaaaaggaangaaaaaagngcgggcgactgaccngcacaagantaatttcggcaacccaagcacggaaaagaagaaanaaccgcaaaaagaaaaaagaaaaaaaagcactgacgtaagcacggttagggggaaaaaggcgaaagtgacgaggccttcctaaagaaaggaaagcgaaattaaaacacagaaaaaatacccaaatttcgatcactccgggcgaaaagaaggccaaaatcatatacatccaaatgtaagcaaaaacggacctaaaaagggaaaaaaagggggaaggggataagtgccgatgggaaagagaaggacaaaagacaataagttaattgattaccatgtggcagtcacgaaaaacacgtccaaatgcttttgacggcgaatttcggtgggcggcacagcagaaacgcaaatggcgatgatcatgaacagattgaaggcggcggagccgacgattgtattcggctgagttgggggggggggcaatggcattttgaggggggggggggcaaaaagaaagaaaatacccccaagtcgccggcttcgaagccctaaaagtgagcacggatcaacaaaagtgacgatcactaattcaaaattacctttccgaccacttcgattatggacaaaagaatttcgggggcggaagagccttaaaatttggcaaatcattttttggccaatcggtcgcttaccaagtgccatcagtgtgaggttggacaccttaacaattggcaattgacaaacagataccgtaacaccctttctctgctgcccttaccgtatcgttccaaattcgaactttgaccttttgatcaggcaatccgagccgtttgatcaccacagttcgttccatcgaagtgatctgaaatcaattcgaaattatcagaaacaaacgcatcgaatcaatcgtaccacttcgat

SEQ ID NO: 41649 - DNA, 880 bp, Heterodera glycines
aggcaaataatttttatttcacgggtatttttcagaaaataccaattaaataatgacatcacagatagacacaagtttgtaataaatttaaacatacagaattttttggaataaaatggctttaaataggcaaataatttttatttcacgggtatttttcagaattaaataatgacatcacagaaagacacaagtttgtaataaatttaaacattcagaattttttggaataaaatggctttaaataggcaaataatttttatttcacgggtatttttcggaattaaataatgacatcacagaaagacacaagtttgtaataaatttaaacatacagaattttttggaataaaatggctttaaataggcaaataatttttatttcacgggtatttttcagaattaaataatgacatcacagaaagacacaagtttgtaataaatttaaacattcagaattttttggaataaaatggctttaaataggcaaataatttttatttcacgggtatttttcagaaaataccaattaaataatgacatcacagatagacacaagtttgtaataaatttaaacattcaaattttttggaataaaatggctttaaataggcaaataatttttatttcacgggtatttttcagaattaaataatgacatcacagaaagacacaagtttgtaataaatttaaacattcagaattttttggaataaaatggctttaaataggcaaataatttttatttcacgggtatttttcagaaaataccaattaaataatgacatcacagatagacacaagtttgtaataaatttaaacatacaaattttttggaataaaatggctttaaataaggcaataatttttatttcacggg

SEQ ID NO: 41650 - DNA, 704 bp, Heterodera glycines
ctttatatgtgcgagggatttttgctccccatatttgtttgagtaccccaaacagacactcgaaaaaatatctttttttttgttttcggcacagtccccgagatccgatgcgcacagatttatggggagaccgaatccttcgggaatagattccctatatactgtactttaattgtgcgttggatttttgctccccataattgtttgagtaccccaaacggacacttgaaaaaatcgatttttttgttttcggggcagtccccccgaaccgatgcgcccagatttatggggagaccgaatccttcgggaatagcttccctatagcctgtactttaattctgcgttggatttttgctccccataattgtttgagtaccccaaacggacacttgaaaaaatcgatttttttgttttcggggcagtccccccgaaccgatgcgcccagatttatggggagaccgaatccttcgggaatagcttccctatagcctgtactttaattctgcgttggatttttgctccccataaatgtttgagtaccccaaacggacacttgaaaaaatcgatttttttgttttcggggcagtccccccgaaccgatgcgcccagatttatggggagaccgaatccttccggaatagcttccctatagcctgtacgttaattctgcgttggatttttgctcccccataattgtttgagga

SEQ ID NO: 41651 - DNA, 614 bp, Heterodera glycines
gttaacaaaaatgcaataacttcctaaaatacacccctaagaatcgaccgaaaatttttaaaatcacaccactaagaattggaaattttcttaaaatatttgaatatttatgtgcatattttggtcatttttcgtgcatatttttgcagccctgcctatgacaaatacttcgcacagtttagcagttacaaattttcctaattttatccaacgattcttttgaaaattaatgaaaatataaacatgagttttggtgacaaactctaattttggtattaaaaaagtttgttgattaaaagtgaaaataaaaacaattgggtttattgcttaattatggccaatttggacaacttcgacaatgatacggtaattaattggtaaaatattatttaattttacaatatattttcagttttatttggccttcaaagatgccaatcccagctggtctctgattggatgcgcactgatttatggaatcattacaacatttggaatcatcttcatttttctgtgatttttatcccagtcaaacaaagtataaaatgatgaattattatttgatcgaaattataattttatagtttttagatctctcaatggctccgccaatt

SEQ ID NO: 41652 - DNA, 1461 bp, Heterodera glycines
  unsure (1)..(1461): unsure at all n locations
caggaaaatgcatttatgattttagcctatgnattaaaattattttatacatatgtaataatttggattatattgtataattttgcaatattttttctgcgcattgccatgaagaaaagggctcaaaattagcatttctatgttaatttttttttgtttgagttggtgaaggtttttagtgcatcgtcgccgcccaccactgttcggaccagcagagttgttgcgaattgaaaaataaaatgcaaaaaatgaaatacgaaaaaaattaaaataaaatacgaaacacaaacgaaaaacgaaacgcgaaaggcaaaacacaaaatttgtttttgaaaaattctaaaattttagaataattctaaaatataatcaataaagaaatattcgagatcaattattttcatattttttaatcaaattccataaaatttagaagttgatattattgttattattgttttttacttttaaagttctcctaacatttccttaatcaaggtgtgatctgctaacaaattttatatttttttgccgcataatttttcctaaatttttgtggagtaggaccgaaaggtcatacttttttgaaactagccaaattttttgcaattaaaaaacgaaatgcgaaactcaatatctctcctgaccccactcaagcccagcagaaggacaatattttcagtattgtcggccgccaagcacttaacaggccggcgttccccgacacacctttttggcgatttgttctgcccaaaaatatcggcccattttatggtcttccaattaactttttttcactgcaacaataattgggcatgtgttaaatgtaacaaaaaaagagaagctgaatatttacatttaaaaatgaatttttcatatgcaaaacgaataaagcgaattattaaattaatctttaataaataataaataaatttataatacgtaatttttatttataaatttccttgacttttcttatgctgaaagtcaatcggattacttttaaccaaatgaaaaagaagaacattcgggctttaaatatgtaaaaaaaatgagcaaaaatagagcggaaattgcgagtaaattgggcattagccgacgcaatatttaccaatggaagaaggaatttggtaaaacaaaatttttttatttaagcggaaaaaaagatatacgaagcaacaaaaactgagaaaaaaaagaactttccaaaaaaattcagcataagaacggtcgagaaaattgaagctaaaatcacgcgaaagattggcctggcattgtccacaatttatctttggatgagacaattcggcgtatttacacgtacaattaacaaaaatattcaaatattaaattcattattacaaatttaaggaagatgaccantcactcgcaaatcagcagatgctgagaaatttgaatntgtaaaatggttaacaaatgaaaagcaaagccatgagcgat

SEQ ID NO: 41653 - DNA, 954 bp, Heterodera glycines
cgtccgctttttctcatccaaattcgtctctctttcctttcaaaggtttttcctccttaaattcgtctcgctttcgtccgtcggcttttctctcacacaaattcgtctccctcctcccccatcgcttccccaatttcgtccgtctccgtctctctccgttgttttttctctttttcgccaatgttttgcccatcgtccaaaagaaggggcgactttgccgaaagcagtgacctgtcgagacgaaggtgaaaatggccaaacgctcaaagaagcgaatcactcgccttttttgtgccaaattcgaaggcatttgcggcatttctttgagctgaaagtgaacagattgactttttttttttttacaaattcggggaatgttcgtcggttcggcttttcctctctttggcacttttcctttcctttccttccctccaaattttaattgcctaacacttttccacatattctaattacttcccttaccgtatccccattaccgtacccttttgtgtccattccgttcacaggcgtaccccgtgccaacttctgtcccatttccgcgtcttctcactccgccgcccgtttgttctgcaccgctgcattccaacgtaattacggaatgtttggcactgttcgctctcagcggcaatttgggacagtccaaaagaagcgacgccgccgacccgcccgctgcgcatgggcacggcttccccgcgacggaggagggcctttggggcacgtcctttttcgctgtgggcggactcgtcaacagaaccccctccgaactgcttgagcaccgggcgaatgtcatccgctgcttgatttgaaggttttcgcccacgacactttgccttccgaatgcgcttccgcccattagaacggaacttccgcctgccgtggctatagaaaaacccgttggttcccgggtacgacccgttcgagttgcgtccaaca

SEQ ID NO: 41654 - DNA, 617 bp, Heterodera glycines
cgccgcgtacaccacctcaccacacccgaccagcactcccagcaaaatgccgagcaccaaagggaagttcttggtctgcgccttggccaccgcaacgagaactaaaaattaaaaaaataaatgcatgaaatgaaagagtatgagtataaagtcttaaaaaggggatggtaaaatgtctaacctcaatgacttaaaattaaaaaaacccaaaatttaaatccaaaatttggacataagcgcaagggcatggacacgatttgttgcaattttccttttttacctatgttaccccttcagactcctttccccaaatttcaaagaaaataatcacttttttgcaaaaacccagaaatagtgaaaaattttgtgtttttatgatatttgttaacccaacaaataaccaaatacgcctatttaattttttaaaagaaaatttctttttttttagaattcaacaagaccagaaaaagtttttaaattatatgtacctggcgcggacgatggtggtggctccatcggtggccacggttgtggtggtggcggtggcggcgtccatggtgaatgtttttgcgtccttcgtattcgggcatttgtgctcaaagattttttttctttaa

SEQ ID NO: 41655 - DNA, 1253 bp, Heterodera glycines
  unsure (1)..(1253): unsure at all n locations
ctgcannggtctttgaaaaaaaaataaaataatnaggagactcagaatctttaaaagtttttataaaaactgatgacaagntaatgtgacataacaggnnaattcttttcctttnagtatncctgcaaagtttggggcgcttctgataagtttctgaaaaattagttaagcctaaactttttggcctgtttaaaaaggaattaaaaatttttaaaaatttattcatctccctttttgatagaaaaagcatcagagtgcctaaactagcatgtaaataaaatttggtgcgtttcagagcattttctgaaaaaaatatttatgaattaattatgcaaaaataaataaaaatttctaaaaatttgatcgtccataaataatttgtaattgatcaggggctcaccaaattttgcagggatacgtatcggaacactacaaatgcttactaattttcctagattttttaaacccggtgaaaattttttgcagacaccaccacttttgcacttaaaaactaaactttttggcatgtttaaaaagcaattaaaaattttattcatctccctttttgatagtaaaagcatcagagagccttatttaacttgtacataaaatttgatgcgtttcagagcactttctgaaaaaatatttatgaattaatttttcaaaaaataaataaacagttaaaaactcagaatttctaaaaaaatttaaaaccaattacaattgtcattttttcaggttaagttagtcctgtaccggggagtatccctataaaatttggtacgattttattgattattgaaagagctagagccgaagaaaatctttttaatttaagcttaatctttttggcatgtttaaaaagcaattaaaaattttattcatctccctttttgatagtaaaagcatcagagagccttatttaccttgtacataaatttgatgcgtttcagagcactttgtgaaaaaatatctatgaattaattttgcaaaaaataatagtcagtgaaacactcagaatttctaaaaacctttaaaagttatttctcttcctttcagtatccctgcaaagtttggtgcgcttatgataagtttctgaaaaaaaagttaaccctaaactttttggcctgtttaaaaaggaattaaaaatttttaaaaattttattcatctccctttttgatagaaaaggcatcagagtgcctaaactagcatgtaaataaaaatgggtgcgtttcagagcagtttctgcaaa

SEQ ID NO: 41656 - DNA, 724 bp, Heterodera glycines
  unsure (1)..(724): unsure at all n locations
cgtaagagctgcggaaattgtgaattaattctcagaaaaatggctctctttttaggacaattttctatctcgtaaccccgatgctattccgttccggagagcctcttcaagtttttttcctttcccctggaagctgcgggctttgtgctttttttctcggccnggtggctttctctttttgggccttttttctctctcgtccccccgttgcttctccgttccggggagcctcttcnnttttttttccttcccctgggcgctgcgggttttgtgttttttttctcggnnnngtggctctctctttttgggccctttttctttctcgtccccccgttgcttctccgttccggggcgcctcttcnnttttttttcctttcccctgggcgctgcgggttttgtggtttttttctccggnntgtggctttctctttttgggccttttttctttctcgtccccccgttgcttctccgttccggggcgcctcttcnnttttttttccttcccctgggcgctgcgggttttgtgttttttttctcggnnnnttggctttctctttttgggccctttttctttctcgtncccccgatgcaagtccgttccggggcgcctcttcnnntttttttcctcccgatagagctgcggaaattgtgaattattctcagaaaaatggctntctctctttaaagaaattttctatctcgtaaccccgnatgctaatccgtt

SEQ ID NO: 41657 - DNA, 726 bp, Heterodera glycines
atagacctgccattgctattcctgcaaatattgagtctagtcagcccaatcgattgctattcgaatggtttggggtcgttggcccaaacaaaagttgtgctgcttcttgcaaagaagactaagccaactgtaaacagcaagccatccaaatgcttcaatgtaaaaaaaaattacatttggatgcaacctttatttttcctcgcctctcttttcgaaaagaaaagctattagcaagcgtgtttggaccaattctaaaacaaatcggggtaattaatttaatctgactttataagataaatgggaatttaagcgaaggattcatgcaaaataataatctatagaaattctctaaaaagtagttcctcgcagattcggggaccgtttctataaagctagagacatatgcgctaaccataaaaaagatgaatcattttttgaaaaatttatatagttcgactaaatttgaaaatcgatttatggtgtacaggatgtttgtcgaaacataactcgtcaggcctttaagatagacctgccattgctattcctgcaaatattgagtctagtcagcccaatcgattgctattcgaatggtttggggtcgttggcccaaacaaaagttgtgctgcttcttgcaaagaagactaaaccaactgtaaacagcaagccatcccaatgcttcaatgtaaaaaaaaaaattacatttgggatgcaacctttatttttcct

SEQ ID NO: 41658 - DNA, 1240 bp, Heterodera glycines
aaaaataattattgacaaaaaatggctatctctgaaagtcacgattaaatccccttccgtgaattggtcaccaactttgtcttttgttgtagcgctgaataaagcactaatagtgtgttttgaaaacgcacgaaaaatagttattgacaaaaaatggctatctctgaaagtcacgattaaatccctaccgtgaattggacaccaacttttgtcttctgttgtagcgctgaataaagcactaatagtgtgtttgaaaacgcacgaaaaatagttattgacaaaaaatggctatctctgaaagtcactattaaatccctaccgggaattggacacaacttttgtcttctgttgtagcgctgaataaaacactaatagtgtgtttgaaaacgcacgaaaaatagttcttgacaaaaaatggctatctctgaaagtcactattaaatccctaccgggaattggacaccaacttttgtcttctattgtagcgctgaataaagcactaatagtgtgtttgaaaacgcacgaaaaatagttcttgacaaaaaatggctatctctgaaagtcacgattaaatccctaccgggaattggacaccaacttttgtcttctattgtagcggtgaataaagcactaatagtgtgtttgaaaacgcacgaaaaatagttattgacaaaaaatcctatctctgaaagtcactattaaatccctaccgggaattggataccaacttttgtcttctgttgtagcgctgaataaagcactaatagtgtgtttgaaaccgcacgaaaaatagttattgacaaaaaatggctatctctgaaagtcactattaaatccctaccgggaattggacatcaacttttgtcttctattgtagcgctgaataaagcactaatagtgtgtttgaaaacgcacgaaaaatagttattgacaaaaaatggctatctctgaaagtcacgattaaatccctaccgtgaattggacacaacttttgtcttctgttgtaccgctgaataaagcactaatagtgtgtttgaaaacgcaccaaaaatagttattgacaaaaaatggccatctctgaaagtcctatttaaatccctacccggaattggacaccaacttttgtcttctattgtaaccctgaataaaagcctaataatgggtttgaaaaccccgaaaaataatttcttgaaaaaaatggctatctcttaaaagcctattaaatccctaccggaaattg

SEQ ID NO: 41659 - DNA, 1115 bp, Heterodera glycines
  unsure (1)..(1115): unsure at all n locations
aaaaannncggaaccaannnnnnaaacgaaacagggcacaaaaagagagggagggnagaagacgagagnaannnnnngnaagcancgcaccccancgaanannnccnnannncnnnnncanaacngnccaaaggngacggcggccanngacncnnnngnagnccnnaagggacngggacnnnccacagnaaaatgtggtacaaattttggaactgtcccgcctcacggtgggacttaaaagcaggataaagccaagttcgaaacttaaaaggagaatttaagttttgaatttttacaatttaatttcttagagtcaaaaaattcggaacagaagcattatttaaaatcaaaaataattttagtaaattttttacattttagtttcaaaaaaacaaacaaaaaaatgtgcccaattttgaaaatgaaatagtgcacaaaaagggagggatggttagacgaaaagagaactttttaggaagggacgcaccccatctgatattcacccttttctgttccataagaggccagaggcgactgggttcgttgacaagtaattgtccaattaaggtacatggacattccacagtgaaatgtggtacaaattttggaactgtcccgcctcacggtgggacttaaaagcaggataaagccaagttcgaaacttaaaaggagaatttaagttttgaatttttacaatttaatttcttagagtcaaaaaattcggaacagaagtattatttaaaatcaaaagtattttagtaaattttttacattttagtttcaaaaaaacaaacaaaaaaatgtgcccaattttgaaaatgaaatagtgcacaaaaagggagggatggttagacgaaaagagaactttttaggaagggacgcaccccatctgatattaacccttttctgttccataagaggccagaggcgacttggttcgttgacaagtaattgtccaattaaggtacttggacattccacagtgaaatgtggntacaattttgggactgtcccgcctcacgttgggacttaaaagcaggataaagcccagttcgaaacttaaaaggagatttaagttttggatttttacattttaatttctagagtcaaaaaat

SEQ ID NO: 41660 - DNA, 726 bp, Heterodera glycines
gatgcgctgatggggggaattgaggaaagggcttggggaagggagagggaactaaagatcgaatgccgagggaaggtggccactaccgctcggttggtgagttcgaaaacctatgtcccaccccccaaaaccaattcctgactccgaactttatttccttcgatggataaaggtataaaatggaataaaaatggagaaaagataaaatgaatggaaaatgaataatcataagtgtaaatcgttaaatatccgtttgaataggcggagccaagtgagagagagagagatataattaagtcgataaatggagagaatagagaaaaggagtaattgcgatttaaatagaatgataaatggataattgacgtaaatgaatatgccttacaataagcataatgccttttcaaaattattccgcccggttttttgtttaatgccgcttttttttgaacacaatcacttcgcgaaatgtggccacttttggccatttgatccactgttgactttgtcttttgcttttattctaaaaatagctaaaagactctttagccattgcttttgctggtttgtgagttggccaattacggagttaaattgcataattaatttatgcatttattcacataaaaaagcaaagaataatcaaaatcatttttggaaaatgagagaaaagcaactatgggtgatggaaaattcaaaatttgatcattttaattggttgtttaa

SEQ ID NO: 41661 - DNA, 871 bp, Heterodera glycines
caacagtataaataaatattaggcaaatgaaaaattcttttccttcctctttagaaactgtctaaaaatttttgttgcttatattcagaaaacgtgttttttttagtgacaatttttttcaagagaaggatatgaacaatcacttataaggctcatgcttggagataaaggaatcggaaaaaaaaattatctcaacaatcagtcgtgaaacagttcaataattcggaagcagtgccatattgggaaaagatgcacaagtagagtaggctcgaaataaaggcaactgccgaagattaacaaaaattcaaatttattggccccattctgctttgacaggccatatctcgccagggagtggcggtagaccctttgttgatacatttgacaatgtagagcgcgtctagctcattcgaataacatcaaactggtttgtttttgtcacgaaacaacccgctgatggccacgtcgaagaaaagtcccaaaatttgacatccataaaactccattttttcataggccagcgtgtttaaagcaaacccgaaactgataggaaatttaaattgatcataatagaagtttaatttttatttgtcccatgcattttctgggaaatcttttcgcgaaaagttgaaaaatttcaaaacggcagacaacagatgcatttcaaacaattcaacaatataatataaaatttaggcaaaaatttttgttccttcctctttggaaatggtcttaagtttaatttttatttgtcccatgcattttctgggaaatcttttcgcgaaaagttgaaaaatttcaaaacggcagacaacagatgcatttcaaacaattcaacaatataatataaaatttaggcaaaaatttttgt

SEQ ID NO: 41662 - DNA, 878 bp, Heterodera glycines
ccccccccccccaccatcacaaaaatgaccactcacatggacataatgaaggggtgggaacaattttgtaaatgtgtagaggagatgtttgtagcaaaataaaacgaaaaaaacaatggattttgaatggaatttttaaattttaattttaaagtatttttttaatgagtttctctacttgagaaagaaggcagaccttgtctgattctgttaaatttttatgaaatttatgggaaaaaaagatatctcaaagattgaggtttttgtttaattagtttctaagacttttttgttttagagaaatttttattatttttttcgactttttatggggtgttactccccgaaccgaaacccaaaaaaagtaaaagttttcaataattttttttttgaaattttaagcaattttcttgacaaaattgcattcaaatactcaaaaatttttccggcggcgccttcggcaccgtcgacccctattttaccatatttttgaaaaatggagaccaaaatggcaaaaataaaagtattttttggcgaaaaatggctaaaaattttgtaaaaaacctaattcgggatttcaaaaaaactacacacctaaaaatctaatgaaaaaaagaaaaaaaatacatcccaaaatcgaatttctgacttcagcccccccccccccccgaagccaagggtttgactaagggcgggtgcccttaacaatgctactccctttaaaaaataacaataattttttctgaaaaaactaattaatttaattcaattttaatttttcagtttccaaaatccattggtctgccccggctctttcgtggtccgctgagcacaagcacacaaaacattaacaagcagtacacaaaatgttctgccaa

SEQ ID NO: 41663 - DNA, 1687 bp, Heterodera glycines
atattcatgatcagcaggccccgaaaacccctggaaactctttttatcattaaaaagaaaaaaaattttgtatgtgggtcaaactgtataagtaccccaaaattcaatcggactgactgtcttaaaacattcattttgatatttatccccaatttcagcccctcgacaaaaaacacgaacaatcgctgaacgacgccctgcaaaagtttgccacgcgtggacagaagctgaacttgaccttcactgtgaagccggacttggttggtggactggtggtgaacatcggcgataaatatatcgatttgtcaatggcaacacgccttaagaaaatggacgcggtggtaaagggatcgatctgatcaatttttgttagcacgacagaattagccgatgacttgacagttccgaatgttcttttgtttttattgtctcaaataccatattattactataaataggatttttgatgttattttttatccatacaaaaattgaatgtagggaaaggaactggcggaaaattagggaattctgtaaatgaactttaaatttgccggtatgcatataaattgttttatagtactgataaaataatacacaaatagacatagtaaaaagtcaattggatgcccaaagtcggaggatggagttagacaatgtcaaataattgtgaatagacgcgcaaccaaaaacatgaaaaattgtacaaaataacagaaagagatataggttgatgatgatcacatttttcacatgcgtcgtgcatttactcgagtgaattcgtagaccagaataaaccttagagcagccaatcaaatcacttcaatctttgagttattgatgccaaagcaacggcaaaagcctgaaaacatcaaatgtcgaaatagacaattactaagagaaccaacctgaatggcagaaaagggctcgcgaaagtccaatgtgtacgcaccattctcgatgcgtccaaattgaagcacttgccgagactggtgttcaatttggaagttcttggcagattcttgagtgactcttccattaaagtccaacttaaacaattaaatatcgtagagaatgaatcacactacacgcccaccattaacatggtttctgcatttacctggtagacttgagactgttcgttccagaagggccttttgttggtcatcaccagtatcttcgtcccgctcgtcctcctcttctcctcgtcgtcttccccctgtgcgcctttccgtccgtttttaccttcccgtttcttgcaacacttcgacggcgtttccatggccaaatccgtctttttctccgcatttcttctgtttgattttggcactcttaacactgacgacgaatgtattggcacagttgcggtgatcgttgactaaataagagagaaaatgggaaagaatgggccgaaaggagcacctgactagcaactgtcgaagaacacttcaacaacggcacaatttcttcgccaaccccgacagctgattgtgagaatgcaattgcagtgccatcacagtcattttcttcttcctcttcgtcgtcgtcgtctccctcccccaaaaccatttttatgtgctgcacacgctgtcgaaggtcaccgccaatttcatttaataattcgttgatacgaatcagctgtaaagaaatgccaaaattagtaatggaggttgaagcaaaataagaa

SEQ ID NO: 41664 - DNA, 316 bp, Heterodera glycines
caaaattttcaattttttctagtctaatctactcatcattaagcagaattcaataaaaataacattcacggtgcgaaaaatggggtatgaaaagtttattggggaaaaaaagactttacaaaataatacccctgggagaagggagtgggaaacatgatttcaaaattttcaattttttctaggtctaatctactcaaaacggctcagaattcaataaaaataacattcacggtgcgaaaaatggggtttgacaagtttattgccgccaaaaagactttacataatttttcccctgggatatgggagggggaaacct

SEQ ID NO: 41665 - DNA, 1428 bp, Heterodera glycines
ttccataatttttctttgattttatcaaatttttgctttatttctcttttttgttgatcatttgggtgtattcccattttttttaatggatttttaaattttttggtaattgtcgttattttcatgggaaaaaaactttcgctttttatttaaaaacgatttcatcattttaatcgaaataaatttatattgataataccacttatttttatacggaaagaaatttttatcggttttaaaataccaaaaattccctttccttaaaaaaaacccaaaacccaaaaaaaaaattgcccacaatgccaggaccaacaaatcgtaaattacgaattctaaacgaacctttaacttttaattgtgaaaagtcgattttttttgtcaaaccccgaaatatgtgcgagaaattaataaaaaaaaattattacttttatagcaatttggcagtaattcttttttccatttccgaaatgtcttttttgaaatgcctaattccttcacaaattctttatgttttccttggccatataaacttttaaattcatcaattcgttcaatgaattcgctctttttctcttcataaaaactctttttcattttattgaatttaattttatttaaatttaattcatttttccatttgtatatttttttacgatttgcgcctaataattttgcaattttccactcaattttatttcttttttcattttcatattttcctttttctctcaacttttctttaattgcatcaaatttttcgattgtttctattttttgttgatcattagggcggtttccattttttccactgttttgattaatattaaattcagagttttcattttgttccattttaataattttttcttcactttcatttttatcccatttgtcgccaaatatttcgtcaaaatttggttggattttgccagatttaattccataaaataagcaaaatataataataactattaatagccataaattcatttttactattttgaaatttttttttttaaatatttttaatgttattttattgcttaatttctgctcattttataatcaataaaataatgtaatagattttcgctattatttggcaatgatacaaatgagaaaaataatataataataataatcataattcaaaataaaatttcaatgtaaaaatttcttatttaaatttttaaacataataatagtaatcgggttcatagataacaaaaaacaattttcaaattctaacaactttaattataagcaaaatatttcaatttcttttttctcaattcttaaacattttaaaataaaattcattttttaattcatcaaataaatttatttttgtaaaattaaacaatttaaaaatcatttttaattactttaaagatatattttcattcgtttttcgcacttccattcttc

SEQ ID NO: 41666 - DNA, 978 bp, Heterodera glycines
tcagggattaattcctgaggaatttccaaggaccacgtgcatcattgctacaacggggccttaatggcattttaatgtcaaaatgcccgacactagtgcatttctttagacaacgaaaattaattcttgaggaatttcccaaagccatgcgcagctttgttagaccgatgccgaaatggcaatataattggaaaaggacagacaacaatgcttttctttatatcagctgatggtttatttacaaaaatcgaaatacttcctgattactttccaagaaccatgagaataaatatcgcactagcgccaaaatcgaacaagaacgctaatcatcagaatcatcttaattttcccccagtgatttgtgagtgataagaaaataaaagaaattcagggattaattcctgaggaatttccaatgaccacgtgcatcattgctacaacggtgccttaatggcattttaatgtcaaaatgcccgacactagcgcatttctttagacaacgaaaattaattcctgaggaatttcccaaagccatgcgcagctttgttagaccgatgccgaaatggcaatataattggaaaaggacagacaacaatgcttttctttatatcagctgatggtttatttacaaaaatcgaaatacttcctgagtactttccaagaaccatgagaataaatatcgcactagcgccaaaatcgaacaagaacgctaatcatcagaatcatcttaattttcccccagtgatttgtgagtgataagaaaatagaagaaattcagggattaattcctgaggaatttccaaggaccacgtgcatcattgctacaacggtgccttaatggcattttaatgtcaaaatgcccgacactagcgcatttctttagacaacgaaaattaattcctgaggaatttcccaaagccatgcgcagctttgttagaccgatgccgaaatggcaatataattggaaaaggacagaca

SEQ ID NO: 41667 - DNA, 932 bp, Heterodera glycines
gagccaaaaaacgaaaaaaccaaaattgaactttatggtgccagatgaatgcgaattaactcgagttgaatttccacctcaaaattgcgcaacttttaagcattctgccatttctaaaatgaacccactcgtaagtattttagacttttcagttaaaatcattttggcttgaaccctgttcaaataattatataattaaattttaaacaaaacaaaatttaccagatttccggtggatcgaaacttgccataaaccgtatgtcgtggactgtttattttctggctactgtagaaaatgagttccaaaccatgggatacggctgcacagcttcgctgatttcaccgcaattcgttctgttggcagcacattgttttgacaatctgaaggaaaatggacaattttcacttggtaattttttttattaaattaatacataaatttgtaaaatgtcatgatgaaaaaatgaataatagatgtatatacgttataataattaataatatttaaataaaataaaaataaatattattttttaattccattttatgattcggatcaaattcgcgcatcattccgagatcacgctcacattatgatggtgttatcattaaaatgattcttgaaaacggctttaatgtgttcatccacccaaattataagaaggaagttctttgcttgttcgatttagcacgaattaaggcatttaaaaatataattaatttattattaaattgttattttagatggacaaaaaagttaaactttctccaaaaatgtatccagtctgcgttcattgtgggcccaccgaaaaattcaaaaatggaaaagcattcattgccggatggggaaatttaaagagtaattaattaatgaatgatttaattaaaaagataacacaaaaaattatgaagtaaaatatttaaataaatca

SEQ ID NO: 41668 - DNA, 854 bp, Heterodera glycines
atatttttttatattaaaaacttataaaaatagtgcactcattcagaatgcttaaacataaaactaaaataacaaacccataaaagtcataattaaaaatttaaaattattctaaattattaaaagcatgaagcactaattaatgcacagaatcaaatgatgatttaaccagaaattaattaaataaaatattttctataataaacaaatacataataagattcatcactagggtagcaacttttagtgacgaaaaatcccgaaatagttaactaaaatagtgagtaaaaatgccaaaatagtgaagaaatagtgacaaaaagtccgaaatagtgacgaatagtgacataattttcagccaaaaattaagcaaaaataatttttattcactgattgcattgcaaatgagtagggctgggatttttaagggcaaaaaaacaaaataggtacataaaaaaataatttttaaaattaaaattcttgccacgaaaatacctttttgagaaaatttttttcatttcttaggagtgctttttgaaatttttttttgtcgattcttaggggtgtattttttgaaaaaaatttttaggtcgattcttaggggtgtattttttggttttattgcatttttgttaaagaattttccaaaaaatgtcgaatagtgacaaaacgccaaaatagtgatttttaactattttagtgacgaagtcgccaaaatagtgatttccagtgacgaaaagtgacgtccaaatgaaaaaattttaacgcagaaatgcgttttttgagctcctttcttcaaaacaattgagcaaaaaaagaagttttttcactaaaagttgcttccctattcatca

SEQ ID NO: 41669 - DNA, 777 bp, Heterodera glycines
atttattttttcttattacccctcaggcaacatttgtctattcgtcactccgtggcgcgcgccctgagagtgcggagcccatcgcggtcgtgttcacggacgggtttggccagcacgagtttgacgagcaggcatcgctgctgcgccggttgattccgcgcgtgtacgcgctggcggtccacgacggtgcacgggcggcgccaatcgcgcacgcagagttatccaaaattgccggagacccacggcgcgtgttcaccgcaatgacagtggccaatttgtacgacgaactgcgcgagcggttcagagggtgctgacacatggacggatttcaaaaatgccgatttagacaacatttttggcactcagaatttccaatttacttatctaatttttaattagagaaacaattaggaattcgtttaattttattttattttttttacacaaaatttaattgctcatatttattttttgacaatatgtaaatattttattatgaaatttttttgattaattgcaatttatccatgagcgataatcagtaaatattggtcatttcgatcataaaaatattaaatttgaaagccgattatgatcaataatttattatgaaaaaatttattagagaaattttaggaaaattttaccaaagatattttaaatttttcaattaaattgaaatattaaaaatgcactataaatatgtgcatcaaaccccaaaaaatgcccttttcctcataatcttccaccgctttttcttcatcactcaattttctt

SEQ ID NO: 41670 - DNA, 956 bp, Heterodera glycines
ccagctaagtagtcgacggttcacgcacccgctaccttaacatagaatgccaatacaaaaatgctattttgagtgtttagttgaatgtggctatttctgacgatagttttgtggcatttcattcaaatgatttttgaccactttttgtttgataattttaaattaaaattttttgtattttttattgccttttgttagactattttattccgcacttatgaaattcattcaatttgacttttgcttattaccgtacattggcctcatttccaaattaaaccataaaaatcacaattaagcttatttaatctctctttggtcgtattttacgcctcattgtttaattgacatcaaccaaaatgtgtaataattgacacttttgccttgcgattcttttttagacaaccctctcttacaataattgccatttccattaatggcaccctatgctcattttccgttcacctgacgtaattttctacggcaccagcggaccggccgttagcggaccaaaattttttgtcccataactcttgatagatttcttttaattgcaagctaatagagaataattagagtctcgaatgatacccagatatttgtgttggataattttgctccgctacgtcccttaccctttttttctgccccatcattaagcatagcaccaacaattatcattagcattttcgtaatttaatttttgaatttttgtgcctaatgatcttctgaacacttttgccgtctttttaaaggctctaggaaaatccgacaccggaaaatccgacactggaaaaaccgacacgacaccaactttaaatttaaaaaattttgattgtttgagttaatatctggctaagtttatcaagttttcgaattgaattttaaagaactaaattggttgcgccattcgatgggatattgctaacaaataataaaggggttgtcgattgttg

SEQ ID NO: 41671 - DNA, 1592 bp, Heterodera glycines
cagtggacattccgtcaagaaattttcttctttcattgtcagcaatgatcacaaacgttttctattcatttaataatttaattaaatttattattctttaaaaaatgatctttaattattctaaaaatttttttgaacactttaataaaatataaaaatttttattaaatttttatcaattaatttaattttctatataaaattttgcatttaaaatattaaattttgctgacggattgtccactgcaataattgttctttgtcaccgctctttcccatcgattttgagcgtgataaatccatccaatccccaaatttctggatttgtctcaaaagttttgggcctccaatcccgaatcccgagacatccatccccaccttcagctcctgcactttgaattcgtttaatcgtgtccacaaacgaattgtggcactctccgccccgtcggttgttgtcgaatcgggcggttcttcccctcgtgccggtgccattgtcacgcttttgtcctcacccatcggtgccgtcgccgcatcctccggcaatacaaaacatggcggtgtggcagctaatgggtcaggggaggagacgaacacggcggcactgtccttaaggggatgcggtgaatggcttaagagcattttgccacggacccgaaaaatcaattataaaatgattttaaaattaactgacactgaacaaccattcacaaaaaaattggcacagaaatgcccttcttaaaatttatttggcactgaaatgccattctgaaaaatcatgggcacaaagtgccattcttgtaatatatcattcgattcgaatcgaattccagaaaaagtcatttttgaactacatggcgctgaaatgcgttctcaaatatcatcggcagagaaatgccattccaatcactaaaatgccatactcgggaaacattggcaccaaattgccattcttgaaatagtcaaaaggtttcagtgtgaatgaaaaattcaatcttggattattttgattccaactgccattttggtcaattgattccttgaaattttccaagttcgaaatttttttgctcatcggaattccggtttgaatttcaaaaaaatttggggcctgtggatttcacacctttgctacttccggaatgtaggtgctgttcatcaacaactgctgctgttgatcatcatcatcatcatcctccgcggaatgtttggccgttgtttttgccgccgcctgtttcgtctccacgccatatcgtcgagcagtagcggtggtggtggtgccattgttttctcggcgtgccaatgccatcatcatcatcattagcaggagaaagagcaatttaggtggcaatgggaatgtccagaggttaagaatggcttaaccgaaaagtgcgaacggcggcggaatgtgccaattggataaagcattcattggcgccggaatgggcggggtggcgaaattgttgcctgctgctggatgctttagtaataaatgaaaatgaacgctctgcagcttggcgtgctatcctcctcaaatttcaaagtgctcgaggaagtttttgtgtgtgtggttgtggggggacattgagggaaaa

SEQ ID NO: 41672 - DNA, 1051 bp, Heterodera glycines
tcaatgagtgtcagctcgggcaccgccagctttttctttttttttcattatttttttttacacttctgttgaagaatgaattctagtcttatcggtggatcactcggctcgtggatcgatgaagaacgcagccaactgcgataattagtgcgaactgcagaaaccttgaacacaaaacattcgaatgcacattgcgccattggagttacatccattggcacgcctggttcagggtcgttaccataaaatgcactgcttgtgcgttgcttcgtgggatcatgtacttgtacgtgttcttacgttacttgctcagctcggctgtggggttttggtgtgctggcgcgaacttgtggttctaattcgcgttttacggaccgtaactcaagcgcaccaatgctttgcatgctgtggcggagtgcctggattactggcattcctgctttgatttttcgacctgaactcagacgtgaacacccgctgaacttaagcatatcagtaagcggaggaaaagaaactaacgaggattcccgtagtaacggcgagtgaactgggaagagtccagcgctcgaatcgcagctcctctgggttgcgaggtgtagcgtatagaccgtgagcttgggttggcccgcttgttcaagttttcccttcgaccggggctccagagaaggtggcaagacctgtccaactggcggtgcctattccattctttacgtgtcttggagtcgggttgttttggggattcgcagcccaaatcaggtggtaaactttcattctaagaactaaatacggccacgagtccgaatagcgaacaagtaccgtgagggaaagttgcaaagcactttgaaaagagagttaaagaggacgtgaaaccgaagaggtggaaacggacagagctggcgtatttggtctgcattcacccgtttgttgctgtacgttgtactgctagccttcaaacttggggtttgttgtccttctgttcagtggcgaatggggcatttgcaggcggagtgcgctgagatgctcggagtagcttgcgtgagctcggtcttga

SEQ ID NO: 41673 - DNA, 1255 bp, Heterodera glycines
ccaattccttgggccccaaccttgcacggcatacctctttccatttgatgacacgtggcagcaaaaagttgtacagcagccgagaggacgagagcgcattcggtgtggcattttcggcagggatgaaaggcacaatttcgaacaacagttcgagcggaaggcatttgggggccattgttgggagaagcaagggagaattttgtgatttggggttaattaggtagttagttcaacgtcagtcaaaggacgccgcccgtcgcaccggcactggattttgttttgctcgtttaagcagaagaaatggccacttgcatttcctttactttcttctacgatctctatctattgcctttaggtctctctttctctctcctaccctctctatctctctttcatttttctttatcggtcgcttttcgtcgtccccggaggggttttgtttgtgtgtctgccgcagtgtcgcgctttttcccttttacttctcacgtgaacactccttgtctttgcttctctgttctcgcttttcctccactggaacggcactctctgcattctctcgcctttcctttcgttgtctgtctctgcgttctctctctctgtttcacttcttcgttcgttttgaataggacagagaaatgaatccaacttcacaggctcatatatcatcaatttgacaaaaaatgcctaacattataaaaaaaaatgattattgaaacgaaaattaaaaaacaagacttgcgaagaaacaacagacactgtaagagttagacactattaaaagttaatgaaaataaaagtgaacaatgcgccaatgaaaaaacagacagctgaggttagacactatatgttttatcattgtttttaactaaatttctaatacttataacttggtgaagggtaaaccaaacaaaaccattttgtgctcattttgatgggaaaattcttaagaatatttcaaagttaaataaaaatttgaaaaaatagtttattagcaagaaaatgaaccatgtgttattttatatgttagagacatggaaatagtacactaaaatgagagaaaaagaaaaaactttgtcctgggtcaaaaaaattttcctcgggtcagattttcttgaaattttgcctaggctagttttttgaccccatctatcgaattctattttgttttttgaaagtatattttctaactcgagatcggctcttccatttttacaagggaaaatctcgataaaatttttaaattagcggggttttt

SEQ ID NO: 41674 - DNA, 760 bp, Heterodera glycines
gcggagtgcgtttcctaactttgttttttactatttgtatatttacatgggtactacccttgtaaatgcactatatttcctttttttagctgtattgggaagagtctcaacaccgacaccaccatgtataattcggccggcgataccagcggactcgtctttcgaacagtgccgacaatgttcagcagcagacaacaactggggccgctgccttgaacgcgcagagtggtcaccgtcgatcaacctcgcgtacgcgatcgcgatcgaacaccgcctcacctgctgccaaggagcgccgcgtgacgttcaaaaacgcgccgccgcagaccaccagcgggcgccgccggcagcagcaggacaagaatattgaagaagatgaagttggagatgggccgctgcagaagcagcctgggacatcgcaagcatccgcccccaagaagaccaaggagaagagggctgcctcggcccttccgaccatgcaggctccggacctatacggctcccggcccaaaccccctctggcggtgaattttctttataattttttgattctttttaaataatcattttcacccaagaaggcgctcgaccctcaatacagcgatgaggatgaggaggaagtctagtgcgaggaagttgagggcgataatgtgctgaacaccgcagaccccttccatgaacacacggacggccacgacgacgactgatgggccgctgcgatgcggcactatcataatttcttggctgatgaaaagatcaa

SEQ ID NO: 41675 - DNA, 1069 bp, Heterodera glycines
ttcaataagaaaaataagactcaaattgccttgttttcctagaattggctacccatgaaaaattttatataaaaaatgtgctcaaataaagtgtttttgtttgtgccaaatggttcagtgaatgctcctcgtcacgcaacagcccattccggcgaaaaggaagaaaaaaaatgtctttcgttggtttgacctatttaggcttaaatgagcattagcctcttataataataaaaaaaatttaggcactaagtgacaaacaacacaattgaaaagaaaaaactgtgaaataaatattctcaaaaaagattattgttattttacctttttctcgcagataattcaaatatttaatcactatttctcgttttttttttgtctaacctagcttagaaaggtcttagaaaatattaattttaattaaaaaatttagaagcattccttaaaaagagaaaatatatttaaataaaaaataattgtagaatttaaaaacttattgaaaaatcgatgcgaattttttcatccaattttgatctaaattattttcgctcaaattcattttccattcgcccataaagtcagagtaaaaaaagccgaaaaaaattggcaatagcaaatcgatcatgttctacatgaaaaagtggctttaagtggtttagacactcacatttggaaatgttcccctgtaagtgtcttattagaataaatgcttaattattatagattggatttttatataattttttttttcttgggtccacgtggtctaaataataggaaaaacattttttttgtgtttgcgaacaaaagttgggacttttatttgcatattttcggggtttttctacgcattacctaggtgcatgaatatttttatacatattttggatttcctcacattttttcataaatattttgaaatttttgggattttttaactaaattttttattaaatgccccgaaaaatccaaaatttctcaattaaataccttttcaataatttttatatttattatattttctaaaccagaaaaaattttgaaattggttaattctcttttgtaggttttt

SEQ ID NO: 41676 - DNA, 1128 bp, Heterodera glycines
aatgtcaaaaatgcaaaaaaaaaatgcaaattaagtgattgtcgttagaactggcaaaaacatttgaacatatgttaaaaaatcatcgaataagtgatctactgcgaacggagtatgccatcggtgccccaatttcatttgaactattgtgacgcgaatattgcgccggtgacccgtgccgagaactgcttcggcgggagcgcgctgttggtgactttgatcccgaattgtgccgggaacgataattgctgagacgggagcgagaattgccgagacgggatcgtgccattggtgactttgatcccgaattgtgccgggaacgataattgctgcgacgggagcgagaattgtcgagacgggatcgtgccattggtgactttgatcccgaattgtgccgggaacgataattgctgcgacgggagcgtgccgttgaccgcgatcgtgcagttttgggacgagagcgcaccgttggtgactttgagcccgaattgtgccgggagtgagaattgcctcggcgggagcgctccgtagacggcgatcgtgagtttttgggacaagagccttccgcaggcggcttgacacaattgtgttttgttgttggcgatttgctggtagaatgtgacagttccaatgacaatctaacaataagaagccaagtagataaacacaacccaattcactctcttacagccgaaatgacaaagtaaaataactagcaatttaaaaaagacatttgtttctattccatgcaataattgaggaagaattcttttaaagtggatcacgaaatccccgttcaaatgccaaattttaaaatttaatccctttaaagcgaaaaaaatatatttttatttttttgcgttgcaaaatttaaggtaaatgaaaatttgaaattggttaagttggcactggcaatatgacatcacaaaagatgagaattgttctccatttactggcgtttcctctctacctctgattcacttccggttgtgccaggattcgattcgcccgtttccacatggccgccttatgttccgcgtgcatccatccgttggtccgctgttgggcgccatgcgaaaattttgcattggtcttatacgaacaaaagccgtgcgtgaataaatgctt

SEQ ID NO: 41677 - DNA, 889 bp, Heterodera glycines
cctaatgggcccagcgctcgacggacaaagaaaacttttctcattgttttgtggtaggcgcttttcctctgccgatggaacaattgaaggcaaaaagtgtggcattggcacactctgtgccaacaaatttgtcttaatattttttttttgaacataaacaatgaagttgaagcttaatataagggatacatatgttcttgacagatattttattaattagttttttttaaataaagtgaaaattgctgaaattgttattttatatatatatattttttggttttttacacttaatttctaattttttagcttttttggtcaaaaatattaacgtagaataattaagtattttttggaaaataataaaactaaataataattttgaaaaaaattaaataataatctgtaacaatatttcttagagattaaataaatgatttaaatatattttttctaaatgaaatgataatttagttgaatttattccagaaaaatgaaatctgcgtgtaaattagcactaattttccgaaacaatgtttttatttgatttataaaaaaaataaattagggtaatttagaacggagtaagaaaaaatgaaaaaaacaaaatttataaaaacaatttcaatttttattttaaagaaaaccaagaaattatgcaaaaatttgatcggagtgcttactgaaatcgaaaattgttatctgtctttttttgtttcgtattgaacatttttttctattacttcgcaatttaaaatggcaaaataatattaggcatttgtaaatgagttcactctccaatgcccaaaaaacgtcggcaaaattatagaaaagctggtagaacggctaatcgcgggcgagaatcgatatggaaatcgatttgctgacc

SEQ ID NO: 41678 - DNA, 700 bp, Heterodera glycines
atagcttccctatagcctgtactttaattctgcgttggatttttgctccccataattgtttgagtaccccaaacggacacttgaaaaaatcgattattttgttttcggggcagtccccccgaaccgatgcgcccagatttatggggagaccgaatccttccggaatagcttccctatagcctgtactttaattctgcgttggatttttgctccccataaatgtttgagtaccccaaacggacacttgaaaaaatcgatttttttgtttcataaatatttttttcagaaagtactctaaagcgcaccaaattttatttacaacttaattttagcactctgatgctttagtatcaaaaaggaagatggagaaaaaattttttaaaaaatttttccttatattttggttatatcgttttgcttttggtggggtgcttggaacagtggaatcatgcgcacccgtccgatctggcaagttaagcaacgattgctgactagccaaaaggttcggtgccgtgatgaaacgaaccagcactgcttaccccgcggcacccggcacggtcccccgaaggaatggatttaattaaattctctccttcggggatttttttccattaggtcgtccgttagcgttcgattgctctagtcaattttttaaaattttttgttgaaatatttgtcgtgctctgaagggcgggggggg

SEQ ID NO: 41679 - DNA, 1002 bp, Heterodera glycines
  unsure (1)..(1002): unsure at all n locations
aatgcgagtaagcagttttaaaggcaccaagcttatggtaatatttgtgctctaaatatgaaagacccttgtggaatgagttcgccacataatcacgtgcaatcccgtgtcctttttagaaattcccaaatgcgagtaagcagttttaaaggcaccaagcttatggtaatatttgtgctctaaatatgaaagacccttgtggaatgatttcgccacataatcacgagcaatcccgtgtcctttttagaaattcccaaatgcgagtaagcagttttaatggcaacaagtttatggtcaaatttgtgctctaaatatgaaagacccttgtggaatgaggccgccacataatcacgagcaatcctgtgtcctttttagaaatttccaaatgcgagtaagcagttttaatggcaacaagtttatggtcatatttgtgctctaaatatgaaagacccttgtggaatgagttcgccacataatcacgagcaatcctgtgtcctttttagaaattcccaaatgcgagtaagcagttttaaaggcaccaagcttatggtaatatttgtgctctaaatatgaaagacccttgtggaatgagttcgccacataatcacgtgcaatcccgtgtcctttttagaaattcccaaatgcgagtaagcagttttaatggcaacaagtttatggtcatatttgtgctctaaatatgaaagacccttgtggaatgagttcgccacataatcacgagcaatcctgtgtcctttttagaaattcccaaatgcgagtaagcagttttaatggcaacaagtttgtggtcatatttgtgctctaaatatgaaagacccttgtggaatgagttcgccacataatcacgagcaatcctgtgtcctttttagaaatttccaaatgcgagtaagcagttttaaaggcaccaagcttatggntatatttgtgctctaaatatgaaagacccttgtggaatgagttcgccacataatcacgagcaatccc

SEQ ID NO: 41680 - DNA, 1267 bp, Heterodera glycines
  unsure (1)..(1267): unsure at all n locations
agaaaaatttgaataatttttttataagaaagccccggccctcgttttcttccgctttgatccccgatttttgctggctttgttccgctttatttccagcatttgaatggatggatcctgcaaaaaatacgttctcaaattatttggcccggccaaaattttcttttcgctcgtccgaagcgattctgcttaaatttgtttatgcaaatctttaaacatgcaacaaatgttcagcatcgattgaggagtacaacctgggccaggtgggctattacctggacgaagaaaacaattgggcgctggacatggacgaattggaacgggcattgaaggaggttggttagttggaaaaacaattcaattttttttttgtccattttttaaattttgggctaacggctgaaagttaaacagactgaggatttttctatgtgttttcccacctaaaaattttaacacgttttttggcccaaaaagtttgcaaaaaaaaataataaatttggtttatttattcttattcgtccaagcttggtatttgtccgacggtagtttaaattattcgttgtcctcctaaattggcactaattcgcctcgcccgtacgtaaatttcaacattttcaaaacacaacaaatccgatttgccatcattattttgcacgcattttcccccttgtatacacagagtgagcacgatgtgaaggcgattgtggtgatcaatccgggcaacccaaccgggcaggtgctgagccgagccaacattgaaagcatcatccaatttgcgcacaaacaccgactgtacatcttcgctgacgaagtgagctgatcacatgagaccaggcccgtacccagaaaaaaaaattttttggggaggccactcgaagaactttttttcttttctttttttgttgctttccagaccaaatttttttgtgttatttttcaaaatttcaagcgtagcggcgaaaaagcaggagtttgtagcgattttgcgccaaaaatgacaatttttgcccgttttgtggtcaaattttcaaaaaataaatggtccaatggaggccggccggaaaaagtttttgctaaagaaaatgtacaatttccaaaattttgtccattttttcttgaaaatttttttctcatccaaattttatgtatatcaaaagtcccatcggcggacggtttttcgaatttncatcaaatcattcaaaaaaatattagaaattgtttataggaattttaanaagaaaaattttaaaaagaaagtcttgga

SEQ ID NO: 41681 - DNA, 988 bp, Heterodera glycines
ccattcagagacaagtcaaaaaaaaaaataataggcttggactaccatactaattagaaattttagaatgtgtctgttaaatgcaaaactgttgtgaaaaattgttataactccattcagagaagagatagaaaaaaataaaaataggtttagagagcccgtgaacagctgcatcggatgcaagtgccgccgttgctgtacgcctaacagttggtgagcaatgacggaaaattgcttaaaaaagaaaccaaacaaactcatcaattgttagctcccgttgacaaaccgaagggtacattggggcaatggatgttgggctaccgtatcagttattaaaattgttgtttttcaaaaaggatactaaaactgggataacccattcagagactagtcaaaaaaaaaaataataggcttggactaccatactaattagaaattttagaatgtgtctgttaaatgcaaaactgttgtgaaaaattgttataactccattcagagaagagatagaaaaaaaataaaaataggtttagagagcccgtgaacagctgcatcggatgcaagtgccgccgttgctgtacgcctaacagttggtgagcaatgacggaaaattgcttaaaaaagaaaccaaacaaactcatcaattgttagctcccgttgacaaaccgaagggtacattggggcaatggatgttgggctaccgtatcagttattaaaattgttgtttttcaaaaaggatactaaaactgggataacccattcagagactagtcaaaaaaaataataataggcttggactaccatactaattagaaattttagaatgtgtctgttaaatgcaaaactgttgtgaaaaattgttataactccattcagagaagagatagaaaaaaaaaataaaaataggtttagagagcccgtgaacagctgcatcggatgcaagtgccgccgttgctgtacgcctaacagttggtgagcaatgacggaaaat

SEQ ID NO: 41682 - DNA, 902 bp, Heterodera glycines
  unsure (1)..(902): unsure at all n locations
catttaatntcgtggtaataaaaaacaaataacaaacctgtctttctcaggaatcgcttcaactttattaaaaagtggaagaacaatacacaatcgatttaaatttccgctaaatttaaatgctcagactgtttccggtgttgtccaaggcacaaaggctgccgaagaaataataaacagtgatttttttgtgattgatgaagctcctatgacaccacgatttgcacttgacgctattgataaaaaattacgtgaattaactaaatgtaacctattatttggtggaaaaactattattcttgctggtgattttagacagaccttaccaataaaaaaatttgcagtaagaagtgaaattgttgatctaacaatcaaaaaatctgttttatggaacaattttgagcaattgaaattaactataaatatccgagccaaggacataatatttgcaaaacaaattcttgatataggcgatggagttagtccaaacagcttcattcaattacctccggagtgtattttatcaaatgaatctgatttaatcgatgaagtttacggtgacatttttttaaagcataattttaatgaattaaaaaatcatataattctaaccccatacaacgatttgaccgataattataatgaaatagctttggataagttcccaggaaaatgcgttacttatcttagtattgatgaagttgaaacaagcaataattttccaattacaccagaaataatgaactctttcaattctcccggttttccattgcatgaattaaaattaaaacaaaattgtaaagtaatgcttatgcgaaacataagtattgaaaatggtctttgtaatggtacaatgttgcaaagtattgaattannagatatatgttaaggtgtataattct

SEQ ID NO: 41683 - DNA, 898 bp, Heterodera glycines
taaagagagagagtcaattaaaagaggagggagagaaaagaagaaatgagatagagagagaaaggtgaagagaggaagagaagaaagaatagaagaaaaatggagatggggatagtaagagagagagagagggaatgaaaggcagagagagaaataagtagagagaaagaaaaagagggagtgatgagttacgaaagaaaaagagaggaattgaactgagagaaagaaagaaatagagatggagaaagaagagaagatggaggggggatatagtaagagagagagggagagagaaagaaagaaagaaagaaatcgagagagaggagagaaagacagagagtagagtgaatgaaagaataaaagaagtgagtgagtgattgagagagagtgggagagagagacaacgagagagaggagagttagaagagaagatggagaggaagtgagtaagagagagagagaaagaaagaaaaaagaggagtgagtgagtgattgagagagagagaaagaaaaagagggagtgatgaggtacgaaagaaaaaaagaggaattgaactgagagaaagaaagaaatagagatggagagagaagagaagatggagggggggggatatagtaagagagagagggagagagaaagaaagaaagaaatcgagagagaggagagaaagacagagagtagagtgaatgaaagaataaaagaagtgagtgagtgattgagagagagtgggagagagagacaacgagagagaggagagttagaagagaagatggagaggaagtgagtaagagagtgagagaaagaaagaaaaaagaggagtgagtgagtgattgagagagagagagaaagagaatgaaagagagtgtaagaaagatagggagagggagggagggagag

SEQ ID NO: 41684 - DNA, 1386 bp, Heterodera glycines
aatttatttaaaaaatttttttttgcatattttacgttccgttgtgatccatgatgaacagcaacagcagcaatttgttgtgcatgagcatcatcctcagcaaccgatggaggagcaacaatatgctgttgttgttgatgagccggaccattaccgtattgagcaacattttgacgagcccatgccagaggaatacggtgatggtggtactattgtacatcatgagcatgtcgttgaatgggaacagcaccgatccgacgaatcaccaccttctgatgcagtatctgcaccggctgcagaagaggccatgcaaaagagtggcaccacaacagtgactactgtaaccaccgtaaccgactcgtggagcagcagcaacggtagaggcgctgaagcagagacggagggggaggaggagaagcggctggcacatgcacagctggcagaacaacaacatgaggaagaagaagccgaacacaaagggggagcgggaggtactgcttcaacaaatggtggccatggtcgtgccgacgaagttggcacaccggtgccaacggaggaggaccaccatggtcatgatgatggacattggcacgagcaagccgaagaccgccgggactagtctcgaaacggctggcactttgtgtgccgtcgtcggacatccatgccaccaaaaaaaaaaacgccgtgccgacgtcgtcgctttagcttatgtttaaataaataataattaatttttattattttctttttttgcacagcccccaattatgcgcatatgcatttatatatacaacaacacatactccacacacaatgttatgtttctttctttttagtataggtgtatttcctttttttctctgctatacacacacacacactctgctgctgctactgctctctcttccgttacatttttttttctttgcctgtctgagcccttacgctattttcttagtttctctctctttctttctttctgagcaccccttgccgaaaaatccgtccatttaaaaaatttattttatttttattttttcatttttgaggggcaaatttatgaaaattagcgaaaaaaaattcgatttttgcgaaaattctgctcagaaacaaacaaaaaaatattgctttacgtttttttaaagttttgtaatgcttacgcaaaaccccaatgcttttttcgtttaattttttttttaatatttatttaattttaaattatttattttttaatttgccccctcaaaaatttagaaaaatttccttcacgcacacttcctgaacattgaatattcaaaaatgaatgtaccaatgtgcaattttggcacaatacaccaattttgttgttcgctctgtccgtccacacagatgttttttgcgtaagta

SEQ ID NO: 41685 - DNA, 447 bp, Heterodera glycines
  unsure (1)..(447): unsure at all n locations
tttgctctctttgtggtcttttggtcttttcgcttgtctgtttgtctgttttcggtttgtcttcctttgttttccgtctcttttttcttgtccgttgcccttctctgtccggtggtgcctttgtgtcctttccgtttgtttttcgcttccttttgcgttttggcgttcccctcgtcgtcggtggctccttgctgtttgtcctttgtctttcggcctcctttttcgtctccctgcgcttgcgcctcgctggtctttcgtttggcgctcctttcgcgttcgtggctgccttttcggttgtgttttccccgttcttttctcctctctttcgctttgaattgtgccgttaaaattctgcccgttttcgtccgcttcttctgcttctggttgtgcttctttttcttcttcctcgcgtcttccgtaaggggtttccccgcgntggcttgccgt

SEQ ID NO: 41686 - DNA, 1056 bp, Heterodera glycines
aaaatccatttagaaaaattaaaaaaataatttgtccaaagttaaatgccgaagtaaaaatcatttaatattatagaaatttaatgaaaaataatatattaaaatttgaaaaaaaattatactttcgaaaataattaaacaaggaagctaaaatgaatttaaaaaggaattaattaccaaaaatataaaaaaacgaagaattagaaattaaataattttcaaaaaatgtaaaaaaaaaacatgattaatttaattgattatttatttattaataaatatatttaaaaaatcaccaatttaatcaagtgtccatttaaagtcctggttcgaatttcaacagtgaaattggcaattttgacattctgcttgaattgatggattgtgtatcgaagcgaactgcttgcaaacaaactacaataaaaatgatttaaataaaatttaaaaatctaaaatttattaacgaatcgcttaaaattattaattttttgatggggggggggggaagtcggcgctgaaatttttcttaggcccatttcagcaccattaagccatctgagctccatgtgatatataatttaaaaaattgtcatattttttaatttatttaaggtgggagggggtcaaaaaatcgtaaatcggcgctgaaatgtatgcagagagaaatttcagcgccacagtgccaattgagcgccgtgaatattcagaacaaaattaagacattcaaaaagaattaatatacatataaagatttaattttttggacctggcagtggacgcacacacaaaagcgccgtccaaattttggcattcggtgccctcagggcaaagtgccgttgtttttgcggcggtgccattgtcacccaatgaattgccgcaaaaatcacgctgctcacatagaagacccttcaaaaaaaattgttgtaattttagcctggtcttcgaatagagtttttgatgatcaaattttaaaaattttatcctaagttagccattataacctgaatggatggcatccatgaaaagttttttttggggggattctgatcattttaacaa

SEQ ID NO: 41687 - DNA, 1694 bp, Heterodera glycines
gacgcagtcgccaaattgattatgtccgaaaatcctgagaacattcgaattggtaaggacgaataaattttgagacattagtaatttaatcaatgtttggctccactacagtttacttgtcaaattagcttttacacttccatttacttcagattttgacaacgatcgtacgaagtcaatcggcacgccgtttaaggtcaaaccaaagctttcctacactccttacagaggctccttcaaatacgtggacacaacgaaggcactgactttgtttgattcatttatttgttcatttcattttgcaatttcagatgtcaaaccgcgaatttgcgatttatcagcaaaagaaggaggaggaaaagaagcaagtgctgaacgaacagagcgaacgatgtgcgagtgtcaacagaagcttcttctaaatttgtagcaaacgtttggactgtccgattgatgcgtttcgtttggttcggatgtttatttgtatttgactgtagcatcttctgacctatttatgtatcctggtaatttttttttccattgctatcaccgatcatcaaaatcttctatcgacctgattgaattgaattgtcattggcagttcgttcaatacaaattttacaaaataaagcataagcttatgcctaaaaccaagaaagcttaagattagtctaagcctttgtacgaactgtcacgacagcgatttgtaaatccgtatttcagccgttcgtttttatgtaacatttacgttgattccgccaaatattgtccaaacatttttccgttcttttcaaaaaaggaaattcattgctttgttcagtttcgggtcgcccattgtcatttcctttgtcatattaagccaaagaatccctctgttttctgtcacattcagtcgtccgtccctcccttttagccaaaatattcattaattgtctatttatcggttgcgcagtctccccaatttgtgtgtagtattttcttttgccatttttgaattatataaggaccagaaaacgtcgttcgcacaacaaattcaccggcatgggagtgccgtgcccgggggggggggaagaccgccactcacccgtaaacagcctgggacattccgcgaaatgatggatggctgcagcagatggacttttgcggtgccctcactcaaagtgttctgctgaattatgtcatccatccgtcggcactcatttgggtgcccattcactccctaataatgggcggaagacgggcctatcaatggccatcatttaatttgaacagggaaaacaatacagggatttccttcttcgttgagtccatttgtttcaattcacttttgggtgatgtttttcccttccaattggtcctaatgggctttcatcattattagcaaatgcgcggcatcctttgccattcgccgtctctcccgaggagcggcggaattgtcgcgcgtttgctgctgggcggactgatcattgaccacctgcttttccaactcatcctcaccacttctgtcgatgcccatcctccgtttgattccgacttcgaaagggatttgttgcaccgattgttaatgatggacagaaatgccggcggacgacgactgttcggcgcctatgtgagaaatcagcctaaggaaaacccaaattggggacaaccgccgcgtctcccgccgttcccttcgctggcggccgaagagaacg

SEQ ID NO: 41688 - DNA, 569 bp, Heterodera glycines
catatactcacccatttgtgcgaatgttggtccctgtactggaggttgtagccaagaattttggacccgccgttggatgccggcggctcccactccaattcggcccatgttcggtcaaagtcgcgcaccacgggcttgtcaggctggcttggtaccgagaattggtacttggccacaatcggctcgggcagttccagcgggtcggacagcccgtactgattctcggccaagactcggaatttatagcgttcattctccaccaagccggatacctgttttatacaaaattattaaaaaaaacgatagacaaaaatttttctacattgtgaaatacaggcattttacgttgatacactttttcacaaattattcaacaaaaaaaaaactccaaagtttgtcgtgaagcggactcgaacatccgccgtttgtcccttgctatcttacaaaaaccactttgccatacattcacaaatcgtttttgaactgagggcccaaattgaaacaatttgaaaatcgcgcaccaaagtgttcgtgttgcgcacgaatgagctgagtcgctcccagttttc

SEQ ID NO: 41689 - DNA, 885 bp, Heterodera glycines
tcaatcacatcgtctacctcatccacgagtagtagctcgacaccatatggctctacaagtactccgaccactttttcaatttcaacctcaactaccacgaccctggagccatttacactttttatacctccacatatatgcccgccagaagaagatgagaccacaacaagtccctcaacagtttcaacttcgtcatccagtacaacaatggttattcaaaaatgcatttataatttacttacctaaatgattttttaagtcatacgattcgcttgagcacaagtacagagtgttgcgaaaagaatattatcaactgaagataaacatgatcaagctggagatacagtatatgcagttgaaacggatgtgtgaccgtcacatgaacaattgtccttgtcccgaaacgacaaccaccacgacaacaccaatgacgacaaccacaatgtccaccaccacaactgagcaatgtgaaccagcacagccgtgccaagatgacagcccgatgatttgtgcacattatgccaaactgaatcagtgcaacaaacctggcgtatgtgtgctcataaaaagggtgttcctccccgatccgattcggggaaaaattgcgaatttcgtaacggttgacactccaaatcggatgttttgattttaaattaatgaccgagccgggcccggtaccgggtttttaccaggctccgaaaaacaggcccgccgatttttggaaaaacacggtttgaccggtgttggaggcacgacccaagaaacccgagttgtttttgaagatgtcagcccagcctgggcatttttaatttatcggttaaaccccatttagtatacaatgaaattttgtaataaacgggtgccaattttataaattttccaatt

SEQ ID NO: 41690 - DNA, 829 bp, Heterodera glycines
  unsure (1)..(829): unsure at all n locations
tttgtgggtgatatgttaatagaaaaagctatagatattactttttgtgggtgatatgctaatgagaaaaagcaaatttgctctgagatattaaaaaaggcataacaataaaattttgctattccaattatgtatccaaagagtcagaaaatgggtaaattacaatttatttggacttattattgccattaaaaaccctagaaaattatttttgaattttctggaattttattaaactgttttgaaatattccttaatttttgtgggtgatatgttaattagaaaaagctatagatattactttttgtgggtgatatgctaatgagaaaaagcaaatttgctctttgagatattaaaaaaggcataacaataaaattttgctattccaattatgtatccagagtcagaaaatgggtaaattacaatttatttggacttattattgccattaaaaaccactagaaaattatttttgaattttctggaattttattaaactgttctgaaatattcccgaatttttgtgggtgatatgataattagaaaaagctatagatattactttttgtgggtgatatgctaatgagaaaaagcaaatttggtccttgagatattaaaaaggcataacaataaaattttgctattccaattatgtattcaaagagtcagaaaatgggttaattacaatatatttcgacttattattgccattaaaaaccctagaaaattatttttgaattttctggaattttattaaactgttttgaaatattcccgaatttttgtgggtgatnatgtaaatagaaaaaagctatagatattacttttt

SEQ ID NO: 41691 - DNA, 843 bp, Heterodera glycines
aaaaaatcgattttttcaagtgtccgtttggggtactcaaacaattatgggagccaaaaatccaacgcagaattaaagtacaggctatagggaagctactcccgaaggattcggtctccccataaatctgggcgcatcggttcggggggactgccccgaaaacaaaaaaatcgattttttcaagtgtccgtttggggtactcaaacaattatggggagcaaaaatccaacgcagaattaaagtacaggctatagggaagctactcccgaaggattcggtctccccataaatctgggcgcatcggttcggggggactgccccgaaaacaaaaaaaatcgattttttcaagtgtccgtttggggtactcaaacaattatggggagcaaaaatccaacgcagaattaaagtacaggctatagggaagctattcccgaaggattcggtctccccataaatctgggcgcatcggttcggggggactgccccgaaaacaaaaaaaatcgattttttcaagtgtccgtttggggtactcaaacaattatggggagcaaaactccaacgcagaattaaagtacagactatagggaagctattcccgaaggattcggtctccccataaatctgggcgcatcggttcagggggactgccccgaaaacccaaaaaaaaattttttggataaaaattatttaaatgaactgactagataatatttaaaataggttatttctcttcctttcagtatccctgcaaagtttggtgcgcttctgatcagtttctgaaaaaaaaagttaggcctaaactttttggccggtttaaaagggaattaaaaatttttaaaaatt

SEQ ID NO: 41692 - DNA, 1342 bp, Heterodera glycines
  unsure (1)..(1342): unsure at all n locations
aaatgaggtttatgaaaataattgaatgaaaaaagataaagcgataaattttggtggagtgtactnttaggggaattttaaaaaggaaataaagcaactacgccaccactgcacgaaatccccctctttttggctgattaaaatcccgaaatttcatggtcacttgtgggccgctcatttgtcagggctacaccaaatgataccaagaatggttaattaattgcttttcaaaggaagatttatgatactaagaaaggtcaatcaatgcgcaccaaaatatgagtgcggattatttaatggaaaaattataataaaataaatattatcaaaatttggccaacaaatcatggtctattgcacattatgagtccaaacgcattttatgagttttttacacaaatttttggtttttttattaatgccaaaaatatgaatgtaaaataatggaactatgtatagacaaaaacaaaaaatatgaaaaatagggaataaaaagacaccctagaagcaacaaatcaagctaaaatactatttacgtgatttttcggccgaaataagtataaaatatggaaatccatataaatccggccctagttattaaattggcgtaaaaaacaaaacgccaatacactcaaatgaaatacaaagtatatttaatctgatcaaattcataatcagagctcaaagcttccaattcacttcaaataaattaattagatgttttttaggataatagaaatagtagattaaatttacaacatttacgaaagtttcagtgccttattttcgttatttagttttggtcacatttgatcagccataactcacttcatttccaactaaatcgaataattttttattattcgaaagatattaaaaagaagaatctttttctaagcgaaggctaagaaatttgactcttgaaataattactgctagccgagcttttgtgcagaacaaaaaagtcacttaaacaagttaatcagatcactcattcatgggggtctgaaaagcccaaaatgacttgaaattaggaaaattcataaattttgggaaaaaatttctagtgggctgaaaaaatatcctggtaaaaacaatctgctcattaaagcacaaaattccctacaaaatagcttttgaatgatgttctttgttgagtctccgcaatttttggggcatcggaattccgacttccgacttccgaaaatttttggggcatcggaattccgacttccgaaaatttttggggcatcggaattccgacttccgacttccgaaaatttttggggcatcggaattccgacttccgaaaatttttagtgcctcggaactcccatccctg

SEQ ID NO: 41693 - DNA, 1503 bp, Heterodera glycines
  unsure (1)..(1503): unsure at all n locations
attcccgtcattttcggcaccgccgaaaccatttccgtgatcactcagaccgagtcgtgcacaaggagtcactcgggactcacctgcagcatcaacgcggccaccacactcactctattaccggcaggccaaataagctccctgatcctccgtgatcacatcggcaatacaattggtaccgtccaaatgcacctccgttcccttgatttggtttgccatcggcgatcagaggcgtggctccgctcttaccacatcgaggtcttatccgttaagcggtgcccaagggccggctcatgtcgtgaagaccactgtggcctaacccgccctcaaacgttggtccccgaactccaatccgtccaacgattccccggcaacaccttctgccaggactcgaccagtttttggggcaacgactgcggactcccggccaccgcatgtctctattatcggtacttcgctcgaccaaccagcgcgcgcccattcgagctgatcagctgtccatcatggggggtacaaatcgacatgcacctcgaagtcgagtcttcgggcggtcaaactcggcaaatggacctaactctccacccgggcataaccacccaatgggggaacctgtccattacccctctcgctgtttctctacccccgctcccgactctcggttcgaaattcataaccgacggccgttcggcggcaatcatcgaccatcaccccaccgatcttcagtgttcaaacgaagaagcggctgtctacttcaattgctcgttatcccttgaggcttgccaggaatgcttcccggaccatacagcaggaaaggttgaatgtcattgtcgggacctcgacctcgacgcattgttagaaaatccggagtcccggctacccatcaccaccgccaaagtccgacttcgcaatcatggccccgctatattggccacgcacgcctattcgccgacccaacttcacatcgtcatgaaaaacgtctcgctgctcctacgtctcgcccagtcattttgtagagttgaagagcctagactagtcggttgctatagttgttctacaggggctcaattcgactatgtgtgccattccgacctcgaaacagccttagccacagtcgtctgtaatgacggccaactctttgtcatccactgcgcaccaaacgggacggcagggaggcacatcctaccatttgaccgctctgaagtcgcaacggaatgccaagtgcgttgtccggggggtaagagcaaattttggctgaatggcaccctgcggtacatccctcgtcaacgacggtttgggcaccagcaaagaatatctgaaaccctcccgtctaatcccgaaaccttcaacctttggtcaggatttgagattgacttattctctcnncctcaactcctcggcaaaggtcccgccatcctattgcttntcaccattcttgctgtcggcctcgtcgccctttacttattncgtcaatattctccattnnttcacacataccgacttatc

SEQ ID NO: 41694 - DNA, 1033 bp, Heterodera glycines
agcaggtaggtggtgaataggaatcacttgggtaatgatccagcagcaggctcacctacagctaccttgttacgacttttgcccggttcaagccactgcgattaaatcggttccagtctgcataccgaccgaagccggaacactaaccgtccccgaatttctcgaaatggctcagtcccgggcagcgacgggcggtgtgtacaaagggcagggacgtattcagagcgagttgatgactcgcccctacaaggaattcctcgttcacggacaataattgcaatgtccgatcccaatcacggcaaattttcaccggtttaccaacccctttcggggaaggacaagcacgctgattttgccagtgtagcgcgcgtgcagccccggacatctaagggcatcacagacctgttattgctcaatttcgtgcggctgaacaccgaaaatccctctaagaagttgtgcccacagaagcaatgagccaactatttagtaggctagagtctcgctcgttatcggaataaaccagacaaatcgctccacgaactaagaacggccatgcaccaccatccaccgaatcatgaaaaagctatcaatctgtcaatccttacggtgtccgggccgggtgagtttccccgtgttgagtcaaattaagccgcaggctccactcctggtggtgcccttccgtcaattcctttaagtttcagctttgcaaccatacttcccccggaaccggaagactttcgtttccgggaagctccccaccagggcgaataaatccgccggcggatcgctagttggcatcgtttacggtcagaactagggcggtatcttgctcgcgttccatcctttgtctttggtttttgattcgggaagtcattattagcgaaagctctagcggtattccgttctcctggaatcctataatgatcatggtccaaagcagcgatcggccggggtaaggaaaacaacgaaagacacaaaaaagggatgattaagataatcaccccattgataatggaaaaaatctttaatttaa

SEQ ID NO: 41695 - DNA, 1772 bp, Heterodera glycines
ttttgctccccataaatttttgagtacccaaacggccacttgaaaaaatcgattttttgtttcataaatattttttagaaagtcatgcgcacccgtccgatctggcaagttaagcaacgattgctgactagccaaaaggttcgggtgccgtgatgaaacgaaccagcactgcttaccccgcggcacccggcacggtcccccgaaggaatggatttaattaaattctctccttcggggatttttttccattaggtcgtccgttagcgttcgattgctctagtcaatttttcaaaatttttgttgaaatatttgtcgtgctctgaagggcgtgggaggggggggggcgaaggcccaccacgaggccgcgaagaggccgagtgagtaccttcggtgcaggaaaattattaaattttaaaattttttaattgctttttaaatatgccaaaaaatgtaggcttaacttttttagtgaaaattcgatcactcatattttttgctaattgagcagaagcgtaccaaactatgcagggatactccccggtaaaggactaacttacactgaaatgagcgccgagctagctggctcaaaaaaaattttcgaaaatctgagtctttcgtttttatttattttttgcaaaattaattcataaatattttttcagaaagggttctgaaacgcaccaaattttatttacaagttaataaggctctctgatgctttttctatcaataatggaggtgaataaaattttaaaaattttttaattgctttttaaatatgccaaaaaatttaggcttaacttttttttcagaaactgatcagaagcgcaccaaactttgcagggatactgaaaggaagagaaataacctattttaaatattatctagtcagttcatttaaataatttttatccaaaaaatttttttttgggttttcggggcagtccccccgaaccgatgcgcccagatttatggggagaccgaatccttccggaatagcttcactatagcctgtactttaattctgcgttggatttttgctccccataattgtttgagtaccccaaacggacacttgaaaaaatcgatttttttgttttcggggcagtccccccgaaccgatgcgcccagatttatggggagaccgaatccttcgggaatagcttccctatagcctgtactttaattctgcgttggatttttgctccccataattgtttgagtaccccaaacggacacttgaaaaaatcgatttttttgttttcggggcagtctccccgaaccgatgcgcccagatttatggggagaccgaatccttccggaatagcttccctatagcctgtactttaattctgcgttggatttttgctccccataattgtttgagtaccccaaacggacactcacttgaaaaaatcgatttttttgttttcggggcagtccccccgaaccgatgcgcccagatttatggggagaccgaatccttcgggaatagcttccctatagcctgtactttaattctgcgttggatttttgctccccataattgtttgagtaccccaaacggacacttgaaaaaatcgatttttttgttttcggggcagtccccccgaaccgatgcgcccagatttatggggagaccgaatccttcgggagtagcttccctatagcctgtactttaattctgcgttggatttttgctccccataaatgtttgagtacccaaacggacacttgaaaaaatcgatttttttgtttcataaatatttttt

SEQ ID NO: 41696 - DNA, 780 bp, Heterodera glycines
atatatgaaaaatgaataaatttttttgcgttttcgtccctgaaatttgttgtcccactgaaaacggcctatcataagcttcagctatcgctttcatatgaacattatcatcagcatgagcaacagcagagcatgattgtggtgatgatgctgggactaacgcgtgcaatcgcacatgtttgcccagtcgccgaccgtccgcaaatgaaacgccacactttgcgcactgtgcaaaaatggtacaaacattatgccaaaattccatgtaaaagcaaaattggtggcccttggatttttggtggcttgagggatgaatatttttatgagtattcgaaaattaatgccataatgatacacacataacaaccataaaacaggtgcactaccagtttcgtttcccacctcccccgaaattttttaaacaaatttatataagaaaattccaggaaaaagttaaaccaaaattttgaatttttcttttaaaaaaatttttgaaacaaaaaaaatcggagggaggggaaatggaggggcgaaaaagggagggggggggggaatcctattaccaaataccaaaggtttttttgccaaaaaatcaggtcaataatgcatccatccgttcaccatgtaaggtctgtcgtcggaatggtgcgttcggttgtgccctcgaaactctgacacatatgcaaagctcttgacacattcgacgcactgtaatgcaaataataaaatgcactagtgttaattagaaattttattgagtgttcacaacaaccgataaaa

SEQ ID NO: 41697 - DNA, 938 bp, Heterodera glycines
aagaattattgaaatagagtgctatcaaattttgcttctccacaaaaacacaaagcatttactaaggaaaagtggcccaactaattatatggcctattttaaccatgaatcagatctacattaaaattcttggctataattcgcatgtccaaaaaatgtttgattttattcggagccagttatggaataaattaaaagcagttgttactaaatattgaatggaaacattgttttttattgcgagcagctgtattggatttggctaaaaacctatagcagctgatggcattacgtccccattgtaagaggggtgaagaaaattcagcccgcgcacttcctcgctcccgccgtgttaatgttggtcgagaacccatggtctttgcccctctcatcttacgaatcaatgccggagcccttttcgttgccattggaaaattttcacaattcttgtccattttgcatttttgcgctaattttttatgaaaattaaagatttttaggtgtgggggtgccggcaggggcgcggccgggtttttggctcaatttgtaaatgcttttcacctaaaaagatcaaagtgaatttttagtcttggttttaaaaagcaaagaaaaatttaatttctattaattaaacatatagtagtaaatatcaaataataggttgtaattttcgaaatatttacaaaattaagagtgacaataatttttttttttcaataaaatttaattaatttctccaattctccaaataattatttttctctcaaacccctcccccattcttaccaatgcataaaaatttgggcgctactgtaaaagttgttggttttgaaacaaaaggggggacccttttgttttgcaaaatttttttaagataaaaaaccatgataattttttatccggggttttaaggtcgctaatcacgaatctgacatgta

SEQ ID NO: 41698 - DNA, 876 bp, Heterodera glycines
gggacatcggatgcaaattgggcgggatattctccaacagttgggccacatgggctggcagatcggcacgcgatgcccattccttgctgatcgcgttcacttgtttctgcaatgagatgtgggtgggggattactctcattgtcagagacaaagtcaatgctaaaactccaggatttatgccgcatttttgcatgcatgtttaaacggtttttgagcgctcctatatagcataagagcatattttagtgctagttagaaaaaaggaatggcattttggtttttaaaagtttggagcaaaccgaaaatggtccgtcttttttgggagcaaatccaaaatggtctgtcctgttttttatggttttctagctaaagatatgtgccggatttgtagctaataacatgaattgttttctttttgaccgcggaatataacccacgtaaaacaatgcaaaaaatagtgagatgtcgtaattcagaaaagtttcccagcttgacaaacctggtcaggaatttcaccggtgcacaacaaccaccaaatgccttcgggcaatggctcttcaccaccctctgcctttggcaacttctgttggcactccgggattgagtagccacggaagcgaatgccctcttccgggtccaacaccgaagtttcagtgaccatgcccttcatggaacgcattccgccgtaaatctgagggtgaaaaaaggaaattttaatgaatcgaaatcggaaaaataggttttttagaattataatgaaatggaaacattgaataaattggcgctagtctaaaagtggccgtttttgaaacaacagggaggacccttttgttttgcaaaatttttttaagataaaaaaccatgataatttttta

SEQ ID NO: 41699 - DNA, 1217 bp, Heterodera glycines
  unsure (1)..(1217): unsure at all n locations
aaattcgctcccttttattggcaaaaaattctttttttcaaaaaaaattttttcggaaactggccaagacacagttaaaaagtgtaatgaaaacttgcataaaacgcattaataacttgaaataaacaaaatctntaaaatttcatgcttggcccgattttcatttacgccaaaattcgattagaaatgagaaaatgcaaacaaaatttttctggctattcacctgcctcaacccctgtcgaattttttaaatttattgttttggtctggccaatttcttgcctgctaaatatggcgagttttcatttgtattttcactttctaagaccatatttgaaagtgccagaaacaaaaaattaacaaaaaggggtgggggagaggtaaaatttgaactattaaaaaaaaacattttaaaaatccaaaaaattttcctgcccgcgcctaaaaatccttatttgtcttgcaaagatttgcccaaatcgcaaaatttgttcatttttggataaaaaatgtttaaacaaattcatttaaaatcacaatttttcccatggcgcgtgtccgcaccaccggactccctcttgtcgcccagtattttttttttttgaaaaagtgggctgcaaaaaaagtcggcgttcaattttttggggggagtttttttttttttgctacaaatataaaaatgtggaaatttacctcccttttttgatctcaaaagtcttaagttttgttttgtgccttttctcaggaggttggcgacgtggacaactgggcacgagcaattgaggccgatgtgacacaatgtgccgccactttggaacgcgtttatcggacccggggcggcgctgggcatggaccggcggtgggcgtgggaggtaaaaataattggattggaaaatttttattagacaaatacatatgatcgccaaaattcaacccacctgaaactttaaaaaaaaaaaatttcctttcgagttttttctcgttaaaataaatttaacgagtcgattcaaatgttttttatttaaaaaaaacaattataattacaaaaatttagaaacaaaatttttttttcagtttccttcaaatcagtgagcaaaaatttttttttggttttaaacctagaattttcaccaaatcttgccttaaaaagaagagtgccctggaacccctttcaagatgcctttaagtgaatttttttttgaaaatttaatttcttt

SEQ ID NO: 41700 - DNA, 1568 bp, Heterodera glycines
  unsure (1)..(1568): unsure at all n locations
gagaaataattcaaaaatattataaaataacgagaaataaagggagaanggaaagaatatttacaaaaagaatgggttaaaatagaaataaaaatgcaaaaaaattggggacaaatcgccaatatatttataaatggattaaagaattagaacttaatcaacgaatacagaaaagctataaatcaacagagtttgccaattaggatcttttntaaggaattagattcatactctactgatcatcaaaattgtaatgaaagtagggaataaaaaaataaatattttctggtcagtagggataaaaatggttatttaaccgtggaatactttagtttttatttcattataatctttttaaaattaattgagagatggatgaaacaatttggcattagccgtaaagaataacggaggaagaaaaaatggaaaaaatgaaaatttattggcaaacgaaaaaagaaaatccaaaagtgagtgacaaaaaaattgcgaaaattatgaaaattagtcgaaatagcattttcaattggaagaaacaatttggagaagaagtgcttcagagaacagcagaagaagaagaatgaattgtttaaaatgttatttttggtgttttttttctttattaattatgctaaattataaatttcattatttttttcaatttcttcaaatgccgaaattgtaagaaaattggagttagtcgcttagttaatgaaaaatggatgaactaatttggcattcacatacacggatttttcaaaatttatagtcattcagtgaattggttatctattttttgaaacttttgaatttaattgctttatttgactcggctaattgatttatacaattgaaaaatggggtacaaatgtttagaaaaatattaaaaaatagctgacatttttaaattagtataacgaccattttcataggaaaaaacatttgaaaaagaaataataacggaggggtgaaatcggaacagcttctaaaataaataggaaaaattaattgacttatttttaatgtttggtttcttataattttaaagatatagaaatattttttttagaaaaaaaaagtgaaaaacaacattaaattttctcatttttcaaattagaataaataattctcgacaaacttctgttccattatgctcattaattatttttctaaattatcggcttatcagtgactaatattgtggctaatttattgatccaaagtcgaattaaagcagcatttgtttggtggcgttaggcatcgataagaagaaaattaagtttgacttaattatgcatttattttttaattttaacacgccaccggtgctgcttaatagaaatgacctgaaaaattgcgaaaatacagccctacgaattgaaaattcccgaacaaatttattttggaggatttttcttttttaaaaagcgtttcataaacttcaatttaaaaaaatttcagctctcaatttattattttgaaaattagcacatttttcaaattataataattaattctcgaccaagaaagttccactatttcaataattatttttctaaagttatcgg

SEQ ID NO: 41701 - DNA, 1232 bp, Heterodera glycines
ctttaagcatacattttttaactgaaaaatgagaatttaaaataaggactgccatctaatttttgaatttacacatttgctaaaagagaaattactggcaataattttaatcgaaaaatttggagtgacttactgcgaatttcccgattaattattgcagttaattaataacggtaataattttcaaagtatgacaaattcaaaatatatttccaatacataaactagaaagcataaatgtaacgaataaataaataaatacatttgtccttgtcaataccaattaatttaatctttcgtcgccaactctcatcactcacttttcgttttgtgtataaaaagggagacaaataaataacatcatccagtttttattgcaaaattttctgctcactaaatgcaataattgatttaatttacgaaaagattagctaaaataatgcaacttttgtgagcatagaaattagagtgccacgggaccgggaattttgggcaaacccgggaccttttcgggttgaaaaaccgggaatttttggctgggaaacccaggaaaaaaccgggactagtcccggtgccggtcaaaaccgggaccttggtactcagttgtactcagttgtccgctaccaggtcccggtcccgtggcactctaatagaaatacataaaattttttagccaatgttttcatattttaatgaaataaacaagaggaattttcaattttcttgcaaacactttttgaaaatattatctctaattttcatcaattttgacatttactcggaattcccgaaaattctattcacgcatttttgagtgtttctaagcatcgatcactttataaatttgttggattagccatattattacagcttttaatacgcccgtcaaaaaatggtccactacaaattgtattattttgatctcactgctcgtggtgagccaatccgatatttgctgcactacgctggccaaccctttgaggacattcgcattaaagccgaagattggcaaacagaaaagccaagtgaatgttgagaagcgggcggcggggggcggctaaacgggtctattaagtggtcactgctgatcagtcatctcccattcttaagccgactgactcgaggaaattaagttcgagtgattatagttgattacctagatcaagaaaaacttaaaaaatcgctacagaagcccaaatttggatatgagaattcgtgatgctgagttgatg

SEQ ID NO: 41702 - DNA, 865 bp, Heterodera glycines
gaaaaaactattcgctttgatcttccgctttacgctccgcgcacaagatggtaattaccatttgcatcaacattaaactctctaccattgggttggatgtaatacaccagtgtatcattggcatcatagcaaaagcgattaggatttttttgactactgtaactgagcaaaccgttctcatgacgcttataaaaccgtgctccttgggctaagtctgagaagtcaatgacagtattatattcataagtttcgcgcaataactgtacggtagcggtgcccaacaactgaaaatggaaagtgagtacaattaccggactaaataaactttaaggattataaaattattccaataaaataataagcataataaaagttttttcaagaaagaaaatattaaattctgaatttttgataaaattttccaattgttaggagtgtattttttgaaattttcgactcgattcttaaggtgtattttgattttattgtatttctgtatccgaaaatccttaaaatcggtaacacaaattctgaaatagccataaaaataggtaaaaaaaattttacaaacaattttctggcagttaaaaagcaaacaaaaaggttaaattttggattattgctgtgtaaacgaataatttaaatatttatgagtttttcttagaaacattgacatcttaccaaaaaaaaaaaaaatttttaaaaattaaattaaaaattttgtcaagaaaaaataaataaatttgggagaggaatttttgagaaagttttccaattcttgggggggggatatttttcggatcaatttttaggggtgattttttgattttattacattttgtttaagaattatctgaattaagtg

SEQ ID NO: 41703 - DNA, 1433 bp, Heterodera glycines
aaataaattaagcgatttcctgaaactgtaattgattttaaaaatgttaaaaaaagaattaagaggcccccggcattccgataggaaacgtgggacaaatttttgaaaacacaggtcgaatttcaggcgatggtaaagaattggggtctctaatttgttttatattttaggcgcaaatcagttttagagggtactgatgacgaatctgaattcgtacatattttgtctaattcctaactccggatccgaatttaatagatatattttaaatataagtaaacttaatataaattatcatcgcctttctttcaaaaggtaaattcatcatcatcataagtagggatgctaattttatgtaacaaaattgcgaaatatgtaaataaaatatgtataaaaaatgctaaaatatgtatgaaatatgtacaaaaacccccaaatatgtactaaaatatgtaaataaaatttttttaatggttattttttgaaaaaaattcttcgtaaaaagtgaaataggcacaaaatgccataaaaatgaccaaaataggcttagaattagagaccggaaatttcaaatttgcggatcctgttgcaggattggaattcaaaattttttacaggacaggatccggcaggattaatcctgcaaatcctgcaatcctgcatgtaaaatctgcaggatcctgcgcaggattgcggattttaggaaatttcaaaaaattctgtattaataaaaaagtctttcaaagtataaaaaagtattcaaatatattttgaaaccaaaaaatgatgaagatgaaaaattaataacgtttttttgcttacactccaagcaatcgactgaatcttctttaatgcgtttaaaaagaccgatttgccaaattgggtggctcataataatagcttaaattaaagtaaaataatttttatttaaatttctttgcaaaaaagccataatccattatgtatagggatgggatttttaggcacaaaaaatcgcgaaataggcacttaaaaaggcagaaaaatcctaaaataggcacaaaatagtaaaaaaaaaaaaaaaatattaacgctttttaggtagcaaaacacataaaaaattcaattgtataaactttttcgaataaggataagtttttaaacgaaaaacttttattaagaaaaaaatttttgaaaaaagaaagtttctgaatatttggcattctatttttaaaaattttcaaaaaatcaatgcaggatcctgctgaatcctgcataaaaatcaaatttgcgggtcctgttgcaggattggaattcaaaattttttacaggaccggcccggccggattaatcctgcaaatcctgtaaatcctgtattttccaaaatatgcaggattgcggactgggatcctgcaaaatcctgcgcaggatcctgtcctgcgccggtctctagt

SEQ ID NO: 41704 - DNA, 539 bp, Heterodera glycines
aattccgacttccgacttccgagttccgacttccgattttttgggtcggaattccgacttccgaaaatttttgggtcatcggaattccgacttccgacttccgaaaatttttagtgcctcggaactccatccctgatacacacacaccccatgtgtgtaatttttacacatttttgagtaattccttcatttaatcattatttttcttaatttttgttaaattgtatcttctattccttaataatttacaaattgtgttacaaaaccctgactatttttctcgttaaatacctttttaatttattccttttaatattagtaatgacacattttttcaattttatttctgaataaacattcaaatgaaaaatacaagtgtaaaatagagaataaaggaaattataaaaagaaagtatgcaactcttttgatagatttgaaggcatatcagaattcttagagttccctttgaaaaaagtgaaaaaacacacacagggaacggcttcacccttcggtccccaatccatgctgtcacgcacca

SEQ ID NO: 41705 - DNA, 1162 bp, Heterodera glycines
ccaaaaagtttaggcttaactttttttatataaccttttcagaagcgcaccagattttgcaagggcatcaaaaagacaaggaaaagcaccgctatgatgctaacgccagtaactctttatttaaaaatttttattaatttttaaaacttcactattttatttttttaatagatttttaaatgtttggattttttttggcttaccaaaacttcatcgaacctggttctttctattctctttctaatcgccccaaattttttttacagcttaactaggccctattaagcttatttccagaaaatctcgcatgaattctcatttttaaattttttatagatttttaaatgtttggattttttttggcttaccaaaacttcatcgaacctggttctttctattctctttcaaatcgccccaaatttttttttacagcttaactaggccctattaagcttatttccagaaaatctcgcatgaattctcatttaaaaaattttttaattgctttttaaatatgccaaaaaatgtaggcttaacttttttagtgaaaattcgatcactcatattttttgctaattgagcagaagcgtaccaaactttgcagggatactccccggtaaaggactaacttacactgaaatgagcgccgagctagctggctcaaaaaaattttcgaaaatctgagtctttcgtttttatttattttttgcaaaattaattcttaaatattttttcagaaagggttctgaaacgcaccaaattttatttacatgttagtttaggcactctgatgctttttctatcaaaaagggagatgaataaaatttttaaaaatttttaattcctttttaaacaggccaaaaagtttaggcttaactttttagtgaaaattcaatcactcatttttcgagtagtgatcagaagcgcaccagattttgcaggggcctaaaaaggtcaaggaaaggcgtctctgcgttgatttagcagtagtacctatgaatttaaattttctatgaatttttaaagttttttgaaatttttttaagtgcaaaagtggtggtgtctgcaaaaaattttcaccgggtttaaaaaatctaggaaaattagtaagcatttgtaatgtgcgcgatacgtatccctgcaaaatttggtgagcccctga

SEQ ID NO: 41706 - DNA, 1117 bp, Heterodera glycines
gcttcaacggttctcagtgtaaatatagactgcccattcaaattctgcctttccagccttatggaaagatattatggaacttttggttccatctcagttgtcaacaccgcgactgcatcgttattatatcagtcgatagaattttcgaatcgcttttaaatcgtctcttttgcgtcccttaatcttcactctgagccgagttactgcggtctaaacacgtttttggtagaattgcggccagaatttaaaaatacagtttgctatggcttcgcatcacccgcttcaacgggtgctcagtgtaaatatcgactggccattcaaattctgcctttccagccttatggaaagatattatggaacttttggttccatctcagttgtcaacgccgcgactgcatcgttattatatcagtcgatagaattttcgaatcgcttttaaatcatctctcttgcgtcccttaatcttcactctgagccgagttactgcggaaacagtttgattacgaccaaataaaaatttgaataataataacatacgagcgctaggcgccggctcggggggtttttcagataatttaaaataaattttgatagagttttattaataacgtttttcatccaaatctcatttctctcaactttgtctccttcctgtctctttctttttgtcaaattgataatatatgtaataataatctttttttggcacccccacaaagtgtccaagccacgaaatgtccaaaagagtaaaaacccacgaaatgtccaaaatttataaaaacaaaatgagtctaatttaggatttttagggttttcggggtcgctgaatacgaatataccctttatattaccccttgcctaaccttaggcccatctgaataataaaaaactcaaattcgagacttggacatttcgtgggctggacattttgtgggtcagcgctttttttattttataaataaagaataagataaacagaaatcgtgctggcgcgtttgttaaaaactgccacccatgcgcgtttgttaaaatgccaatgggtttgaaaacaaaaaatgggtaaaataattaaattaatagcttggctaagattcaaccaaattaatatttcgtggta

SEQ ID NO: 41707 - DNA, 808 bp, Heterodera glycines
aaatttttcaaacttaattacataattataaaattttcaggtttgcaaaaatgtggatgactgcgtgtacgtgaatggcaaactcgaaaatgccgcttttggttgtgttgttgtgtgcccagaggcagttgggggcgttgttaatgcttgcggtggcatcaatttcataatcaactcgcagacctattgcgttacgaacacacaatgcccaatttagtcgcaaaaatttagaaaccatttaaaaataataaatataatatagtaaaattggaatgcttgatttgataaataaatatctacttttaataagtataaatttgaaaatttttatttattcaattattaaataaatacttagtaaaaattttcattctttcggtaaaatttgtccaataacaaaaaataatgtgtgggtttatcggaaggaaaatttgcctgcgtttccaaataaatagtttctcaatttagttgcaaaaaggcaattaattaaaaaaacccattatctataatcgtcaattccttaattataattttaaaaatcaattaaaatttttcttgtctctctgtgccgtggtgggaatgttaaatgctctgctgttcgctaaaagcccataaccttatgaatgtaaagtggaaaaataatattctgttttgctgaatcaaaatttaatgaaaatgaatcggataatttgctatgattcagtgcaaaaaaagatgagaagattttaaattaaaaatgaataaataaatggaataaaaatattgaataatagaagaatcatttaagtaatttttttttaatttacta

SEQ ID NO: 41708 - DNA, 837 bp, Heterodera glycines
  unsure (1)..(837): unsure at all n locations
ttaaggtacttggactttccacagaaaatgtggtacaaattttggaactgtcccgcctcacggtgggacttaaaagcagggtaaagccaagttaaaaacttcagaggagaattaattgttttgaatttttacatttaatttcttagagtcaaaagattcgagacagaagcataatttaaaatcaaaaataattctattaaattttttacattttagtttcaaagaaacaaacaaaaaaatgttcccaattttgaaaatgaaatagtgcacaaaaagggagggatgtttagacgaaaagagaaatttttaggaaggtacgcaccccatctgatattcacccttttctgttccataagaggccagaggcgactgtgttggttgacaagtaattgtccaattaaggtgcttggacattccacagtaaaatgtggtacaaattttggaactttccgcctcacggttggacttaaaaacatggtaaagccaagtgaaaaacttcagagaattatttgttatagtttaatttcttagagtcaaaaaatttcggaaccaatttttaaaacgaaacagtgcacaaaaagagagggggggggtagaagacgagagtaattttttgaaaggatcgcaccccatcgaatatttccttatttctttttaataactgtccaaaggtgactgcgtcattgactcttctgtagtccttaaggtacttggactttccacagaaaatgtggtacaaantttggaaatgtcccgcctcacggtgggacttaaaagcaggtaaagccaagttcnaaacttcagaggggaatttttagtnttgaattttacaattta

SEQ ID NO: 41709 - DNA, 925 bp, Heterodera glycines
tttgcacttttccttcccatcatttccaaatgactcccaaaatgcccttttcctctcttttctctccctttttcttttcctcttcctttttgtcctcctcctcttccttcttcctcttttcctcctctttttttctcgttttcctttccttttctgtcgctgtgttttccgcttgccaagtgatgaccaaaattgagaaagtgtacgcaatggtggacgaatatcagagaacttttgcgggcagtgaaagacaatttgagtgagttaaatgggcaaaaacattcattggattaaggcctaattaattagtccattttggtaaatccaattcaaaccccccgcccccccccccccccctctttttgttacccctcactttctctcgttttcccttcgccgctctctcagcgtggccatcgcctcactgcgacctcaacgccgccggagaatcgcttcaaggcccggaagccaagttggacaaaattggaacaatgagttgtgccaatgtgatcaatcccgtgccgaccgttgtccgcccggaaagcccgggaaaagggggaaacggggcaaagacggaaagccgggtgagtgggcgaactgtgatgagattgtctatgctttttcccaggctctcccggacttagcggtgcccccggactccccggcaatcacccgcccgtccctttggacttcgaactccaatgccgcatttgtccgctgggcgaacccggtgaataatgtttctgaggtccaaccaatttggtgaacactttcaggcgagcggggaagagccggcgaaccgggcgaagatggaaggccgggtaaaagcaaaactacggaaaacagcggaaaaaaacacttttttaggggaaaatggcacaacgggcaaaacaggaaaagtaatggaggaaaaaggataaagcaa

SEQ ID NO: 41710 - DNA, 1028 bp, Heterodera glycines
atgacgagatcgtaggccataattttttttttttttacatatttttacaatgaaatgtgattaatggcactgccttcccactgtttaaacgtttcatgccaatattttaaatcaattgccaacattatttaagggcatcaccccaaaattgggcaagcaaatgcctcccctctatttaagcgtttcatgccaattttggcgcgtaatttaatttctcgcttttttatataattttttcgtggtaagcggatgtgacaaaattacatgtgtgggggggggggatatggccgaggaaaggtcatttcagtcggggaaaattatttgtataattaaatttaattatttttgttgtataatttatttttccatctgcttacaaatcagttatattaaattttaataattatcaaaacaactattagaagagtgatgaaaccgaaaaccatatttcatccattcagtctattgcaattttattttttttcaaattttatttttatattttccatttagtgcctgttttgagggtttttagggcctgcctatttattgaaagccatcagcgagggagggacaaaagttttctaattttcttaacaatcgctaatggaaaatccattttccgtagtgccagaatttccttatattcttaggcaaatattggacaaaatctgttcaatagccccagcaaaaaaaattaacttgacaaacataaagcaaatttttttactgggggttaaaaaggctttgaaatggcaattttgaaaaatgagattggaaaatgatgatattgccaggccatgatcagttctatttagtggctttttgttgttgttttttttttaaatatttatttaaattaacaagtaaagaaatttcggggagtgacgtaaaccaaaattagtgctttttgtcaatgaaaaaaaaatccaggactaatttttagggtaaattataaagttaaggcataacaaaaataaaaataatctttatgcaccgaagaaagaaagacaaattaaaataggaaa

SEQ ID NO: 41711 - DNA, 922 bp, Heterodera glycines
gctaattgagcagaagcgtaccaaactttgctgggatactccccggtaaaggactaacttacactgaaatgagcgccgagctagctggctcaaaaaaattttcgaaaatctgagtctttcgtttttatttattttttgcaaaattaattcttaaatattttttcagaaagggttctgaaacgcaccaaattttatttacatgttagtttaggcactctgatgctttttctatcaaaaagggagatgaataaaatttttaaaaatttttaattcctttttaaacaggccaaaaagtttaggcttaacttttttttcagaaactgatcagaagcgcaccaaactttgcagggatactgaaaggaagagaaataacctattttaaatattatctagtcagttcatttaaataatttttatccaaaaaatttttttttgggttttcggggcagtccccctgaaccgatgcgcccagatttatggggagaccgaatccttccggaatagcttcactatagcctgtactttaattctgcgttggatttttgctccccataattgtttgagtaccccaaacggacacttgaaaaaatcgatttatttttgttttcggggcagtccccccgaaccgatgcgcccagatttatggggagaccgaatccttcgggaatagcttccctatagcctgtactttaattctgcgttggatttttgctccccataattgtttgagtaccccaaacggacacttgaaaaaatcgatttttttgttttcggggcagtccccccgaaccgatgcgcccagatttatggggagaccgaatccttcgggaatagcttccctatagcctgtactttattctgcggtggattttgctccccataatgttgagtaccccaacgacacttgaaaaatcgatttttt

SEQ ID NO: 41712 - DNA, 886 bp, Heterodera glycines
attttgaatttgtgccatttggcgttttgtttccaattcgcattccgtccctttcagcagttgcgccgtgactcttcgtccctccggcaacgctttccgtcgcccgcggcggtgtgccaccgcactttcttctccaatcagcccaccgggcagcactgttccggcaaagatgccgcctcttcgactgcgcgtctctgctgccaattgcgcttccgccccttccaaaatcggcacttcaccgccctgagattggaaaatgcggtcacttcggcactgattcaatactcacaatggaaatggaggggcaatggcaaagggaggagaaacgaaaaaggggcagagaatgggacggagagcgacagacagacgacggattgggaagagacggagagacggcgagtgcgcattcagttggacggcacgacgcacagcacagtcggcatttaggaccataaaagctaattgaggcaattctacccaaaacttccattttcagattcttgacgaagaattgggactgaaactgtccatgttgggactgaacggggcaaagtcggccggcgctcagttggacccgggggtttattttgtggagaatcattcggacggatcgctgggcgaaattacgggacaaattgcagtcaaccgaatcacagaacacgagtaaacgggtggactttggtaaatgaattttaattcaaattgaatcatttagctttcacaaattgggatgggttccgtttggacgaaaagggacggccatttgtgcaataacggcgaagtgttcctggacaaaatccatcacgcccgggcggacgattgtgccgagcagcgcttccgatcggtgctggacgcgagttactacgtgaacggagacaataatgtg

SEQ ID NO: 41713 - DNA, 1011 bp, Heterodera glycines
ggaatactttgaactaaaattaagaatacaaaaattcagtttacgcaatgttacgatattaaattattttttatattaaatgttttgtgaattgatagataatatgataaatatagtgtaaagaatttttaattttagttaatttattaatttatattttcatgtatcctgtttattgtagtggttgttatatgattacatgagatagtccattgattgtgcaacttaatgataattgtgttcaatatattatttaaaatatatttatttatttattctttttatttatctgtctctgtttgctaataaattttctttaaagttttttccatccatatatttcaacctaaatatttattttgtttaatgataaatactattatttttataaaaactttatcatattaatttattcttgtatgtgcatgttgtatggtaaatgaacatcggcctcgagaaaataaaaaggaaaaagaacgcaattaatttaaaaataatattatactaaatatgttttaatttttaaaaatttatttattttattattaaataaaattgttttatttttaactagttttttaatttatttttttcgtttaaatattcataacaattttcgcaaagaaaaatgctataattaatgaacgtaaatttcttttgataatcataaattcataaaatttattattacattcaaatattttgtaaatgcaggatattatttaaattggacgagaaaaaaattcagttgataatttttttttttagtatatttttgtttatttatcgggttttgtgcccttgaatttaatttcctttttcttatatatttatacaaattattctacatttaattagcggttaagttaatatatacatttttatattttattgttcaggtgttaaatacttttttaataaattaaattttatagatgaaattcaaaaaatatgtcattatgtcacttagatcttgtgattttatttaaattttattttttattatttgat

SEQ ID NO: 41714 - DNA, 872 bp, Heterodera glycines
  unsure (1)..(872): unsure at all n locations
aattgtgaattaattctcagaaaaatggctatctctttttaggacaantntctatctcgnaaccccgangctactctgttccacagagactcttcaaaatttttccattaccgcaagagctgcggaaattgtgaattaattctcagaaaaatggctatctctttttaggacaattttctatctcgtaaccccgatgctaatccgttccgcagagcctcttcaaaattttttccattaccgcaagagttgcggaaattgtgaattaattctcagaaaaatggctatctctttttaggacaattttctatctcgtaaccccgatgctaatccgttccgcagagcctcttcaaaattttttccattaccgcaagagctgcggaaattgtgaattaattctcagaaaaatggctatctctttttaggacaattttctatctcgtaaccccgatgctaatccgttccgcagagcctcttcaaaattttttccattaccgcaagagttgcggaaattgtgaattaattctcagaaaaatggctatctctttttaggacaattttctatctcgtaaccccgatgctaatccgttccacagagactcttcaaaatttttccattaccgcaagaagtggggaaattgggaattaattctcaaaaaaatggctatctctttttaggacaattttctatctccgaaccccgatggtaatccggtccgcagaacctcttcaaaattttttccattacccgaaaaggtggggaaattgggaattaattctcagaaaaatggttatctctttttaagacaattttctatctcgtaaccccgatgctaatccgttccgcaaagccccttcaaaatttttttcattac

SEQ ID NO: 41715 - DNA, 919 bp, Heterodera glycines
  unsure (1)..(919): unsure at all n locations
tgtactntaattctgcgttgagtaatgctcgccataattgtatgagtacctcaaacggacacttgaaaaaatcgatttttttgttctcggggcagtcccgccgaaccgatgcgcccagatttatggggagaccgaatccttccggaatagcttccctatagcctgtactttaattctgcgttggattttgctccccataattgtttgagtaccccaaacggacacttgaaaaaatcgatttttttgttttcggggcagtccccccgaaccgatgcgcccagatttatggggagaccgaatccttccggaatagcttccctatagcctgtactttaattctgcgttggatttttgctccccataattgtttgagtaccccaaacggacacttgaaaaaatcgatttttttgttttcggggcagtccccccgaaccgatgcgcccagatttatggggagaccgaatccttcgggaatagcttccctatagcctgtactttaattctgcgttggatttttgctccccataattgtttgagtaccccaaacggacacttgaaaaaatcgatttttttgttttcggggcagtccccccgaaccgatgcgcccagatttatggggagaccgaatccttcgggaatagcttccctatagcctgtactttaattctgcgttggatttttgctccccataaatgtttgagtaccccaaacggacacttgaaaaaatcgatttttttgttttcggggcagtccccccgaaccgatgcgcccagatttatggggagaccgaatccttcgggagtagcttccctatagcctgtactttaattctgcgttggatttttgctcccccataaatgtttgagtacccctaaacggacacttgaaaaaatcgatttttttgtttcataaatatttt

SEQ ID NO: 41716 - DNA, 1283 bp, Heterodera glycines
ttgtcgcggcaccaacggacaacgacgccgcaacaccagcggaggcgactaacacacagtcttcccttcctcccgtggaacagccgccattttcctcccttccgcccacccacgcgaccgttgcggacgaccaacagcagcaacacccgcacccgaaacgcaactacgcatccaaagattgtggggcaaaggtagtccaaatgggtctttttaaattttgatttcacattttaattcttgtaattgtcatttaactgttgcaatttaaggtcttgtattggaatgctgaggccgaaaaccgcggtgccattctcaacgacccggaaagggacgattatatgcgcaacccatgcgaacgggcgcagaacaaatttctgatcattgaattgtgcgagactattcaggtacctaattaaatatgtctacaataataaaacaattaatttttaaattttgatggttcgtaattagttaattattttttgctttattttttaaccttaaaaataaactcacaaattttcagcccactgcgctggaaattgccaattttgaactgttctcctccagcccccggcagtttcgcgtttggggtagtgaacgatatcccacgcaagaatgggcactcatcggcgagtttgaggcattggacaatcgcgaagtgcagctattcaatgtgctggaacacacttcgtacgccaaattcgttaaggtaatgacctatttgcatatttttaatctaggcttccctaatcttaatgttagcccaaaattcattttcatggcacccccaaatttatttttttacacaaaatacagttggaactgctcactcactatgggtcggagcattactgcacactgagcactttccgtatgtacggcacctcaatggttgacgaatacgaagcggaaactgtggtggcggttgacgccatgcaacaacagcaacaccaacaacagatggactcggtgttcggccgcacattctccacacttccgtccacaaattcagcagcggtgaatgaagctgtggtggccacgggtggggaggaggaaaacagacagaacaacggcacaataacggaaaagacaccgctgacgacagtggtaattcacaggccgaccgaacagccagatgttttgcgacgctgtcgcaagtgcccatatgaaatggcgtcgcaatgtgattggttttgccacgtattctttggccatcatcagaaaatcacgacgacagagatgacaaaagcgacggactcttcctctccatccgctacttt

SEQ ID NO: 41717 - DNA, 1017 bp, Heterodera glycines
  unsure (1)..(1017): unsure at all n locations
cccctcctttnttcaaagaaaaaaataataattttcaantcgtgtaaggcactttttaaagtgaattttggtgaaaaattagttttcggttttgnctcgaattcgggtccgaggttcgaaattggtcgaatgggtatcagattagttatcagcgacctcgaccccataaaaaattgtcttacacggtttttttaaatttttatttttttgaaaaaaaggggggggacaaaccaaactattacccaaatgaaaaagtcacaatgcttatcgcaaattttaattgcaactttttgttcgaattcgaatctgggattgagaataggctaaatggattctggattcatgaacagcagggattgggcggcgttgccgttaggcatcgctaggaaaatttttttgaaaattgtacaattaacagattttttccaaaacaaaatttttttttgtgattttgtaaggaatctttaaaaattgagaattttgaagtccgccggtgccaaggacagagccgggaaaaattgataatttacttgtgatttgttaaccgattttgctgaaaaaatgacaagtttttgtgagtttgagccacacaccatcccagaattaaaaaatgacgaattttgggaattatttttgaagctttttgccaaccaaattggataattttggtatccttcgaaagctcttgataatgagaagctttttctaagcaaatgctaagcgatttggtgtaccagagaaaagttatgaggctttaaaattttgtttttcttataacttttgatctagcgcataaacaaaaatactttttgcattaaccgatgcagaatatttttctctatcgatttgcaaaatttggtgtggatttaacatgcagaaaaaaagttaaacatcacgaagtgaatgttgtttttcctaataatgaaaatattagatagtacgccaaaaggagacaaaaaattagagaaaaaaagataatgtttttctctggcattctctatttattggtacacatct

SEQ ID NO: 41718 - DNA, 1419 bp, Heterodera glycines
  unsure (1)..(1419): unsure at all n locations
gggaattagggaggaaattagaaaggagaaagggcgataagagatgacgacgaaatggnataggcatggaagaaaacggggagagagaggagagggagagagcaagagagagcaagagagagcaattgagcaattcactaagtccaacgaattcgtaacgaaaattgagcatcaattagcttacattcttccaagagtctatcgcatttttacttcctagttaaaaatggttataaatggtggatattcgagggggggggggaattgggacccccggggattgggagccttaaaatgcgacacctgaaaatagacagagggaaaacagggcaccgaattcattttaaaaatatatttatttacaacaagaaaatctattggcctattctaataaattataaaatatttaattaaaagaattttgagtgaaattaaattggctaaatattaaatttttattgccaattgagtcggaaaccctgacggaatttaatgaaaaaattttcactatttaagacgaattcaataagcacgagggaaagcgaaagaaattttataattgaaaattatttggcgggaaagcctttgggggaaagaaaggattaagcaaattgcaaatgaatgaaaaagggagaaggaaaagggaaggaccaaaggattcattccctttttgagatggcacagaaagaataaaataattcatcggatcaaagccccgtggggtcttttcttttgagggaatgccgaagagtcgcggccgagtcgagaaaagtttcggaggttttgggtccgtttttaaatatttctttaacaattaattctttatttctatattttcgcaccgccggacccgtagaataaaattattcattttcatctcagccaaatgccaaaaaaggcaaagagatgagccaaagaagctaaatttttgaaattgttttaaattttcctatttcgtctttcccctttgatttcttttgcccaaaattccaaaatttccactcttttttggggtgtacccttaaaacgtttaccatttttcttttttttgcttccaattccgaagaattcagtaaaaatatctcttcttaaataaatcttttttaaaagcaatttgaatgtgatgagaagacaatccatcagctgataaatgaagtcacttttttccgtatccaccacacccgccaccgtatcctccaccgccgtatccgccgccaccgtatcctccacctccgtagcctccgccaccgtatcctccgccaccgtagcctccaccgccgtacgaaactgcacatgttctacacgttgtcaccgtgctaacacagcacgtctgttgatagcagcatctgacatcaaaggaaagaattgaaatctgagaaggaatgtgagagggaagggggggggggaggggccgtaaga

SEQ ID NO: 41719 - DNA, 849 bp, Heterodera glycines
tattttctttctttatcattttatgaatcctttcttagggaagacgggagcaaaaaggagggggaaaaccttttttctgaaaattcagatttatggcatcttgcaacattaaactatttttacatttctatactttcatttgcttataaaaaattaaattagtaatataaaagaatttaaaataaacattttcttgctgctatttaaaagtccagatatatcatcaattttttcaaatggtataaaaaattaaataataattttttaaaactactaataatttatttaaaaaaggcttagatttttttatataaatccttatacttaaatttttaatataattttcttttgatttcatttttaaaaatatataaccgaatgaaatttcatagccgatctgttgatcatttgttggtgggtttgaccttttccaacacccattaaaaaactgtaatattaaaatttcatgattgtgaatagagaccggacgggatcgggatcccgcgggatttcttcgggatcccgacctcgggatccgtcccgagcgattttttaaattcatcgggtttgatagggatcgggatttcatcgggatcccgaacggcgatccctcccgaccattttaccaatccgcgcgggatcccgcgggatggaagtcacgataattttcaaaaaatctcatttttttaaattaagatcttgaattttaaattaaaaaatattgtcattgactaatttttctttaaaaaaagcccaaaaaaattttacaggtctccaaaattccactaaaattttcaaaatttgatgcaaaagttggccattttgtgattttaattcttccataaattt

SEQ ID NO: 41720 - DNA, 146 bp, Heterodera glycines
cattttgtccaaatttttgaatgccaatttgtcatcgtaccctcccaatattatgcttacatttaaacatttgaaaaatataataatttttccctaaaaaacatttatataaaaaataatgccattttaaattcattacacatttt

SEQ ID NO: 41721 - DNA, 802 bp, Heterodera glycines
tcctaattatcatttctcctaattagcatatctacctctttaccaccccaattattgtcataagcccctaacttcctcctcgtgctcttcctttcccttctctctctccgctttttcccaatggctccgtttcggcactttttcctcctccccttatattggcccatcaacttccacttccttttccatttcctcttccatttccctttcttggccttcttcgtgcttatgctcctcaattcacgttccgtctttggccaaacccccgcggctgctcaatgccaatcggtcggccaatgggccgattggggccaatggcagccgtgccctcaaaacccttcgaggccggagttgaacgtacagcggcggacacggatttgtcagccactgccaattgggtgcattcagagcagaacagcgcctttttattgcccgtaaatcagggaaaatgcacttcctaacaaacagccaccttgcctttagagggacctatactgaagttttaccatgtgtaattacgactacggttaccgtaccagtaataacttcgacccaaacaatgacaacaacggcaccaccaaacgtaatgttaattgacaggacagcagggtccatttcaattgttatttagaacacatgtgctcagtggaacagttggatggaatgggtaagtaggatttatgtacagaatcaaagaaattggaaatccgacggtttgccaattaaaaaaaccgaacagtatcggaaatttgggatgagttatattttgattggattcaagggcgtatctaggggggggggg

SEQ ID NO: 41722 - DNA, 900 bp, Heterodera glycines
  unsure (1)..(900): unsure at all n locations
tttcaggctaatggaaaagataaataaactgccattttacaattagctaactaacngtctagaaaagctgtaaaatttggtggtaattcttagcaaacaaatgcgccatgtccaaaatattaattaatagtcgcgacaactgaacttaatacaaatcacatcaaaaattcttgaggttcaacatttttgtctcaataaagtaaaaaaaaaagaagtctattttggccttattaggccgaactgaaataaaccaattttttcaaaacatttgacatttggcaacaacaccaatcagagatactgttaaccaaaagcaggatctgatgtcttaatgcttattgttagactgctttttttgtccttttttaaattgaaagacaaaggaactgatggggaaattttttttttttgcgatacgaaattttgggtaaaaattttatatgtttttccattttcatacagctgaacatagaaaaaacatttctgaataatttatagctttgatcaatcaataaattttttaagacgacttgagtcagccgccgcttgtcaaacgttctcaaagtgcacggaatttacccggtaattttttgaaaacatcatataatcagtttggtttaataaggctaaacaattcagcaacactgcattacattgaaattttatcagagaatcactgtgaaaaacagggttagggtgttgtaaaaaattctattgtcactgtcacttgaaattttttcgcacaaaaccaaaattacggacggaaagaatataaaattagctacaaaacataaaagaccccatgtctgttgacttctttccatggggtattatcgaaaagtcgaaaatcgattatctcaaaactatagtattctaggggaatgattttttaagcctacc

SEQ ID NO: 41723 - DNA, 1194 bp, Heterodera glycines
gtccctccgtaccggctcaacaaccgcacgctgttttccctgtgccggacgtgttcggaaatgtacccgcgtggcttgattgaccccgagtacaactgcaaacattttgaggactctgaaaggggtgggtttagaaacttataattaagcaaatatttttcttgataggattttcgacaactgtcacgcacattgagctggaggccgccctccgctctgggtacaggtgacgcatgtgtaccgtgcctacatctggcggctcgcgtgcgattggagcaatgggctgttccactcgtacctgctgaagttcctcaaaatgaaatttgagggtgaaattttggaaaaaaaattaataaaaaatcattaacaaaaatttaagcaagcgaatatccagcgtcttgtacggaggcgggcatcagcgatgagcagtcggcacggagaaagcaggaacacatcgacaaagacaaagaaaaggctcaagtccatcttgaggcggaccgaatcaaacacaactcaggactccgctacctgtccaagctgtgtttgaattcgctgcggggccggttcgcacttcggtaaaactttttagaaaaatttataaaaaactaaaaaaaatcaatagaaatcggctcaccaaaaccgaaatcgtcgagtgccatgcggagctggccaaactgctgaacgactcgaagattgaggtcagcagcatcgaccagctgacggaaaagttttggatggtctgctacaaggccaaagatgagcatgtggtggagcacagcacaagcaacgtaagattcttgaaaattttcaaaatgattggcattttctcaggtgcccattgccctatggaccacctctgctgcgcgaatccatctgctggaatcgctgaaaaagatgtatgggcctgctccgggtgttgagcggtacgacacccgaattctctacatggtaaatacgggggaaatctgagattttagtagtaaataaaaacaggacacggacatcatcttttacgagtacttgacgcggttgggggacccacttccgggtggcgaacagctcggggaactcgctgacgagtaaccgaaccatacgattatggagtttatttgcggtaagctcattaaaaaataataataaatgtaaagtttgtttagccggacccaaggcgtacggattgtggctgcgcaacaa

SEQ ID NO: 41724 - DNA, 1074 bp, Heterodera glycines
attaccttgaattaatttctttttgttacctaaattttaaaattaaccatttttaaaatgaatttaagttaatttgtttttgttaatttgtccattccttcgttttttaattttaataaattttaatttaccatttcccttattttccgacttccttctcagctgtcctctccaagagcacgtcgcttctcttttcggccttccttttcctttttcttatcttccttcgctaatggacgcggatttgcccgacaaaatgtcactctctgaacgatttgacaaccttttgcgcacctttgtcggttacgtttatctttggcatggcattgatccgctgacgaacattttccgaaaacatttcgggtcatttaaatgctttggtttaattaatttattttatttttgctttcaacagaaacgatttccccgaccttcgcgacattgtcaaaaattcgccgtttgttttcgttagtgtggacgaactgctcgattttccgcgacctctcttcccaaatatggtgaacatcggcggaattggcatggacaaattggacaaaaatgccaaattggaggtattctgacaaatgagcagcccaccgaaagagtgcttttgtgataaagcaacattttgagttgttttccagcggtgtttttcggcacattctgggatgtcttcgctaggatttttcaacattaattctaaaaccctaaaaagtgacgatttttgcataaattatccaattttctgtggcaccgctcctccattctttcttaagaatgtacagttttacaaatgagctctaattaatttttaggagccatttaaaagtgaaatgagcaaaggaaaggaaggcgttgttttcgtttcaatgggcaccatcattcgctcatcggaccttccggccaaatttcggcagaaccttctcgaaacttttgcaaaattctccgattatcacttcataatgaggatagaaaagggggacaatgtaataaattaaataattatgagcccatcattcccggtttttagtattcaagcggaaattggcagcgaaaattcggaaacattttttt

SEQ ID NO: 41725 - DNA, 894 bp, Heterodera glycines
gctcttagggtaatggaaaaaattttgaagaggctctccggaacggattagcatcggggttacgagatagaaaattgtcctaaaaagagatagccatttttctgagaattaattcacaatttctgcagctcttagggtaatggaaaaaattttgaagaggctctccggaacggattagcatcggggttacgagatagaaaattgtcctaaaaagagataaccatttttctgagaattaattcacaatttccgcagctcttagggtaatggaaaaaattttgaagaggctctccggaacggattagcatcggggttacgagatagaaaattgtcctaaaaagagatagccatttttctgagaattaattcacaatttccgcagctcttagggtaatggaaaaaattttgaagaggctctccggaacggattagcatcggggttacgagatagaaaattgtcctaaaaagagatagccatttttctgagaattaattcacaatttccgcagctcttagggtaatggaaaaaattttgaagaggctctccggaacggattagcatcggggttacgagatagaaaattgtcctaaaaagagatagccatttttctgagaattaattcacaatttctgcagctcttagggtaatggaaaaaattttgaagaggctctccggaacggattagcatcggggttacgagatagaaaattgtcctaaaaagagatagccatttttctgagaattaattcacaatttctgcagctcttagggtaatggaaaaaattttgaagaggctctccggaacggattagcatcggggttacgagatagaaaattgtcctaaaagagataaccatttttctgagaattatttcacaatttctgcagctctt

SEQ ID NO: 41726 - DNA, 144 bp, Heterodera glycines
cgccggtttcgcggttgcacacgccgcacgccgggtcccagaaatgcaccacgcggatacggccggtgtcaccggccagatcggcgggcaggcgcagctgcgagtcgtcgaagacgatggcctgttcggtgaaggtggattgcg

SEQ ID NO: 41727 - DNA, 350 bp, Heterodera glycines
gcccccccccccccgcccttcaaaattttgaaaaataaataaaataataggagactcagaattttgaaaattttttataaaaactgatgacaagctaatgtgataaaacaggttaattcttttcctttcagtatccctgcaaagtttggggcgcttctgataagtttctgaaaaaaaagataagcctaaactttttggcctgtttaaaaaggaattaaaaatttattcatctccctttttgatagaaaaagcatcagagtgcctaaactaacatgtaaataaaatttggcgcgtgtcagagcattttctgaaaaaaatatttatgaattaattatgcaaaaaacaaataa

SEQ ID NO: 41728 - DNA, 776 bp, Heterodera glycines
  unsure (1)..(776): unsure at all n locations
gcatgcnnctgcaggtcgataaaaataacatttcacggtgcgaaaaatggggtttgataagtttattgggggaaaaaaagactttacaaaataatacccctgggagaagggagtgggaaacatgatttcaaaattttcaattttttctagtctaatctactcaaaacggttcagaattcaataaaaataacattcacggtgcgaaaaatggggtttgaaaagtttattggggaaaaaaagactttacaaaataatacccctgggagaagggagtgggaaacatgatttcaaaattttcaattttttctagtctaatctactcaaaacggttcagaattcaataaaaataacattcacggtgcgaaaaatggggtttgacaagtttattggggaaaaaaagactttacaaaataatacccctgggagaagggagtgggaaacatgatttcaaaattttcaattttttctagtctaatctactcaaaccggttcagaattcaataaaaataacattcacggtgcgaaaaaaggggtttgaaaagtttattttgaaaaaaagactttacaaaataatacccctgggagaagggagtgggaaacatgatttcaaaattttcaattttttatagtctaatctactcaaaacggttcagaattcaataaaaataacattcacggtgcgaaaaatggggtttgacaagtttattggggaaaaaaagactttacaaaataatacccctgggagaagggagtgggaaacatgatttcaaaatttt

SEQ ID NO: 41729 - DNA, 1454 bp, Heterodera glycines
  unsure (1)..(1454): unsure at all n locations
tcaatagacagagagaccgactcgttngaaatgtttcgaaatttaaatttgtagaggcttgaacaaatgcctaaaactcacatcggttgccgtgtcggcgccgcccggctcctcgctgcaccgctcgttgctggcggcgccggcgattggcgatccgtccatctcctcatccaactcgtccccgtcgctggtgtaccgagttcgaccccgtcgtcgcttgtccttggcgcccgggtcgaaatagccggtcagcgagtcgtacagcgattccacctagttggatttcgatgaggctttattagattggattttggccggatgactcatagttttttggcacaaaagttttgctggtccctgaattgatcatagttcggacggaagaaaattttgtgtcaaattgtctgttgcccaattgtccggcattgccctattgtctgtctgtctgtatcaccatgtcctttttgcgcctcgcggcggcgcccggttttccgatggacaccatttgctgacgccgacggcgtatttcctcctcctcttgctctgaattttgttgctgttggcgctgtgcagttgtgctggtggtggttatgtcgtgtcgatcagcaccaccagcagcagtgccatgaactgcttgctgttgttgcggttggcctccgccactggcactggcgcccaaaaatagctcgtcatgttgaccccgttgctgggcttcgaacatggccaccgccatggctgccatgccggcatccgagttcatccgttcgaccgcctgaacatgttggaaggcatcagagaaggtgtgccaataagaaaattgttaacaggatcatcaaatgatagtcgagaattcaaattgggaacggtctcggatttttggagtttgttaagaaaattaaatttctatggaaactcttggtctctcggcattctcaatcttgagcataactgaccaataggtgccgcaaaatactttagtttctcggaatataagtataggattgtttaggaattcaatcggaacttcaaacagaaagaaaggggcatttttgccgattggtccatgatcagtttggtctgatcactgtcaagagcctgctcttgaccttaaaaattggcattccttaaacttttctggaaataattggcaataatggacaatgagaggtcggaaaatgccattttcaacgggttttcaatgccctgagtctgttttggcacattttgttgccaatcattaatgctgctgaaaacttacgtcctgaatgtccgtttggaacgcttgtgccatggccgcctgctcgtcgtcgtccaacgggtcgacactgaacgcgaacgaattcatcgcctgaatggtttggaccatcggcggcaccggcacaatgccatccaaatcgccgccaccattttcgtcaaaggcgcgggtatttcaattctctaataaaattacattt

SEQ ID NO: 41730 - DNA, 389 bp, Heterodera glycines
tttcagttgtcattcggccgtcacgcggactcaaaggccgcttcgctccctttcgcattgtacggtataattcgcccgcttcgcggcctcaggtcgggcgcttcgcgcccgtttttaaattttgtggtggatattcggccgcttcgcggcctcaggacgggcgcttcgcgctctttttaaattttgtgggggacattcagccgcttcgcggcctcaggacgggcgcttcgcgcccgtttttaaattttatgggggatattcggccgcttcgcggcctcaggacgggcgcttcgcgctctttttaaattttgtgggggacattcggccgcttcgcggcctcaggacgggcgcttcgcgcccgtttttaaattttatgggggatattcggc

SEQ ID NO: 41731 - DNA, 1074 bp, Heterodera glycines
ctgctgctaagtttttccattccggcgtgtgactcgtcattatgatatgcggataaggaagcgaaaaaatgttatcgtaagcgtaaataaattgttagacaaattttactagaaattaagaaataaacattataaaaacattttaaaagaagtctaatgtctcagcatttgctaataagtaaatggtttatttatcatataggtaaatctgtaagcttaagcttgcatcttcttcatttcggtcctagttttaacccaaccgaggaccaagccaacaaaaaatttaaaaattatgttttcgcgaaatttgtcataatgtctccttcagtcgagatcgcactatgggtcaagcccagtgtcagacaaaattgctcataacgccaaatagcgcatttggcgtaaatttttgcgcgctatttcaaaatttacactggaaaatgccttttttgtattttttattttgatctgccataactcgcttcattcccaattaaactgaacaaatttggtatctaaaaaaagtttttgaaaaggagaatctttttctaagcgaatgctaagcaatttgacatatcagaaaaaagttgtgggaatttcaaacttttatcatgttataacgcaagtcctaaactgctgttttcaccaaaaatgctaaatttattcttttttctattgattctaaatgttcaaagtgattttgtacccttataaccaaaattattagaattttcgaatttggtgttttttcatgtgttagagacatgaaaatagtacgccaaaaggagagaaaaaagaaatacgttattattattatttataacttttgagtttgagcacagacaataataattgagcatagaataatgcagaatttttttctctatcgatatgcaaaatttggtatagatttaacgtatagaaaaaaagttaaacgtagcgaagtgaatgttgctttttacatcattaaaatgaaaagatagtacaccaaagtgagagaaattacaaagaaaaagagaaacgacgagatagtactaggcttttctctgcacagtggggcgtacctatagtgaaata

SEQ ID NO: 41732 - DNA, 621 bp, Heterodera glycines
cctctgttcccgtgccattccccattggttgtcccccatttaaccctcctctgctcccgtgccattccccttgtcccctttttaaccctcctctgttcccgtgccattccccattggttgtcccccatttaaccctcctctgctcccgtgccattccccattggttgtcccccatttaaccctcctctgttcccgtgccattccccattggttgtcccccatttaaccctcctctgctcccgtgccattccccattggttgtcccccatttaaccctcctctgctcccgtgccattccccattggttgtcccccatttaaccctcctctgctcccgtgccattccccttgtcccccatttaaccctcctctgttcccgtgccattccccattggttgtcccccatttaaccctcctctgctcccgtgccattccccattggttgtcccccatttaaccctcctctgttcccgtgccattccccattggttgtccaccatttaaccctcctctgctcccgtgccattccccattggttgtcctccatttaaccctcctccgctcccgtgccatttcccttggactccatttaacccctcctcctgttctcctgccattcccc

SEQ ID NO: 41733 - DNA, 748 bp, Heterodera glycines
aagtttgatcataatcgccccgattaaagaagaaaatggggggaaaacggggggctgagggaaggggagggattgaaaaaccggatgatttaaggggggggggggagaaatgaccccctcggatcgcaaaagtcggggtgggggagggatttgcttgagatggacttgacttacgcgcctccccccccccccccccggggacccctccctattcatttctctcacagtttcgacacagcatcgacgaggaggggaatttgaaggtgaaagccaacgcgccggggggggggcaaataaatgctttttgctctttcccctaaacacttcacaatgaatggggggaaattttgggagcgggagaaggaatttgccatctttgtgtgcgtgtgcattgtatttgtgtttatatgctttacatgctcctaatgatgcttggaatgtcaggacggaattcagtcgagaaaattttagaccccggaattcaaacttccgaaattttggggcccaaaaattacaagttccaatttttagggactaaggaattccgattttcgaatatttttgggacctgagaattgagaattccaaaaattttgtggacctttgagtacggccttggaattccggtctctaaatcgtgatgccaaggaattcatttgaaattttgaacttggaattcagactccccgagatttttgggcacagaaggaattccaacttccgattcctgaaaattggtcacctaaat

SEQ ID NO: 41734 - DNA, 713 bp, Heterodera glycines
tttcaatcactgggtactcaacccaacagcatttcaatcactgcgtactcaacccaccaacatttcaatcacatgggactcaacccaacagcatttcaatcactgggactcaacccaccaacatttcaatcactggtactcaacccaccaacatttcaatcactgggactcaactcaccaacatttcaatcactgggactcaacccaacagcatttcaatcactgggactcaacccaacagcatttcaatcactggtactcaacccaccaacatttcaatcactgggactcaacccaccagcatttcaatcactgggactcaacccaccaacatttcaatcactgggactcaacccaccagcatttcaatcactgggactcaacccaccaacatttcaatcactgggactcaacccaccagcatttcaatcactggaactcaacccaccaacatttcaatcactgggactcaacccaccaacatttcaatcactggtactcaacccaccagcattccaatcactggcactcaattctccagcatttcaatcactgggactcaacccaccagcatttcaatcactgggactcaacccaacagcatttccaatcactgggactcaacccaccagcattccaaatcactgggactcaacccaacatcatttcaatcagtgggactcaacccaacagcatttcaatcactgggactc

SEQ ID NO: 41735 - DNA, 1435 bp, Heterodera glycines
gataaaacctcaaaagtatgtatgcaccaattattatgttccattacgatattataactagaaggatgagcgaaccttttatggcaaattaattttccagggcggtaatgactacgaaattttcgagcactccgatacggtgggccatactgtaacaagcccggacaattgtcgtacggtagtggagaaaacgttggccgagttgggcctgtgagaatcagtgatgttttatggaatcgtgatattattttgtgtttattattttgaaatttattctcctattttttttcttcggttttattaatttatttttgtaattcaatttcctttatcaaagtgttaattacatattaaaatttcaaaaccaaattcatttgaaagtatcagcattgacagaatgcaaaaaaagagataatattgggcagtagtaaataaaaaacattgcagaggcagtgcccgccgaaaaaatagacaaaattttttgaaaaaagccaaaaaaaattgaaaatttaaataaatttataagtgaaaaaagtaaaaaagcttccaacaccttcgattcccaggacgtctccgttccaagtacaaagaaggcccaacgttgcttaacttgccagatcggacgggatggcgtactttcaacgtggtatggtcgtaagcgaaaggacagcaattaaagtcatttaaataggcatttttaaaagagcctattttttgccttttctcaagagaatttattaaaaacggcaaaattcgccttaaattaataaggtgaaagtttgaaaatatttattaaaaaatttcaggatgaaatacaattaaaataatcaaaaagaaaaaaaataaatttatttttctaaataaataaaaaacattgtcagaggcagtgcctgccgaaaaattagacaaaattttttgaaaaaagccaaaaaaattgaaaatttaaataaatttaaaagtgaaaaaaattaaagtaatttaaataggcatattttaaaaaagcctatttttttgccttttcacaagagaatttattaaaaacggcaaaattcgccttaaattaataaggtgaaagtttgaaaatatttattaaaaaatttcaggatgaaatacaattaaaataatcaaaaagaaaaaaaataaatttttttttctaaataaataaaaaacattgtcagaggcagtgcctgccgaaaaaatagacaaaattttttgaaaaaagccaaaaaaaattgaaaatttaaataaatttataagtgaaaaaagtaaaaaagcttacaacaccttcgattcccaggacgtctccgttccaagtactaagaaggcccaacgttgcttaacttgccagatcggacgggatggcgtgctttcaacgtggtatggtcgtaagcgaaaggacagcaattaaagtaatttaaataggcatattaaaaga

SEQ ID NO: 41736 - DNA, 945 bp, Heterodera glycines
tataaaatttctcaaaaaaagagatagccatttttctgggataaagtctaaatataaaaattccctcaaaaataaaaggtctattgcgcaccgccctccctatcatgcgcaagagcatttgtaagtgtataaaatttatcaaaaaaagagatagccatttttctgggatagagtataaatttaaaaattccctcaaaaataaaaggtaaattgcgcaccgccctccctatcatgctcgagagcatttgtatgtgtataaaatttatcaaaaaaagagatagccatttttctgggataacctctaaatataaaaatcctctgtgaaataaaatggcgattgtgcacagccctccgtctcatacgcaagcgcttttgtgaggtataaaatttctcaaaaaaagagatagccatttttctgggatagagtataaatttaaaaattccctcaaaaataaaaggtctattgcgcaccgccctccctatcatgctcgagagcatttgtatgtgtataaaatttatcaaaaaaagagatagccatttttctgggataacctctaaatataaaaatcctctgtgaaataaaatggcgattgtgcacagccctccctatcatgctcgagagcttttgtatgtgtataaaatttctcaaaaaaagagatagccatttttctgggatagagtataaatttaaaaattccctcaaaaataaaaggtctattgcgcaccgccctccctatcatgctcgagagcatttgtatgtgtataaaatttatcaaaaaaagagatagccatttttctgggataacctcttaatataaaaatcctctgtgaaataaaatgccgattgtgcacagcccctccgtctcatacgcaagcgcttttgtgagggataaaatttctcaaaaaaaaaatagccatttttctgggataaaagataaatttaaa

SEQ ID NO: 41737 - DNA, 886 bp, Heterodera glycines
ttttaaagcattttaataaatttttgatgataatatcttttgttaatgttaaggctttcagaaaatatacaaacttattagttgggactaaatctggggagctacgtggtcacttttcgatggcttgaaatcgggtctgcaaatctacgaaaatccaattttggttatggtacttagcaatgacgcccaattttgaaatttgtggaattattatcgcatagttacctgattaatcgccacttttagcttgtcaaaaatgccatttatggtaataataggcatcgttaaaaatggcataaattgagtgcaacgattactgtcattttctgaagcgcttgggtgcttgtatctcggcaaatggggaaatttcgagcttttgtgtgattttacgtctaattactatcatttgcttatatttatttcaaaaatttattttcataatgaccacacgaaaaaaccagttttaaaaaagtaacagaatttttccgcactctttgtttagtattttgtttaaatctttatgaatcgaaacggcgattaattggcatcagttggcaaatgcgcatttgctttgctttgtttgtgtagtgacttttgtgtcttcggttgggcccgaagtaccccccccccccgccttaggtcacaatccaacatccattctgaccaactccgaaccccggacccgaatacggtacatacaaggaagagaacttaaagtcataaatacttcaaaaaattattaaaccattttaaatcaaaaatgtaaatttgaaaattttatttcgacttgaattcgggtccgggattcggagtttgtcaaaatggatgttggattgtgatcagcgacccccaaaacgtgggaatttttgtcatgactttttgaaaa

SEQ ID NO: 41738 - DNA, 1357 bp, Heterodera glycines
  unsure (1)..(1357): unsure at all n locations
cgctccctaataaaaaagtctaaccaatgccaaaacccatctacctaattgtaaatagggttttacacttttacacatgttgataatattgaatcgtaaggacgatgtaaaaactatgtcaaaagcaaatttcgcatgagatccaaaaaataaccaataaatgccgccggcagacaacaaagcaattaaaaagcatcaagctgtgaaccacacaaagttcgcttggtttttgcattgagtgtgccttcagctcatccaacggcagtgttcacccatttaattgcccttttttactataaaaaatggatacaaaaaaccaaaatatatgaaaacaaaaaaaaaaaaaaaaatcattttttccatgaattaccgtatttgctctttttatccccccgtcttcattaatcccaccgtctccaattatccccccctttctgaggaggttgaaaaataatccccccgtctccacttatcccccgggggataaatggaatttttaatttttcgaatttttttttcaaaaaacagtaaaaatgctaacaaatgagcaattcatcctcatctcccactccatccagctctacatcatcatcagataggccggccttcctcctgatcattccgtccatctttcattgtttcatttcctctaaactcgcgcaaaatctctatcggtccaattgctccttccggtttgaagcaagcaattttttcgtcttcagttccgtccaatggcgtagtcagcccacagacttaaaagtttaggcatttttcctgtattaattttttaactgacccttaaatgctttgatgatcacttctttggagatttcctgccacgatcggtgaatccaatcaagtgttacatgaagagcaggtgccttcggattacccgctgatgtgaactccttttccgcctcattggacatccaaatgctgtagaagtgccgaattcgctccttgaacggcttattccacgagacatcgggagcctagggaagaaaaatgaatttcgttgtgaaggatgatttagttacctgaatgaatttggtgcagccaccagggacaaaaaccgttttcactcccaatcccttcaccaccttcgtagttctctcgctcttgtggctgccaaacgcacccaaaccaagaggcgttcgccaacgaacagctttgccccgatgattttgtgcaggtagtcctccgttgtgtcatcgttcatccatatcgagccagcgaaatttatcaccaatttctagcaaatttggtgacaatctgcggcatcgatcgcttntctgtgaccagcacgtatgggttgagtttttgtcccgtgtcgcgggctgtaaggcacaccgtcacc

SEQ ID NO: 41739 - DNA, 1050 bp, Heterodera glycines
aattctctaattttcttggtcaagaatgacctcgaagtaacaattttttcattttttgaaaattttagcaatattattatttaaaaataattccatagaatgatgatataataagtatataaattagcgaaaacattccgatacattcttttaattattaaaattattctaatgtgaagtattaccatattaagaatttttgttttaatatttattgtttttagatttatttatttgtgaattcagtgccattttaatgcaattttttcgtttattttaattaatagacaccgtatatcaattaatttattttaattcgcctttaataccaatatctaattcatttagtataattaaaatataagcaatttttcttaattaagacccgaattctttaaaaaagtttatggcggtattttttaagcaatttaaaatttatttttgtgagtttacttaatgatccataatagcataaatgtaaaattatccaaaattgatcatttttatagtaactagttttcaactttttaacctagtctacgaattaagtcgtagactaacacacttcagcttctgtctcgggcaatgaggaagcaatttcgagtatttttgtgatttttcttaaattaatatattttcttattttattatttaaattatttttattttgaagaaataaattgcacttttaaaagagtgcgggaattttagtcgcacatggtattattatctaaacggtttttctaatatttgtcattttatgagcagatcatctttctgcaacctaggtttttcttaaatcttggttaagtttttaattattattttttaaagttaaaagatatatttgtttgatataaatacttattaataaggacttttcatacaaatttatttatttccttcaattgatgtcctgcgaatatgcacaggaaactcttcaattgaaatttatatgtaattttatttagtcaaggaattattgtctatcacaaataaattgtctgattaattaagtttaatattttattcatacatattatctcaaag

SEQ ID NO: 41740 - DNA, 1066 bp, Heterodera glycines
  unsure (1)..(1066): unsure at all n locations
ttttgtgctttgaagtttagctctttttgaaaacaatgcaataatcttcaaattcnaatcaatttatcagttttcatttgataaatatttcgccatttttacaaaaaatttagttctactaataataaaatttactcgatttttgcgttttccattcatttgattatgttaatgtttaattcgaagaaattttaatcaatttttgctgtttttccttttgttgttttatatttaaccccatttttactaaaattggtagaagtttagaattaagcgcgaatttatattgctcattttgataagataaattaatatatatttagagattttaaatttgattgaatgttttattatattgttttatttttgaatggtaatgggattataaaaaaattatatacgcttctaataattattaattataaattgttgcatatatcaattaattttgttgtagcttcttaattatattttatttttaatatgctctatgaatttttatcaatttttttaaacagatttgtgatcaaatcatgtatccattcccataatacatattcattgttaatttaaattttttgtattttgtttcaatatttttgttttgtcatttaattgtaacgaactcataaactctttttttgaccaaagccttttggttttgcgtgtcttcgaactttcaaaaaccattcaattttgttcattttatgcccaattcgatcgcattctaagcacattaaaggcccttatattttgttttattttgtttctataatgaattattatttattagatatatttaatttaaccctaacacttgttgtctcattgatcaataattttacatttcacttcattaatttagttgaatccagaaaatttttattaagaatagatatcatcatatttataccttgtaatattgatttatttgtttgccactcaacggctcctgcatgccgaaaaatgtgacagacttcgacttcgcgaagactgtggagcagctgaagagtttgtttgcccagcctcagtccatttggattgacagatatgactgcctgcgtgc

SEQ ID NO: 41741 - DNA, 916 bp, Heterodera glycines
atgtgtggctttacctgttttgaagctaagtcggggatctgacggctaatatgagaataaagtgcagttctctctttaaacgaactgattttatggccactttctataaaggcgatggcggtcgctgtatgaccgtaaacccagttttttgtatagaaaagggttgtccaaattgcaaatggatacagtatctgatttgccgggaagtgaggcgatcaaaattcataatgatagagaatgtgtggctttacctgttttgaagctaagtcggggatctgacggctaatatgagaataaagtgcagttctctctttaaacgaactgattttatggccactttctataaaggcgatggcggtcgctgtatgaccgtaaacccagttttttgtatagaaaagggttgtccaaattgcaaatggatacagtatctgatttatttcacaacgccaacacgccgttgaaaataaaaacacaagttgcatgtgatggcaaaagttgtgaaattcaaacgcattttacggccatgaattgcaggaaagtgaggcgacaaaattcataatgatagagatgtgtggctttacctgttttgaagctaagtcggggatctgacggctaatatgagaataaagtgcagttctctctttaaacgaactgattttatggccactttctataaaggcgatggcggtcgctgtatgaccgtaaacccagttttttgtatagaaaagggttgtccaaattgcaaatggatacagtatctgatttatttcacaacgccaacacgccgtgaaaataaaaacacaagttgcatgtgatggcaaaagtgtgaaattcaacgcattttacggccatgaatagcggggaagtgaggcgatcaaaattcataatgatagagaatgtgtggctttacctgttt

SEQ ID NO: 41742 - DNA, 627 bp, Heterodera glycines
cgtccgtttccctttcagctcacttccctcgccaccacctccgactcgggccttttgacgcgttcgccgtcctccgcctccaccatttccggcattcagcagcagcaaaataatgccatcagtgcacaacgaacggaagaaacggaacgacgagcggcggcacatgaaagggaaatgcagcagcagaaacaggacgcacagatggcacggcgggagttggaggtgtacaagcaaatggcacgtcgagagttggaagattcggaacgggtaaaaggagggggaagtaattagtaagtaattaataattaattaatgagcctttgtgaaggaccgcgacgcactgggcaaacagttgcgaactttgaataccgaaatggagtcgttgaaaaatgagctgaaaaaggagcaggaacaaagtcagaggatggaattcgaaatgagaaaagttcgcggagagaacagcacattgagacaacgggtggaggacgaaagagaggaaaaagaagcagagatagcgatggaaaagtaaaaagggagagagaaagaagcagagataaggaaagagaggggaaaagaagcagatatagcgatggaaaagtaaaaagggagagagaaagaagcagagat

SEQ ID NO: 41743 - DNA, 778 bp, Heterodera glycines
atgccaaatttataaaatttggcctgctgagaaaaaagttattatactttaaacttgttcagactataacggccagactatagtgtcccctaccctgacaaaaaaaaagctttttcaaaaatcgacaaaatatatgctaaaaactatcaaactaccaaaaacccaaaatatgtgtttatgagcaaaaagttcaaaatacgttttttatgtccaaaaactcgttctggtggcaaagaaaacggtaaaagtgctctttttgagcttttcatgtgaaagcatattcgcaaaaaaaaaaaattatgttaaaaataaaaatcccagccctggttcattttattagtcgatttattttgaatattatttaatcaaaaaaggggcaattcaatggcaataaataaaagaatacggcatgaaaaaaccattcatacacatttaattaaataatttgagacttcgtcgacgtcaaccactcattttcaacagagttcaatgtgtaattggcactttttcgacttttcacctgctttttggcacattcggtggtaagttttaattaaattctgtttttaatatttctatgttctgttgaaatgtcttccaatgccccagactaattaaatgttttaatttttactagtaaatttggtaaatgccaacgaaaggaaagggcatatttacggtattcatattcaagcaaatattaccaatattgttatttatttagcacgtaaatacagaagaaaaattgaaaatttttattaacaaattgtggaaaaaa

SEQ ID NO: 41744 - DNA, 1308 bp, Heterodera glycines
cggctcgaaacaaataaaaacagattgagacacaaatcccaaaaaatgtttttgccaattctcaagcagataaaacagaacaaatcaaatcaaaatttaagtattataaatttaggcttggtacggcataaataaactttcgccatttgatcttgcaaaaatcaaaaaaatttaaatgttcatacttctaattttattaccgaagagctgtcgaaatctaacaacataaaaattcattaaatctgaatggatacaacatgtccctttctctgacaaacatttatcgctacattttcaacatttgcttcgccaccagcaattagcacatagggactctaaatcaaattagtaaaaattttattaagaaaaattaaattttaagagattgaatcttcgtgaaaatgttccaatttaggggttattttaaaaaatatgcctaaaaatccagtctctaattattatgaaataaaatcaatttgagcaaaaatatatccatcagttgttatcccaatatgaatgattaatttaaaaaaaattattgtcttatttttttttaatcagctgctgatcgattcattcccctaacaaatatccgatcatgcgcaaaatgacacacacccacacacaaaactaatcgtaaatgggcgagtaaaagggcggcacaagagaaagccgctgctgaacccaggaaatccgataagaaggggcacggcataatgatatttctgccccgcgttaaacaaccgcaaaaaaaaaaaaaaatcgggcgcacaaatccattttagtaaagccggtgaattttttttaaaagaatgttacaatttcttcattttttcataagtgggggatcacatcgagaatcgaggcgaccaacatattttttttggcaaaaattgggttcaggatagacacaaaaaaaagaagataaatttgtaagcttgatcctaaacccatcactttttcaaaatgtcaaaagattttcaaaattctatgtttctgctttttagttgaaaatttgtatatgtgaaataagaacaaaaatttgttctattttaacggcatatttcaaaacactagaagtagaataacattttggaaattgttgtcagaaacaatcatatttgaattttacttttttttaaatttaatttgtataaatcagtaattttttatgggaaatatttgctgggaatacatttttgttttgtttttttacattttattaagctaatgagtattatataccagcaaaacataaattatttaatttatcccacttttccagcccctattacaattgatcaaatt

SEQ ID NO: 41745 - DNA, 1403 bp, Heterodera glycines
  unsure (1)..(1403): unsure at all n locations
tttattaatctcgtgaatgacccaaaaagcccaaaagtgaaaaacggcacatttaattcacttaattattgcatttgtcctcaggctatatgtagtaatagtttagcttttcaattttgctttttgaattgttcagtaaagaaaacccactcaaaataaacaaaagttgtttgaaaagctttgtttcttttctcaattacatattgcataaaatgaaatggaaagagcattacataataatttaattttccaaaaataaaattggtcaattgagggaaacaaaaagaaaaaagtgaatggagaagagggggggggggngggggggaaatagctgaagctgatgaactttgtgccggtgctgttatggtgcgttaacaaccacaggacccttttaaccggcaccattaatgagaggagccaatgaggaggagcattaaaatctgtaaaagtgataacacatacagagaaagaaagagatggacaccactaaagagagagacggagagaaagagagagagagagacagatagacatactgacagagatagaaaaagagcgaacaagagaaagaaaaagagacagacagacaaagagggagaaagaaaaagagagacatacagaaagacagagatggcgaaaattggtagaagggatgagagacgaacagagaggcaccagtgaaaaaagataccatagattttttatttttgtagttattttttctcaaaaatttttggagagagagagagagggtggcggtgctgatagccgacgcaatataaaaagttgacccagaaattggcaattccttataattccttaaaattggctcaaatcgcaaattctggtaatttctttgaataaaacctattaataattcaatttcagcttcaccgagctttcttccacaaaattcttcttgaaaaagagttccgcaaaaaagagatgtgaaaataaaaaagtgaattcttatgtgataccgagtttttattaatttggttgcgtttaagcaaactttatacgaattttctcggaaaacctttgaaaattggcatttctacgaacgccaatagtggcatttttatgaaatgacccagcacgggccaatgtacgtcgtacggggggggggcacttggttgctctcaatgaatacccgggatacgacccgattggtccggatccaaaaatacactggaaaaataagcgtctgggtcaaattgttgatcaaacttgggaaaggtaaaaagatgaaaagatcaaatatatttttgaaatagctaattgtctattctaaccgtttttggttcaaaatttgttaaataaccttattacttcgattaggaatttttattggatttttaatataattttcagggaatttaataatttttcaatgnggaccc

SEQ ID NO: 41746 - DNA, 1421 bp, Heterodera glycines
tttttgaaatttttatttaaatggcaaacgaagacttccgcttgtccgaatgcatccgtattattgagcgaactgcccaagagtatgattgtgttctgccggttccacgtcttgggtttgtcacggaaaattttcttaataatttttaaaatagctcaaggcgcgatgagcacctggatgcctgtgttctcatggaatcagtgggctcaggccaccgcctctacattttcgaagttgaggactgccttcaggtatttttaaaatatgaggtcaattaattaattaaataaatagaaaaccccacaggtgaaaggacacatcggaaacgaagatgggacaagcacgcgcgtgatgattgagaactatgaaaaatacaatgggttatgtgtatttgaatcgtttttggcgtcatgtgcttttaccttttttggattttttgttcccgtttcttatgaagatgatgattgatttaattttaaaatatttttattgtacattgcgtttcacaaattcataaacaaattcatccgaattacttggtcttttcaaaaattgcataataaactcaaaatcaaatcctaaggacataaaataaataaaaactaaaacataatgaccacaaacattagagaaaatcgattgaaattttcttcgattaaaataaattttccaaaattatttgccaaatattttttgatcagatcgtttggcatctcgccataggagtcaaaaaagtaggccacccccggcgaacgcgcccatattgcgcaccaatgggttcccggcattcccgacggttcctgaagtggcaaaatttattttattgaaaatcttttttggcactcaccaaattgacaattagactgcagggaaatttcgtgcactttggcaatcggtcggccggaaatgtgccaacaaaatattttctcgtcgcccggttctcaaagagagctctgtcgatgaaccgattgtccattcctgtgacgaatccgcctctccctcaaaaacaggtaaaatcccgcagccgcagtacctgctgcaccaaacaggtagatgaggcagagaaaaaagttgattggcgacttctcgatcacatccggaaaacacagtacaatcccttcgtgtgcggcattggaggagggcatttgaacaaaatcggaggaataattctcaccattcatactgtaaggtcactagtgattgatctgttccggtcaatcagaatgagcccgtcagcctcggcataggctattaaagtgaccccctcgttcggaaccgcttcggcaaaccgaatgttcaccgctgtacagccctccttgatcagctcaaagcccggcgagtcctcctgcgcattggtcatttggaagacatagaggcagtaggcagtcttgaacatgctgtagctgatccccgtgctctca

SEQ ID NO: 41747 - DNA, 870 bp, Heterodera glycines
  unsure (1)..(870): unsure at all n locations
gcagagtcagagaggggtcacaaaagagttcgncacagcatcgaaatatttccttcatttttgggcgtcattcttcccccactgcacttctttctttggtttaattacccaagtttgaggtacttggcgtgtcctgcccataatatctgtggcatggaataaattttggaactgcgctgcctaacggcggtgcttaaagtgcgctaaaaatgatcaaatgattatcaatttttatttttcttaattccaaaatgaattcgaaacgcaaaaatttaatcataattcatgtggtaaaaaatgcatttaaaaataaaaaaaattcttgaatttgcttctgaattttttaattttaaatagaaaattactttttcgaaaattttgcacaaataagaggcggagaaattcaacgaaatttttattaggattttgatttaaaatgttgagaggtttaacaaatttgtacactgaatgttggatcgtcaacaccaatgagaaatgactaacagaaaagagggagaaaagggcgttggcttaggaaaatagcttataataaaggagagacgagcagacgatgagtgagagaaaaatagtggtaaaaatggtcaactgctgcattggcagagtcagagaggggtcacaaagagttcgcacagcatcgaatatttccttgattttgggcgtcattcttccccactgcacttctttcttcggtttaattacccaagtttgaggtacttggcgtgtcctgcccataatatctgtggcatggaataaattttgtaactgaaatgcctaacggcggtgcttaaagtgcgctaaaaatgatcaaaggagtatcaatttttatttttcttaattccataaatgaat

SEQ ID NO: 41748 - DNA, 1293 bp, Heterodera glycines
  unsure (1)..(1293): unsure at all n locations
tttcagtacggtgggctgtcggatgattcaccggcccctgggggactgatcggacagtttggattctgttcggctccancaaggacggtaaaccaacacccgacgctggtggaatcggaagggcggttggcaattgtttgggcggtagcaattcgccattgcccggcaaacaattcatcaacaatgtgccgacttttcactcactcatttgccaatgctatgccatttttgcaggttctgtacaaaacactgacctccggctccgtgctgccctcctccgcctctgccaatgcttccgccgaccccctcaacgccacttcggccctcggccttccctttcctcagtccgtctctttgccgcctgttttggccgctttgttccccgacctgaacacttccaccccaatcactctgaccgccgcccaacaggaggcgatcggggagaatttggagatgatccaaaatttgattgtgcagccgtccagtccgttgtgcagcccaaagcccgtggcggtggccgagttcaatttggacgcatttatgggacaatggtaccaggtcagtagtcagcatggcatgtgccatgaagaagggatttgaatgttgcttatgtttgtttcaggtgatgtacagtcctccgctcgtccaaagtgcgtgcagtgtcgtgtcctatcgcaaattggccgacattaacagcggcggaattggctccatttttgaagtgtttgaggttggaaagttaaagcacagagaggggtcgggtggcaaaagagcataatcctttgatggtttccttttcctacagtacacaacggacggcactccatacagtaagccaaagatcacttccggctacgcaatcattaaacaaatgggcgaactgatcttccggacgaccgcccaccaggaagacgttaacagtaagagatcatttgcgcgggattaaccaattaattaattgaccggctaatttctgttcagtccatgtgttgttcaacggacctttgaacgagcgaggacagtatgaattcactgtagtcagcaccaactgcaattatcccgtgtacgtattcgcccgagaccccgtcagatacaaacaggtcgaattcggaggggggtgccaacgggtgcttaatttgggcaccactcaaaatgcctttcagaggtacgaaatggcggtgcaacagcttctggaacagaagggcgtcgtcaatggtatcaggtgaatgcacttttctggctatttaaatggccaattattcccccctctcgccttaattatgccaagttcgt

SEQ ID NO: 41749 - DNA, 901 bp, Heterodera glycines
aatttttcacaaacaaacgcgcagagaaacaaattccagaacaattagtatcggcgtaattattctgagaatgcggttggaattcctattactgttgagcagaaaaagagatagccaattttccaaatttttcccaaacaaacgcgcagagaaacaaattccagaacaattagtatcggcgtaattattctgagaatgcggttggaattcctattactgttgagcagaaaaagagatagccaattttccaaatttttcacaaacaaacgcgccgagaaacaaattccagaacaattagtatcggcgtaattattctgagaatgcagttggaattcctattaatgttgagcagaaaaagagatagccaattttccaaatttttcacaaacaaacgcgcagagaaacaaattccagaacaattagtatcggcgtaattattctgagaatgcggttggaattcctattactgttgagcagaaaaagagatagccaattttccaaatttttcccaaacaaacgcgcagagaaacaaattccagaacaattagtatcggcgtaattattctgagaatgcggttggaattcctattactgttgagcagaaaaagagatagccaattttccaaatttttcccaaacaaacgcgccgagaaacaaattccagaacaattagtatcggcgtaattattctgagaatgcggttggaattcctattactgttgagcagaaaaagagatagccaattttccaaatttttcccaaacaaacgcgccgagaaacaaattccagaacaattagtatcggcgtaattattctgagaatgcagttggaattcctataactgttgagcagaaaaagagatagccaattttccaaatttttctcacacacacgcgccgag

SEQ ID NO: 41750 - DNA, 127 bp, Heterodera glycines
tccttatttgtccttcctcgtccctcctggactgtcctccgtctgtcttttcttgtactgtctcgcctgtccttggctgtcctgcttcaactccgtctgtccttggttgttcttcttcgcccgttct

SEQ ID NO: 41751 - DNA, 1405 bp, Heterodera glycines
  unsure (1)..(1405): unsure at all n locations
gccttttccggacccgctctaatcncaaggccatnagttgtgaaataaaaatcttcttgaatcgccgcccattcccccccccgcctttttgtttcaaaatgtcttattttatccgacctcttgagaaaaaagttgtctattttaaggctttatgagactgtgttgcctttcaaataaatttatcagtgataattagggggggggggcatttaaatgccattcactcttttgtttttgagctgtctttgccggtttcgcttccatttctgtgttcccttctcagcagcactttgtctccaccttctttcaatttttacactttgtgtttttttttgttgaaatttttggcttattttccgctttataatcgcaaattttttccaaaatattttaattttaattcagaaacaacgcaaagtggctgatcagcagcagctcagcaaccccatggaaattcaggggtcttccgccgccacctctctccacttggacaaaaccgtgaagctcgaggcgaagcaggaacagtcccccgaggggccctcctcctccgcttgtaccgtagcaggcgcctcttttgaccagtttcccgcctatcgtagtctatttgcaccatcagccacaaactccgctcaaatgctgcttaaaaggtcagttgaagcgatggaaaaagtgaaagaatggcgatttggatacagtcaaaggggagaaagagagagaggaagtcgagaaaagaatgagagagaaagggatagaatgaaggggaaatagaaagggcagacgagtgacagagagaaagagaaaagagagagatagccgacatgagagaacgaagagggaaaaaggaggnggaggnagagagaaagagaaatttaccttcataccgtatagctcacaattaagtaaaaggaaggagggcaggggtgaatcatgcttttttgttctttctcttttcctctctccttttcttctccaatttttcctttctctctctctctcctttttctctctctctctaattcactactcctcctacagtctctcctccgtcccttttcttcgcattttgatgtctttccgttcagtttcgacttcccctccactgcttcttcctcttcctcttctgcttctcttcccacaatgcaaattcccgctgatcatttccaacaacaattcgtttccccaaattttgcgcaaaatccgccaaaattgtcctccatttatcagcaacaattcggcagttcacttagcaggtaaaaaagatgaaaaacgaactttgatgggcttttggtgccgaattagcatttgccatttcnccccgggcattctttgggcttatgtccactctccgccgtttgttcagttgtcccccgccggtcacttcttcgtccgtccatcagcagctcag

SEQ ID NO: 41752 - DNA, 1002 bp, Heterodera glycines
tttgtttcctttgcagtgaatctccgctcgtcgttcacttcgattactccgaagacaaaggccgcgtgttcggcgcttctcacgtccctttgccgacaatggacgaggaggcgcgtgagcagaagataaaggaactgatagcgatgacggaggaaacgcatcggaaaagggcggaacggaagcgacaaaggaatgaggaggaagcggaagaacgacggaggctgaacagagtgagggcgaggtgagtgggggaggggcgatggacccggggggggggggggaattggacagccatgccattttttatttttaaacacattaattaaaatccattcgtattcttaataggcgtatccatggcaaactggcatctttcattaccacctaacattgtccaaatgacttgtcagttatttgattacatttttccatcggggagagacggacgaactgaaaaaacaaacaaacgaatcgttaatttcagaatgggactcgaacccattccaagcagtgaggacgaagaagaagaacaaaaaggtgcagcagaagcaacggaggtgtgcctttttttgcacttaatttttcgtggtggggttaatattactataattagtccgctccataaattttaaaatgaacattttttgcccgtcattttcatttttttgttttaattttccttttagttggatgtttccgccattccgttgcctccctcttcgcccgaagcaaaaacgactaaagagcctgagcagaaaaagcaaaggtttggagtgcgggagtgggaccgtggcaaaatcggatgcatgcgatgggcggaggaacagcgggacgaacgcgaggacgaatttgcacctccttcattttattacggcgaagaaaacgacgcaaggggggaagaagaaacgcaaaaactgaagctaaagagaatgaatggaccattcggaaaaataatataaataaatttgtatcacttaactcacaatcagtgagcaatgaatg

SEQ ID NO: 41753 - DNA, 1408 bp, Heterodera glycines
  unsure (1)..(1408): unsure at all n locations
taaagctaaattaaattaatttgagcattttcctataaatttggcctcaaggagaggggggtttcaaaggttaaagacgaggaagtaaaatgtgttcaagttttatctttttttaaggccgatggaaattaattgctacgctaatgttttagtataaaaatgccttttttcttctcctccgcctcattcaattcattcattcgtcacatttccggtaattttgttgctgcaaaagtctttaagaatttctaaaaatgaatgacaaaatttgatatacatatgtaaaagatattaaacaaaaaaaagtttcagaattaaaatgccatttacgtctttttatattttttgttgtcggtcgtttacttattgtttaggaaagaatttttcaaaagaattatttattctgattgtgtcaccaattaattgtcaaaacggcaaagtgtgttaattgcagcaaaaaatggatcgacggtaaggaagtttttattaagtccagccgatttgggatgttgttatcagtgaaatttggcccatttttgcgacaagcatttgccagttgcgctttgccggaggcgattatttggacaaattgcgtcgccacatttcaccgacactgctcactgatcttgatcaattgaattcaatcgattcatgtggtctgtgccctgatgaaattgctgacgatggaccaaatgcaacttctggccaagcgttgtccaaatggcttcacattccgacaaaaaatggccaaccgaagcgatttcgttgccttgattattattctcaacctggaatgaactggatcaacaatttcatgataataatgtattttatgaagaaaaatcgcaattatatgtgggtatatttaaataaatttggtgtaaccctccaagaattttgatggacactcttccatcttttgatcaaaatgtttattctataaattattaaaaattggattttttaactttcgcctaatttttcaggactttttttgcatttttacgtgctttttgggtttttgcgacttttttcaatttttcgtgacttttttgccttttttatgactttttttgtgactttttggcgattttttatgatttttttagtcgactttttgaagatttttagtgactttaattcccagccctacttattgaatacactaaacttgtttgattaaaaaatttaaatgagtaaagaaaattgtcaaatattctcacgaaaaaatataataaaaattttctaaatattataggctacatttttaattcttaaccaagtaaaaggtgatttcaaaaatctaggagttggtcgggactttttagctgngaaaaaacccgggaatttcccggtcaaaactggtcaaaaccgggacttcggtactcagttgtccgtgttttggtcc

SEQ ID NO: 41754 - DNA, 779 bp, Heterodera glycines
ttttttggaatattttacgtgtcaaagggtgtgcatttaagcgactcgctgtgcttgcccactgcatttcaaatagctggtaatatttatttctccggcctaatccagaaaaaatcactatctctttttttggaatattttacgtgtcaaagggtgtgcatttaagcgactcgctgtgcttgcccactgcatttcaaatagctggtaatatttatttctccggcctaatccagaaaaaatccctatcttttttttttggaatattttacgtgtcaaagggtgtgcatttaagcgactcgctgtgcttgcccactgcatttcaaatagctggtaatttttatttctccggcctaatccagaaaaaatcactatctctttttttggaatattttacgtgtcaaagggtgtgcatttaagcgactcgctgtgcttgcccactgcatttcaaatagctggtaatttttatttctccggcctaatccagaaaaaatcactatctctttttttggaatattttacgtgtcaaagggtgtgcatttaagcgactcgctgtgcttgcccactgcatttcaaatagctggtaatttttatttctccggcctaatccagaaaaaatcactatctctttttttggaatattttacgtgtcaaagggtgtgcatttaagcgactcgctgtgcttgcccactgcatttcaaatagctggtaatttttatttctccggcctaatccagaaaaaatcactatctctttttttggaatattttacgtgtcaaagg

SEQ ID NO: 41755 - DNA, 1059 bp, Heterodera glycines
gaaaaaattagggtcggcgctatcattcgggaaaatgtggtcggaattcttcagactgatgatcagaaaaagagataggcgtttttccaaaaattttcgacatcaaactcgcccagaaagaaattcggaaaaaattagggtcggcgctatcattcggaaaatgtggttggaattcttcagactgatgatcagaaaaagagataggcgtttttccaaaattttcgacatcaaactcgcccagaaagaaattcggaaaaaattaaggtcggcgctatcattcggaaaatgtggttggaattcttcagactgatgatcagaaaaagagataggcgtttttccaaaattttcgacatcaaactcgcccagaaaaaaattcggaaaaaattagggtcggcgctatcattccgaaaatgtggttggaattcttcagactgatgatcagaaaaagagataggcgtttttccaaaattttcgacatcaaactcgcccagaaagaaattcggaaaaaattagggtcggcgctatcattcggaaaatgtggttggaattcttcagactgatgatcagaaaaagagataggcgtttttccaaaattttcgacatcaaactcgcccagaaagaaattcggaaaaaattagggtcggcgctatcattccgaaaatgtggttggaattcttcagactgatgatcagaaaaagagataggcgtttttccaaaattttcgacatcaaactcgcccagaaagaaattcggaaaaaattagggtcggcgctatcattcggaaaatgtggttggaattcttcagactgatgatcagaaaaagagataggcgtttttccaaaatttgcgacatcaaactcgcccagaaaaaaattcggaaaaaattagggtcggcgctatcattccgaaaatgtggtggaattcttcagactgatgatcagaaaaagagataggcgttttccaaaattttcgacatcaaactcgccccagaagaaattcggaaaaaattagggtcggcgctatcattcggaaatgtggttggaattctcagactgatga

SEQ ID NO: 41756 - DNA, 1158 bp, Heterodera glycines
atatgaaagtttaattcaacatgtctttttttggcgatttttttttgctttttttagaatactttttttgagtttttctcaacagagttaaaatccggtccctccttattgatgtgtttaggaagaacaaaaaacaaatttttattttcattaattaattagttaataattaattctaattagcacaactcaattaccgttatttcgctcgtccttttctgtttgggttgttggtcggccaggctgaaaacgtacgcttggccgttggcgacgctctcttttcttttggaatagaactcatatgagtgaagcagttctatttgctgaatgaaattcaattctgcatgtgcaattttaattacatgggtttaattaattaatgatgaaatatttctacgttttacgcaaatttggcaataaataaatcatttctttttaatccatccaaattagggttaagccccgaccccgagccccccgacccgaggcgtttttgggacctattccccgacccgacccccgacatgtcgccccccgaggtccccggcccccgattttttgcacccgaccccacgacactaattcgggggattgaggactccgagaatttaaaaagtttaaaagctaattaatccacgaagaagagaaatattgaaatttttgagatttgaacagttttcttaataaaattgaataaaaaattcgaaaaaactttccggcggcacctatcggcactgccaaccctcaaaactcttaattttttcctaaaaattgtcccaaaatcgcaaaaattggttttttaagaaaaatctgttaacaattttgcgacattttttaaaatctgtaattttttacaatttattcgaccaaaatgtctctaattttatattttttatagattgacattttgaaaaaagcctgtaccagtatttcccaaatggcctgcacctatattttctgtacaaaagtacaggaaaaatgcaggttgccaaaaatttgcctttactgtaccttagggtgtcaaaattgactaccataaaaaatgatcagcttcctaccattttcccttgaaatacggtagaaatcagtcatttttgaattgtccaatttttcacgaactgttgctctgtgggtataggtcgtagaccaccttcccaa

SEQ ID NO: 41757 - DNA, 1250 bp, Heterodera glycines
  unsure (1)..(1250): unsure at all n locations
tggccgacgtcagtgaacggcacaaacagcaaacggtcggcgtagcgctgnaagtcagccaaatcgtcgacaagcccggaaagccaacaactgtaaagttaaaaaggcaattgcgtcagtgataataaaaatgtgtgactcaaataatnttattattttatacactgcaaaaccagcgcattttttcttaaagacagtgaatttgaccaaatttttatgtaattattttttgattaaaaattataaaacaaaattcttggtgaaaaatttacaaaaattttttcattttttgaaaaaagctgctgattgtgagggtgataaaaattagagggtggtgtttatgataagcatcgggatcaggcatgactttctaatcactggcgctgaaatggctatgacagtttcagcgcacttaaaataattccaacggacctttgacgtgtccgtcgtcggttgtctccaaatgttcaaagatgtgtgaatatttgcgagaaaatggcttcaacgactcatcgcggtaaaaactgaatgtcgcggggctttttttgcacttcatacttttttttgcgacatttttcacattagccatttttaataaattttcctttttttgcccttttatcgaaaacgtagactccttacggcttcatcatgcatagcattgaataaaccgaaattttcctagagtcgagaattgacccacgagagtcgagaccccaaaaagcccagacccaaaatcgagcaatttgatgcgtaaaaaagataaatcacaatggcgcgaactcagccctgggcgagacggagttggcccctcccaaaccgtccaaaaaaaagaagaaaatccattcaaaaatcataaattgctgctcacaaaatgacgttgtatccttgacgcagaaaatatctggaaattggcattttgtagaaatcatttaaaaaataacgaactctgcactgacggcccctcgggtgcccatggaaaagctgaaaaatgaaaatttacggaaattaaaaaacgatgtttcacaattccccgacttttcgatggcacggaccgcattcttttccagcttcacacgggtgccgccactctgcaaaaaaaagaacagattcagagcaggaaatttaagaaatcgaaacattatcttttattttcttacaaataaccaaaataaaataaataaacattcgaaaaaataatttgtttcaaaagtgacataaaagttgttcaatttctagaaaaacaggca

SEQ ID NO: 41758 - DNA, 173 bp, Heterodera glycines
ttatacacgcatgatttctccgaattttgggctgggacgcacgcgaggtgaacttggccaagatggcagatttcccgattatccgatcgcgccgtattttgagtgcccccggtggtcagctttcctgtttaagatagacgataagcctgttggatttgcacttatcaatgata

SEQ ID NO: 41759 - DNA, 717 bp, Heterodera glycines
  unsure (1)..(717): unsure at all n locations
aaaacataatttatcttgactttaaatttttttttctctggggtgagtttgaatttttcgagtgtatgtcanaactttttggaaaggaagaaatgagaatgtgtganggnnanatgggagattttatanatttaattttgttggatttttgtaatagaataaaatttattgaattttaaaaataataaatatattatatttgattaatagttaagaattttaaaatataataatttttttatgattaaattgttttttgaagatttgnttgatatgtgtggaatgatagaagtaatgnagaatatttgttagaggttggtaatagtgaagaaaagattggtattaggttaattttaggtgagaaataataaaaattttgaggaatagagaatagagaaattgaatttgttaaaattaatttttaatggaattagaaattagaaaatttaagatttttattttgtagaattagaatgtttaccaatttttttcattctgatgacaatttcataaatttacccaaaaattttccattattttgacggcataatttgctgacatttccaaaaaagctacaaaatatttttattaatgcaaaatacataaaattagtaaattttattgcttaaatctagttaaaattaagaataatatatgaaattatagaaatgtgttaatataaatgacaattaaataaattatttatatgtgttggat

SEQ ID NO: 41760 - DNA, 679 bp, Heterodera glycines
attgttttttgatttttttaatgcgattaattgtaacctcacagaaattaagcaccatttgaaaaatcaaaaattttactttccacaatgaacacctcaaaacaacacaaatctgaaaaattaaagtatctgtaaaaatgtgataaaccaaaaatagaccccacaaagtccttatttattttttaaaaacatatccaattgaataaataatcaaattttgataaattgttatttttttttaaacttgcactaatttaaaatgggacaaaaccaaaaagagtcccccaaactccttatttttttcaatttttcaaaaatatatccaattgaataaaacaatcaaatcacttcagtaccaggcgaatgctgcgccagtgtttgctcgcagaggggggtcgccagcagactttttgtagagcttttgaagggctatcaaccagattttcagatttcgaaaattttcaaaaattttcgagctaggcctaaaaaacgattttttggtttttgaattttaggaatttttaacgaattttccagggaaaacggagacaactatcaagcaaccgttttttgagctctatcaattggtgaaatttttagaaatttttcgtttttttcccggaaacggaaaaaattttttggcctcagcgggacatttgagtcccgggcccataactcg

SEQ ID NO: 41761 - DNA, 967 bp, Heterodera glycines
  unsure (1)..(967): unsure at all n locations
tatcctncattggcatnncttgcccatgagggtaaccttccctctagagaagaataaaatttcaaatttgtatggatggtatcctcattggcatcttgcccatgagggtaaccttggtacaataagcctatcaattctttgtccctgtacagctcatgtaatgaacggtagcgctggtctgagcccggattcgtgatcagcgacctcgaaaaccccttaaaacttattttcattaatttcaaaaacacatttataggcacctgaaaatgtatgttaaaagtatcatgtaaactccacaagtaccaaaaaaaaaatgccaaaaattgtggtaaaattcaggattgactttaaaaacaggaaaatgctttatctcttccctatatatcgatcatgaggacgaattttttgactggggtcatccttaaaattagttggttatttctcatattccgaattcaaaaaaaaaagactattgaattccaatccaatttttattcccttggctttcaaatttctaaatttccgacaaatttcgattaagggtaaattaaaaaaaaattttaccatgaaaattttaagtttttgtatttttattatttatcttcggaaaatgaatcattgtccctgaaatatttaattattctaatcaagctccgtatatgaaatttttaaattgatttttcatttacctcgtctcgctgacatcgtaaaaagtctaaaaattaaataaatttttgttttttattattattacttgaagagctaattcaattgccacagtgactccatttggttccggaattanatgtttgtcatatcgatttgngtggaaaatttggttaaaatatgtgccgatcgatctgcgacaaatttcggcgtacactctgtaaaattttttataaaatataataaattaatttacatatntattttttattggatttttatgacattttggtaaaaaaaa

SEQ ID NO: 41762 - DNA, 1306 bp, Heterodera glycines
  unsure (1)..(1306): unsure at all n locations
tccttttcnctttcacttttgtttttaatttttcagccgttctcttcgtctcgtgctgaaaaatgtgcgcgtctacgcgcggatgtccccaaaacagaaggaacgtgcaataaacgcgttgaaagccatgggtttgacgacactgatgtgtggcgatgggttcgtccgtccattaaaaaattgtcaaaaaagcctttgcaacaatttttaatagttttattttgacctataaattcttcctacaaggaccaacgatgtcggggcgttgaaacacgccgaagttggcgttgcgctgctgacccatccgctgaagcccgaagaggcgacggctgccacctccgcgggcagtggaacaccgacgcaaagcacctccggcaccagtggcagacagcagcaaaatgagggcggcggcggtgagcaggtggcacagccccaagaaacggcaaaaaaactgccagcaaagactcggcgttacaacaaccgcgagccgacctcagcggatgccaatggacagcgacaacaacagcagcagttggccatgaccacggcgggcggtggtggcacgtcttcacgacagcaacagatgcaggtgggtggaagtgggcggagcagacgaacagaagcagcgtgacggagggttgttctaggggcataaatggagtgagttatccttccgtagcgatttgctcactttgctatttggcggcccatcgccctcggcattgtccccctcccaagaaatggggaacattcctaaattcaagccgaaaaatgggtttctccaatacggtttcgtccattaaattaaaaaatccctccgctgaatagggtcgtctcaatcaaatgatgcgcgacttagaagaccaggaggagcaggcgaaggtccgtcttggtgatcgcgtcgtacgccgctccgttcacttccaaatcgacttccatccaatcaagtgagccaatgcaattgcaccatctatccaattttacagttttgctatggttcagtttgcagcatcatcatagcaggtgacgcgtgctacgcatctgtcgacctacactatatcaatatgattacaaaaatatttggacagaatgaatcgtccttgtgtggtgtggcagtacatgtcatatcgattgccgctggaaagagtacgcgtttttattttgttatttaatgatttaatcatttattgtttttgctataattatgtttttgacatttttcaatggattttctagccacaattttttcacgttctggtttcagtgaagtataaaaatatagaaaatttgcttacagtttagaaaa

SEQ ID NO: 41763 - DNA, 830 bp, Heterodera glycines
ggcgatcgtcagactgtttcctctgccctccgtctcaccccactacttgctccgtcttcgcatgctcccttttgcgaaaatttatttcattttgtttatccatttttcaaatatccattaaaaaattaattaaaaatgcccaattttcttcactttttgtgttttgaatcggttcaaaaaccggtttatacttgtcggatcaacttcccccacccctagatcgatctgtctcatcgagagctatcgactggtaccatattcgtcgagattggtccatgagaaaaaaacatcgtataagtcaagagaaccgggaattcctccgatacgttcaaatgacagttcagattcaattggactgcccaagccgtggggaaggccaattcaatcggacaattgtccgggtgaagaaatgcgcatgtcggaatattgcgctggagggggaggaaggaaaagaggacgaagccgaggaagtgaatggccaaaggcacgagacagaaacgccatagggaaagaccatggaaaacagggacaaagttggaccagggaacaaaccaaaagagttttagaatcggttggagtcagtgaaatattttttgtatttttaccattttgcattgtgcaattaattaatttttatttgtcccaccgtttggtcctccgcccctcaggaagtgaaagatctctgttattatgatttgctatttaaattttaaaaaccacatgaatgtaaaggaatctttgccattttattccccaaatgactaccataattatcatgtatgtctcaataaagaagaaatgagtgatgacgaaaaataagtgtacaatat

SEQ ID NO: 41764 - DNA, 1249 bp, Heterodera glycines
ttctttcccctggttcaattccctttacagaaaattagattattgtcaatttttttttttggtatactcgtggtttcctataaagaaaatatgattcctcatagttttttttttaattgatacatattttatcattttttaaatgaaaatcttaccaattgagcttaataatcgcaaaaaccaacctttttttgttgaaaatctgttaacaaattgcacccaaatttttaaaatttcccccggcggcgcctatcggcaccgccggaccccttctttcccaaaagttttttgaaaaagcgagtgatgtgaaaatcaaatctgaatttctattaatattcgatgatttagtccaaaaatgattaattgtttgaaataattgaagaaaatttgtttgaaaattttcattaatttaatttattataaaaaaccaaataattttgtattattttcacttgatataaattaaaatttgaatttttttttaaatttttaaaatttttttgaatttttaaaatttcccggttggtcccggttcccggtttttcttgcggtcccggtcccggtcccgaaaaaaaatcgaggtcccggtcccggcttctcaggtcccggcaagtcccggtcccggttttggcaaaaattcccggtcccgtggcactctaattttaacttaatttccatttgcattgtaacaaattataaaaagaatgaaattttttaaagaaagttagattaaataaattctatttttaattaaaaaaaaatactaaaaccctataagacatacacaaaaataatattcgcctaaaaatataaatgatatgccaaggtcacttgtacattacaatttaatttataatacgtcataaaaacagagtttttaacaaaataacttttatgtatttattaattaaatagttaataataaattaaaatcatcctaaatgaagaagtgacagcatattatcaaaagcatatttgaaataaaattatttaaaatttttttctgaataatacatacactcaggtgcaaaagtatatgctcagagttttttttgccgtaacttggtcaaatgacgatcaatcttaatgattttgttatcaaaaaatagcttaatcaaaatctctcagttgacctatttcggcattttgcctcattagtgaaaaaataaattcactcaaaaatactagtcaccctcctatagtcccgaagcaaaaaattacttttatttttataacattttttaaaaag

SEQ ID NO: 41765 - DNA, 1346 bp, Heterodera glycines
ttttgtaaaataatttttttctgtaattttcatcaaaatttgatggattgaaaattaaaacaaaaacttcccggggagggggcaagaaattcgatgtccccgcccgtctcggtctgccaccggttggtcactcgcctgcgctgcgttgccctcctccaacacttcgcacccgtttattgtcaattcagcagccgctcccgcggatgatgtttcatcccccgtttgtgcccttccgtcttccatggttagcattggcgccacactttcgtcgccattgccatcgtcggcaaagagtgccgccgcgctcggtccgctgaccaattggaacaccgccactttggcacccaccgcaacccccaatttgtgctgtgccaacccgcaggaggggccgaaacagacggcgctgacctggtcagcaaagttgaactgcttcccgtcgccgccgcccgcagttgggttcaagcggacgagactaaaaagcaatgacaaatttagctaatgtattaaaaagggtggaaaattgggagcacttcccccccccccccccttctccgtgtcgtttctagttctgttcgacagtagcggtttcgagatgaaaacaaaaaaaaagtaaaaatttgcaaaaaaaaaagaccaataaaattgttttttaaattttataaaattattaagcgaacaagaaaattttttgaaaagggtctcggactttttgggtctcggggggtcaagtctcggtcttgggaaaattttgggctcgaacagcacaaatcgtttcccatccaaatttttttttaatttaaaattttgaaaattcttttacacgaaaattccaagtaaacaaaattttttgaaaaaatagtaattcttcctaaaaagttgagaaaattgttgaactttttttttaattattttaagttaaattttacaaaaatttaagttttttacactttcgagggtggggggacgtagtgcaccatggaaaatgtttatacccgcagctggaattgactcgaaaaaggaacactttctccgctggagcagcatcgacatcatcggacgcgacaacaatatgaggagggtcctaaaaagatgggacaaattggcaaaaaaaaatcgatttaaaaaagttaaaataatttttttatattacaaatcgatttgtgctccacgaaagggaactaagccgattctttgtcacttcatagtcgtggagaactaaaagatgaaaaatgtatacaaaaaaaaaacaaatttaattaattgtaagttgtacaaaatccggggatgcttttcgcccgcaaagggcccaaaatgtctgacctttcgctaggggggggggggggggg

SEQ ID NO: 41766 - DNA, 1160 bp, Heterodera glycines
atgtcaaaacccaaggacggccctgatcgatagtcattcatctttcgaaaattggtcatcacagatgcccacacactgtgccattacccttttcggtggtgaacgacggcaccgcgttcatcggcagctgcagtttaaagtgcgtctcgcgcaccatcgcggtcaccatgtgctccgtgccaaacgcatgcacatgagtggcactggcggcgtctgttggccgactattgctggtgtccgtgttgtcatccaccgccagattggtctccaccacctcggcacggaccaatgccttttgagaagcgggaaaatttgatggaattttgcgcaattttaaggacaagcggacccaatgaaaacggtggcctgaattgatcgagcaaaaaaaacgtaatttaagtgggccatctcaaagaaaagtgatcagagctgctaagcatgcttttttgcctggtctgacgagaaagcttgtaagcaggtgagacggcatgttttccttgttaccgaaattaaaaatccctaatctacagtagtcagtcataaagttttggacaaagcaaaaatctgcggattatttatccccaaaattctttatgatattgatggccatatgaatcaataacattcatttaggctgaattaaggcctaatttcccgcattgatcacagatgttctgacaataaacatgataatggcattcattttaatttatctcttcttgacactctctccctccacctgcaaacagtgcaattcgttctgggcaaattcgagccgtccgagcacgtcgtcgcccaatttgaacacattcctgaagatcacgacggatgcgatcagtcggccgccacttttgatctcgtagaaccgttgtttgcgcactgagcaaatttcttcaattcgattgaccgccaattcgacaatggaaaggctaagaaagggcagggaaatgtttaaagattcaaaaagtgatccatttgaaaaatgccattgcaatttgatctaaaccgggcgtgatcactgtttgattaggggaaactgtactgagggattacgtgtctcgagagcctataatcattgggattcataatttagagaagttctacattaagtcaagtcggagacccgttttgggatcattaattcgcctgatcagcatcag

SEQ ID NO: 41767 - DNA, 875 bp, Heterodera glycines
  unsure (1)..(875): unsure at all n locations
tgtaatgaaaaataaaaaaggtttcntgtacancgtccgcggaattaaacccaagagacaagcaatgaaaatcagaaggtttaacccttagaccaaatatgcatataggaaaaaaaataataaataatttatctatagctactagaaaccgaacaggatcagggcgtccggtggtgcttcggatcccgatagccgtgatcattcgaaaaaatgtcgggacaaggaattagtcaaaatctgaatattcctatcttggcctataccaataaaatctcaatcatggcaaattggtgtcactgacacgacattttcttcattctaccaattcattaaaatttatattaatttgttaaaattacagcacctttttatgtctgaaattacaattcgtggatttttgaatcagaaatcgtaattttctcacaaatttgaaccaattttttttaaatttccaatttttataccttttaggaatgttatttgaatttttcaatttttgaacatgcctatccacgcttatctatgataacaggaaacttttgtttttaaaataattttaattttatttaagtttttctatttcgttttttctgagttaatttttactatttgaaatcgctaattatccacacctgaatatctttgaaactgctcaaagccaacccggcaccaccgccgccacctgctccattttgttgtggcattttgcccacggcattgttttcagttggcccatttcgaatttgtggtaaaattggggaaattgctgaagcaacagccactggtgtcgtagtggtgccaccgttgttgttattggacgaagcattacgagaatctaaattactttattacatttatgcaattttttgactttt

SEQ ID NO: 41768 - DNA, 1222 bp, Heterodera glycines
aagcaattgatcgcaattggaattgacagggacaaggtgagtgccatccataacagttatccgaacggaccgggccacaaatgccaccaataataataatcgttgtgccattcattttaggccaggacatatttcgccccctatttaacgcattgtgcatttgaaagcctcacgcaagcattcacaaattcaatgtttgtctttccttttgcgctgcttttcccccgttcatccttttttaccccagggcattgatggaatggttcaaacggtgtgcccaccaaacgctgaaattgggccgtccgatggaatgggtgactccgcttgggctgcccgtggtgcagccatatgttacggtggacaaggagggcaccggccttgtgtttcggcccgtcccacacaaacaggtagcccaaccaccacacaccgcatgggcatgtctattgaagtttggacttgggaggagggggggggggagcggatgccatcccatggtgcaacttgaaatggcacacaatgtgccaatgtatgacataatttcctctctaattcaccgaacaggtcaacgcttttccgcccaattttgtgcactctttggactcctcccacatgatgctgaccgcgctgtgctgttaccgacacggcatcacttacgcttcggtgcacgactgtttttggacgcacgcgtgcgacgtggacgaaatgaacagggtaagacaaacggtggcagggcgaggggaggggggggggaatccacctgtgttgatcaatcagatcagttaaatgatttttccagatttgtcgtgatcagttcatcgctttgcatgagcagccgattaccgagcaactctcccgggtgctaactccacttttagccccttttttattcccattattctttagtttttcacttcaacatttttaccacccgaactgcgccaattaatgtccgtcgacgaccaaccgttgctgaacaaaattgtggaggagttcaagctgaacatacccccgggcaatttggacattaccaaagtgcgcgaatcgaaatactttttcagttgatcgtctctttttccttttcgccccttcgcttttttatgctcaattcatttcagatttcttttttggcaatcctgaaaaatgggggtttctattttcaattgttttttatgagcacaaaataaataagttaaattagaaacccctattcttcaggattgcc

SEQ ID NO: 41769 - DNA, 1481 bp, Heterodera glycines
tgtaggaaatgatgaaaaaagtggtgcattgtgctggaaaatcacatgccctggaactgttcaagcaatgccaagaagttgagcggaacggcggaatgttgacacaaaatcgcttaaggagaagaacacccgggggcgtgtttatgaaactgttcaacgaaagcaaagaaatcagcgaagagaataaggcacatttaatataattttccattattcaaataaaaattggcagtttagaaaacaatgcacgaatttgggacagaaaaacaacggcagagtggagaattaccaaaatggtgggagaaaatgaatcagagagaagaatacacacctgagaaggcaaacaaaattttttgtcaaaaaatacatccctaagaatggggcagaaaattttcaaaaatgcgtccttaagaaatgaaaaatttctcaaaaatttatctccaaaatttatttattatattttcttgtcgatagtttttgattttgaaaattatgtatatctgtaatggctgggcaaaatatttatggttataaaagaaaattttggattttagacctcctaaattcggaactttttgtcacctattttcccatttttagcatcctattttgcgggttttttagaacactaaaacctccttattttggcactttttagcatcctataaattgcatccgtattcataactagaaaagtgcttaacaacagccccaataaaaaacatgtttttcttgcatttcaggccacggggagctcaggaaaaaaataggcttttgcctaaaaatcccatccctaattatgactttaaaaaattgttattatttttaaaatttataaattaaattaaaaattttatgctattgcattgaaacacatttttcaaaaatcttaatagtcgcgccccataccccacctttattaagacccccacctgaagcaaaagtcttaatttactcatgaaaaatagttgtcaaaaaattaattttgaagtttaattaatttaaaaaataaatatcataaattcaattggaaaaatccttacaaaacctgacattattaatttttattcaaactttcgaaaacatttatttaactttgaaatattattaaatcgtttagttggactttaattcaatttgattattccacttaattaaatatttagacaaagaaaacaaaatgattttttctgctccattaatttcttttgttatttatgctttccatttctcatttccaatttcaaatgcaaatccattgatgggttaaattttggaaaattctattttaatccattaattaggtgacagacaattggctaattgcatttatgaaagaccataaaaaccactaatttgtcaatattcaacgcaagaatatgaggcttaccttggaattgtgcatttaatgagaaagaattggcaatgtgacaaaattgggagagaaatttgcagaatatgaacggatagaatgccaaaaa

SEQ ID NO: 41770 - DNA, 961 bp, Heterodera glycines
  unsure (1)..(961): unsure at all n locations
cacatataantttttttatcaaaagatttgaattgctccttggcgtctccatcgaaagttatgacgaacggctcgagaacatggaaagtgcagaaaatatgtactgttttcctggtgaccattattgtgtggctgtaatctgtacaaaaggttgatcagtccttcgtggtactttgcggtggatcatagtccgaaaatctgcatttttggattaatatcccgcaaaaaatattgagtttcaatcccgttgaattataccgggcattcattcaacttttagtgttttaatggacaaaattaagaaatcagattaggaaatggataatttatgggcttaattctatcagaaaattatttgtttctaataaaaactgatgaacttatttgaataatatataaattaattgcattttcggattaatctagcaaagaaaaaataattgagagattgagtttcaatccagcaactgttacgcaaacagtttgcattgacagttttttaatatttcggcaccaaaaatgatatttattgttgcttattagttttatattctttatgaattttaattgcatattgtacggtataatcttcgggaattaaattgataattgtctatttcttttaataaatcatttgtgattttgcttttgttctcagttggttcgcgcggatttttcggcaatttattggggttgtgctgccgaatatatgaaagccgatgtttactatttgggtataaaggcaatgctgaaggagaaattcggcaattcgtttaaatgttggcgtcattatggcgaaaaagatcagcacatggacaatttgaagttcacgcgtcctccagtgccgaacggtttgatgtgcttgaagggcgaaatggatacagcgggaaatggtgccaacactcgaggatcatgcacggacgaaaaacattattgcttcaaagcacgctgcgcaaaaggt

SEQ ID NO: 41771 - DNA, 605 bp, Heterodera glycines
ttacattgaattggtgtgcaaactcttttctgcgttcttttaggttactatttatttgttattttgttaaaaattttaactaggtttatttttaggccatttttataacctttggtctctccgggtttcctattggctgtacccctggaaaatatttgttggggcttcgtgtgatttcatgtcttgatgttcaaccaatagttggctcttcggatcgtgtgatggtcacctgcatgccgagtgttggtttcagaaggtgggcttttgtttggtctgttcctacaaaaatccctccactttttctttggctctccgattctcattttgtttaacctgccgttcgtgtccaaagactcaccaaaattttaaacaattggatcgcaaaacgtttttttctgttttttaatttttttttattttagctcactaactcgcgctgtgatcaaaaacatgctgaccacctttttgttccctctcagtaccgccttttatctgttcaatcataatcgtgctatttatgatttggctgcaaaaacaatggttatttctctggtctaaaagatcttttttatgcgttgatttattttttatttatagacttattt

SEQ ID NO: 41772 - DNA, 830 bp, Heterodera glycines
tggtggattgagtcctgttgattggaatgttggtggattgagtcccagtgattggaatgctggagggttgagtcccagtgattggaatgttggtggattgagtcccagtgaaatgttggtgggttgagtcccagtgattgaaatgtaggagaattgagtgccagtgattggaatgctggtggattgagtcccaatgattggaatgttggtgggttgagtcccgttgattggaatgttggtggattgagtgccagtgattggaatgttggtggattgagtcccagtgattgaaatgttggtggattgagtccagtgaaatgctggtgggttgagtcccagcgattggaaagtcagataattgagtctcagagattgaaatgtggtgggttgagtcccagagattggaatgtcattgaaagttggtgggttgagtgagtcccagtgtttagaatgccggagatttgagtccattgtttggaatgccggagatttgagtcccagagattgaaatgctggtgggttgagtcccggtgattggaatgttggtgggttgagtcccgttgaatggaatgttggtggattgagtcccagtgattgaaatgttggtggattgagtcccagtgattggaatgttggtggattgagtccagtgaaatgctggtgggttgagtcccagcgattggaaagtcagataattgagtctcagagattgaaatgtggtgggttgagtcccagagattggaatgtcattgaaagttggtgggttgagtgagtcccagtgtttagaatgccggagatttgagtccattgtttggaatgccggagatttg

SEQ ID NO: 41773 - DNA, 1083 bp, Heterodera glycines
ctctttttcgctgctttgtccctctttttcgctgctcttctctctttttcgctgctttgtcccgcttcttcttttaccggtggagacaatggcctaaattaagcgaaatttgatttattaaacaaaacaacaatgttttattatttattgctcacccaatgcattcggcaccattcaaaaaaatgttgaaattgttcaaatttttgtctttccgctgaatcgccgccgtctccccaattttgcatcgtttcattatccattggttgccccaatcagtttcgtttgctttgatcagtgtcagcttttccttgttctgtccgttcaccaattcaaatggcacaattggcgtttttgactcgtcaacggcaagctgaattttgtagctgacgcaagtggtggccttgataaatttctaaacaatggaaaacggggaaaggcaatcagaatcagttgcttaacaaaaaagtggccacccctctttgaaattgatgacccatttgacatttggtggattcaaattgcaacacaatcgcttcggttttccatcttttctcggagtgtgcaaccattttgtcaacatttggccagcagttggaattgcatttggcccatcaacatgatcagcagcgatcacagcggggaacaaataaccggaatcgattgaattcaattgatcaagatcagtgagaagttttggcgaagtgcggcgaagcaaattgtacaaatcacagccatcggtaaaggacaaatgatgaatgtttggcgcaaaaattggccaaatttcacgtgcaaaaacatcccaaattggaagggcataattgtagttgttgccaatatacaaatccaatttggtgccatttttagctcggaaattcttcgtttaacgcacttattcgagtttagaaatccttattttagaggttcgcccttaaaataagtttttgcacttattttagcgttttatgcttattttcaccctatttcgcgatttttaaattttttcctgtaaaattcacaaattttttaacaaaaaaacaatgaaaaaattttttttttgacgcgatcactttttttggcaacttg

SEQ ID NO: 41774 - DNA, 885 bp, Heterodera glycines
atttacaggtatctttttactccttttctggcttattcattgtttctacaacaaaggtactcgccccttcattgtctccgcctcacgaacggcgtgaattggccggcaacactgctgatgagtgccgatcacgatgtaagagttttttctgcagcgggtcccaaagggttggtgggggcgaggggtacccgccggggttgggtgtttaccagaatttgcctttttcattcgtttacatttttaaggaccgcgttgtgcctcttcacacattgaagtacgttgctcagctgtaccatttgctgcgcacggaggcaagcgaatggcaacggaggccggtgctggcgcgcattgagacaaaggcggggcacggagccggcaagccaaccaccaaaacggtaacgcaaaattctcttggggaaacaggcaactgatactctctgtgctgctttttgttcagatcgccgaacttgtcgatttgtactgttttttgcagcgggtgctcgaacttgaatggaaagaggagtgatttgattttgcgatgttgtgcaaaacgtaattctatttatatgaaaatgtgtgtctttttctttgtttcatgtctataaatatgaaaaaacacgatttcgtttcactccctccctccccctcgcccatgtcagattctatcaacgaccacgaaaactcataaatgttttcaggctacaatgggtactattaccaaggcattgatcgaattgtacaataatacgaagaaaaacacaagggattcagattgaaaacggaacaagatattggctgcattcaacaagcaatgtttgtaaaaaaatgagaattttaaattgtcaaaaaatattcgagtccgtgttcggtgttcagaattgagcc

SEQ ID NO: 41775 - DNA, 1481 bp, Heterodera glycines
ttttcctgcatattctcgccagtgctcactcacctcccaaaataagtgttttatatgcgccctttggtgcatccaatgactgaactttctttgccaatttatccggatggcatttcaccattatatgcctaaatcgaccatattaagttaaggaattgaattaattcagcttcactcaaccttaatctcctcagttgttcttgggagggtgcatccattctgaacttctcgggcaacttctccaccagaatcggatttgttcagaagaagcgtcagctgatgtctctgtttgttgatttcctttagggccttagggcgaagtcctagggcttcgattgcgtgagcgttctgtttgaaaatggtacctcatttttcataaataaccaaaatttatggtcaaaatggcaagaagaaagttttttgagtattctggttatgagtattttaagatgaatttttttgcgcaaattaatagtgacagtaacaaatgtttattctggaaatctggctaatattcctttacaaatctcctttaattaaatttgaagtgcttggtctgtggcccacctcttcctcatagtcagcagcaccaacagtgttcagaattactgtcaaatcaccaaagagtcgagcctcgccaacagcacaccaaagaaatctttgcttaatcacttcggacattctttttcgtctctcttccgttccgtcctcttttgtgcttgaaatgaacaataatggttcacgaacggagagagccgacaccaaagtgacggcaaaaggaagaagtccgccacgaattgaactgatgacgaccttcgcaaaagaaggagtgagaggcagctgcgcaagtgattgtccaagttgtgtgatggtataaagcccctgaaaggacaattataaaaaacaagaaaagtgactcatggatcaacttcttgaactctaagcgcccctatgtgagaaagtctcagctcagaagatttgatttggtccaatcttggaggagtcgggaaaggaaaattgtcgattttcgtgaaattcattgctttcaacataagaatcaattggtcgatcggtttattaaggatctcaggagtagaatgatcgcgcatatcttcgtaaacagccgaagaatacaatctaaaccaaaatgcacaaatcccttcaaaagtcctaattttactatgtcacctgaatgcgtatccggactgaactcgtccggcacgaccggatctttggtctgcagacgcctttgaacaccatccgaccacaaaccgagaaactcccgtaatcgggtcatattccctcttcttttcccgcccagaatcgatgacgtaacggacatttggaatcgtcaacgaagtttctgcaacatttgtagaaactacacacaccctgaaaataggatagaaactcaaaaaagtccaaaaatgtcgaatccaacctagacccgtcatctggcggttcgttgaaaatttcttctg

SEQ ID NO: 41776 - DNA, 916 bp, Heterodera glycines
caaaatgtgcgttcaccaaaacatcgaaacggggcgaaatcagtgccaatttgaggccgagttgagggcggtcaaaaaagggcaggatgtccagccaaacatcggcacaaatccagctgaatttgcggggaaaagcatttggagaggctttaaaacagggttgccagatgaaaatttacaaaatcagagtatttgctaataaaaaatcaccattttgaaaaatttataccaaaaaaaagtcaaaaatatttttttgcagcgctttttccgaaaaaaattttttgggtagagggggctggcggtggagataggaaaatttttgaaaatttgagtgcaatttgttgatatttttcactaaaattgactaattttctcttttttgagccaattttattaagaaaaactaggcgccgtggggtgagaaaaattagatcatttataaaaaattttcactgagaattggatttttgagtgtttttttcaaaaatccgtaaactttctcaaaaaaagcggcaagcatcaacaaatgatcatctcaatatattaaaaatcagctttgaccccttctaaagcagtaaaaataaagccctactttaaaatgaaattcataaatttttaagccaacaaatttttgctcacattttcctcaaaatttgtttcattttccttgccactcgaacacttcgccgttttccgagtgacgtcataagtgaacccatcaattgctgctgctgttcatgtccaccaagtgcggttgaagaaatgaggcggcggttgtcagaagaaaacgttttcttttttgtgacgggcggtgccattaaaaataattctgtctaaatgcaaatgattactaattcaattttcaacaaaattcaccaactttttgtgactacacatattaattctaagaagccta

SEQ ID NO: 41777 - DNA, 1051 bp, Heterodera glycines
gcagcaatgcggtgaccgccagcattttcatcccaattgtgcccagcatggcccagcgggcacagctgcacccgttggcactaatgctgcccaccacgttggcatgctcatttgcctttgtgctgcccgtcggcacgccgccaaatgcgttggccatcggcagcggactgttgcgcgtctccgatttggtcagtcgatcaaccaatttgtgctgctgttcgagagttaaaatccgtaccgagaatagagactgaaaagtccaaaattccaagagaattttctcgaatcgcgtgactaaacactcttgaaaacaaattaacaaagtgccaacatactgtttaaatttggattttgttggacaaagaccgacaattttttttttttggttaattgtacggcttacgacaattttcaggataaaacacaaagtcgtaaaccatgacaagttgtactgctccgtttcgtactgtcttcaacaaaaaaaatgtcattatttttgtcaaagtccaccaaattaaacatttttacaattagtatcattcaacagcttcttcatctcgctatttaacatgcaaaattcaagaaaatttaccatgattcaaaaaaaaaagttatgacgattttttgtcaaaacaaacagtacgagtcggggcagtataagttgggtttcgtccaattttcagccaagcagtgccagtcgtagatggctatttgtttgggatctttctgaaatatggatttcgcctaattgtcgtaaatttcaaaattcccagattctatcgcttttccgtcggtacgctttgaaattcttaattttttgcagatgctctccggacttgccgtgtcggccgcttccgcgctgctcaccatcgcttatctgtccacttttgcgcctctcattttacccattgactgcttcccggaatgggccgcggttacgacggcgacggcatttgacgccaacggcacaacgctaattgccgagggggcggcggaggaaatgggcggaattgccgcgcttggccggctaataatggcggaggaagcggtg

SEQ ID NO: 41778 - DNA, 1270 bp, Heterodera glycines
  unsure (1)..(1270): unsure at all n locations
cccaaacttctgtaaaaagtcatctggacgaacggcggggccctgcttccgtctggctacagtctcgagagctaatttggcaaaagcctcatttaaagcctacctcgaaacaggtacaataaaattcctaaaaaattatttgggctcctatgacaacggcggcatcaaattcgggttcagcgcagccaaaaaacnccattcagcagattctcagttggatacgatcaataacagtataaaaaactgattggtaaaaataccaccccaaacttctgtaaaaagtcaactggacgaacggctgggccctgcttccgtctggctacagtctcgagagctaatttggaaaaagcctcattttaaagcctacctcgaaacagtataaaaaactgattggtaaaaataccaccccaaacttctataaaaagtcaactggacgaacggctgggccctgcttccgtctggctacagtctcaagagctaatttggcaaaagcctcattttaaagcctacctcgaaacaggtacaataaaattcctaaaaaattatttgggctcctatgacaacggcggcatcaaattcgggttcagcgcagccaaaaaccccattcagcagattctcagttggatacgatcaataacagtataaaaaactgattggtaaaaataccaccccaaacttcggtaaaaagtcaactggacgaacggctgggccctgcttccgtctggctacagtctcgagagctaatttggaaaaagcctcattttaaagcctacctcgaaacaggataaaaaactgatggtaaaaataccaccccaaacttctgtaaaaaatcaactggacgaacggctgggccctgcttccgtctggctacagtctcgagagctaatttggaaaaagcctcattttaaagcctacctcgaaacaggtacaataaaattcctaaaaaattatttgggctcctatgacaacggcggcatcaaattcgggttcagcgcagccaaaaaccccattcagcagattctcagttggatacgatcaataacagtataaaaaactgattggtaaaaataccaccccaaacttctgtaaaaagtcaactggacgaacggctgggccctgcttccgtctggctacagtctcgagagctaatttggaaaaagcctcattttaaagcctaccttcgaacagtataaaaaactgatggtaaaaataccaccccaaactactgtaaaaagtcaactggacgaacggctgggccctgcttccgtct

SEQ ID NO: 41779 - DNA, 871 bp, Heterodera glycines
tccttccggaatagcttccctatagcctgtactttattctgcgttggatttttgctccccataattgtttgagtaccccaaacggacacttgaaaaaatcgatttttttgttttcggggcagtccccccgaaccgatgcgcccagatttatggggagaccgaatccttcgggaatagcttccctatagcctgtactttaattctgcgttggatttttgctccccataaatgtttgagtaccccaaacggacacttgaaaaaatcgatttttttgtttcataaatatttttttcagaaagtcatgcgcacccgtccgatctggcaagttaagcaacgattgctgactagccaaaaggttcggtgccgtgatgaaacgaaccagcactgcttaccccgcggcacccggcacggtcccccgaaggaatggatttaattaaattctctccttcggggatttttttccattaggtcgtccgttagcgttcgattgctctagtcaatttttcaaaatttttgttgaaatatttgtcgtgctctgaagggcgtgggaggggggggggggcgaaggcccaccacgaggccgcgaagaggccgagtgagtaccttcggtgcaggaaaattattaaattttaaaattttttaattgctttttaaatatgccaaaaaatgtaggcttaacttttttagtgaaaattcgatcactcatattttttgctaattgagcagaagcgtaccaaactttgcagggatactccccggtaaaggactaacttacactgaaatgagcgccgagctagctggctcaaaaaaatttttcgaaaatctgagtctttcgtttttatttatttgcaaaattacttcataaatattt

SEQ ID NO: 41780 - DNA, 1394 bp, Heterodera glycines
  unsure (1)..(1394): unsure at all n locations
tgtattttgcaattttattttgaaaaactgcagaaaataataataaaaattttatatttcaatcacattattttgctgattacgaatggatttcataggaaattatataacatttaattcatttagaatgtcagagctacaaaacaatttgttctaaaatatttatgaaatattttttcgaaatttttttttataaattataagctgggaaattgtttcgctaaataataaagaaattatatttaaacaaattttattatattttactaaaatatttttctcaacagcaccgcactttgaagcatataaatcaaaaatgaataaaaatatttatgtatcagctttttaaatatttaattttttaaaaaatattggttattatttaattattatatgatttgttagattaattagtttttataataaatttgtttaatattgaaaacacttggctcaaattgatgtaaattcacttttactggtttttgccttcaataagaatactacttaaaatttttgtttttttattcctttaaggcttcattagcttttaatgttgtttttccattacttattttatatatcagatttgatttagcgcttacaataaggtagtttttttaatatataaattttatcaagtaaaaaatttattttatacatattttcatatttataaatatttattacaaaccaatttaacaatataatgtgtattattattttatcattaaaaaaatttatatacaatttataagaaaaacttttttctcttttttgtatgtttaaaaaccaactctttatttcatataatctttgacctatgaaaattcaaatcgctaaagtctttccaatttttttgatttaaaatgttgtttataaataactaaaaattgatacgatagtttaggttatataatgaaaaatttgttgatatatattaaataatttttttaattcatctattttatcatctagattcgaatacaattttcttttgtactttattctaacaattaactaatatttgaatttaaatattattttgcaactttttttatgatttttaaaattttatcgaatttttaatttttttataggtatttattatatacgctaatggttaaataaagcttaaataggtctattctcaatagcgcactcttgcaacatgttgacattgttaacaagatgacaatgaagattatttggtttttggttcatattttttatttattttttagctggacgcttaccctatcgttttctanaaattgaagcttaaaagaacaaacgaaaatataaaatttaaataaaatttaacttttatccacaattgcaaagtcattcatgttaattaaaaattcatattatcataatttaaccataaaatt

SEQ ID NO: 41781 - DNA, 1103 bp, Heterodera glycines
  unsure (1)..(1103): unsure at all n locations
aaatttttatttttaattaccaaaagtgttatttttcttctaggtattnggntaattanttattatgatggccacccctttttgttgttgnagatnngantggntttggnntggnattgngntanatgacactgttgcatgtcgtgaaaacgactgatgcttaaaacaagaaaatggtggtggtgatggtggcacactcgtgcacagttttcgcgaactggaaatcattgccataatttggtattacaacgaacacattcgccaactttttgaatttggcgaagcattgcaaaacacaaatgaaacatttttaaaagcattaaaagaacacaaacaaaactggaacaagctgaatgacataactattgctaaaacgggacagttgtgttggctttacaaatttgcatattatttggcatttggtgctttgaacattgcaaatgccgagtgggcacggcatgttgccagcctggtccaagttgttggcagccctctgttgagtgaggttggaaaaatatttgcaattttcttgggttaatcagaaatttttgcctccgaatgggtgctaatgcttttcctaaaaacagtcatttaactcacttccgaaaaattcatgataattttaaaaaattttgaaaaattttccttttttctttaaatttttgcttgaatagtacaaaatttttaaaataattaatttagaaaatttttgttaatcaaaaaatttcatgaaatttaattaaaaaataagttttattttatcaaattttctttaagtatttttgtttaaagttggaatggatggtaatttaattttgataaaattcaaaattattataatgataatctatcatttatcagcttctaataactccatcggctgctgagataaatgatgggtttgactgtgccaacaaagaaaatgtagacaaattgttgcaaaaatttcaaaacaccactaattggatgccgacggtacatttcttttgcctccagcgtttgattaagcgctttaaacaggtgggaaatcataaaaaaatattttgattaaaaatgtccccgnattgctaatgaatggttaaaacgctttgactccttattgt

SEQ ID NO: 41782 - DNA, 1164 bp, Heterodera glycines
  unsure (1)..(1164): unsure at all n locations
aaacggcctctcaaatgcccaccattttaaatttaaataaaattcagtttccataaaacaatggaaggagactttttgaggtttttttccaaaaaagcagttggtatcactgggttttttatgcaaaattttcatactccataagaaaattgcagactcaaaggagtccccctacagaaatttttctaatgttaaggtataattgaaaatttataaccatcacaacaaaatgtgttctttttaattaattgcactcaattttttaagttgagaatgaatccaatcagcgccaaaatattgaatgcccactctacgtcagaattggggctataaaagtggcgccgatggacttagaacacgcactgaagtgtaagtgggcgaaaaagtttctaaatacctaaataggattttcggcccaaaatgcgaatttaaataattttaaaaatgatttcgttttggccaaattttagatttagtgcgaccttaacaatacttggtacttgttaattatcttttcaaaaaaatttttgagaataaacttgttttttggtttttagggtcggaaaacccgattctggcatctattttggttccgggtttgaatttgggccaaaatagatgccagaatcggatttcctgaacctaaaatccctaaaagttttctttaaaaaatttaaaaaaatttttttcaatgtttccttgcccgtcccgaagaaccgcatggatttggcgaagcaatgcgtttcaatggtgactggccaccggcaattttgacgtgcggtgtgcgcgagtgtttcgactcggaaaacaacacgcggttgaccattgccgaagcagtgcgccgaggaattttgaatctggcgaccaacacattcgttgacacaaagaatggcacacagctgacccttccacaagcacatcatcgcggattcattcataaaccgttgactctgacggaagcggtgcggatcaaccttttggatgagagcgaacagtttcgagatggcgccaacagtcacacactgctacaggcaagggcgtatcaangggggagggaattccccacccccccgaatgaaaaattttttaaaattttccagcaaatggaaaattttttcaaatttcccccccccccaacgaaattttctaagcaaatttttgtaa

SEQ ID NO: 41783 - DNA, 1643 bp, Heterodera glycines
  unsure (1)..(1643): unsure at all n locations
tttaaatatgtttttttaaaggaaaattttatagggaaatttggtggaaaaaaaaaattccaagggggtgccaaaaattttttaaatttacgaaatgcatcaacaccaagacaaataattacattttccttatttagcatcacatacatctcaaatgtataaagcaaggggtaaaattttcatttttcgattcttctacaatttttgtaaaaaattttatttagcaatttcaaattacctgcaaatgcatgccctatatgtcgtgcagaagtatcagagaatttcatggggttattaagaaaaaatgatcaggtaaaagttaaaaatatttttaataattattattattattattattattattatttattttaaaggcaggccgcccatcaaattcaaaaacagaacagacgaaatacggttatatctagggaaccaatttttaagctgaataaatgtttattaatttacctaattaataaataaattaaacaaaaaagtcagaatattaattaatttacctaattactaattagaatattgaacccaagatttcataataagcaaaattaaaatcgaataatgcaaaaaaaaaaatagcaaaataaacattaaaaatcaaatataaaaaacaagtactcactttacaaatgttgaaaaaaatttttttttacaaatttaactggaaaaatttataaatttaagatcggcaaattgctcttagcctatcgcattatgataattcaacggcaaatgacgcacaaattgcggaagcaatggataaagcgtggcaggagcaagcggatgccgaattagctagacgattggctgatcaactatagtgtaataataatttgggcagacaatttttaatgactaacaataacaagttatccaaattaataattaattaagaattaagaaaaaaaagccaaaataataattaaatgctcggtcaataagcagtcaaaaagatagatcagaacgaaaataaaaaaaaattgttaaccaaaaagtttttaacaaatctttttaattttgatgcaaatgtttgtaggtttgtctaaaataagctcgtttttaagcgtttttaaaatatactaaatatgaattatatatcccttcagtgaagacaggaccgcctggaaatttttagattttggtctgattttttttttaaaacccatagaaaataaaaaaaaatatgaaaattttattaataataaaaaaacgactaaaagtgcttaaaaatttgcagtatgccatctatgaagcctttgttaataacaacaataataatgttgtgatgaattaattttccttaaaaatttttttatagcaaaaataagttttatttattttaaaaattaaaaaataaataattattaattacacagaatttttgacgaattggacaattctcgagcaccgatgaacacaatggacactgagattttgaaaataaattacgctcttgaaaaactttcttttttgatccgtgctggtatcgttttgtaatcctaaatgggcaatcccctagcaattaacgaaaaaaattnctaaatgatttttcctcatacctttttcaaaatcccaaaattattttttttttatcgttcgttcctgtccataaattttttttt

SEQ ID NO: 41784 - DNA, 987 bp, Heterodera glycines
tacgttacaatgctctcgagcatgataggaggggctcttctcgagcgccatttaatttctcagagaatttttaaatttatcttatatccaagaaaaatgactatctcttattttgagaaattttatacgttacaaatgctctcgagcatgataggaggggcggtgcgcaatcgccatttaatttctcagagaatttttaaatttatcttatatccaagaaaaatgactatctcttattttgagaaattttatacgttacaaatgctctcgagcatgataggaagggcggtgcgcaatcgccatttaatttctcagagaatttttaaatttatcttatatccaagaaaaatgactatctcttattttgagaaattttatacgttacaaatgctctcgagcatgataggaagggcggtgcgcaatcgccatttaatttctcagagaatttttaaatttatcttatatccaagaaaaatgactatctcttattttgagaaattttatacgttacaaatgctctcgagcatgataggaagggcggtgcgcaatcgccatttaatttctcagagaatttttaaatttatcttatatccaagaaaaatgactatctcttattttgagaaattttatacgttacaaatgctctcgagcatgataggaagggcggtgcgcaatcgccatttaatttctcagagaatttttaaatttatcttatatccaagaaaaatgactatctcttattttgagaaattttatacgttacaaatgctctcgagcatgataggaagggcggtgcgcaatcgccatttaatttctcagagaatttttaaatttatcttatatccaagaaaaatgactatctcttattttgagaaattttatacgttacaaatgctctcgagcatgataggaggggcggtgcgcaatcgccaattaatttctcagagatttttaaatttatcttatatccaaagaaaaatgactatc

SEQ ID NO: 41785 - DNA, 1183 bp, Heterodera glycines
  unsure (1)..(1183): unsure at all n locations
cgggattttgcgggattccagtccgcaatccagcattttttggataaatccgggatttgcaggattaatcctgcgggaccaggtcccgcaaaaaaatttgaattccaatcccgcagcggggtccgaaaatttgaaattttcggacactaatcagaagcctccaagtgccaccgagacgttttgtgactgtgccgggttcctaatccggcttccaaatcttgacacaattgggcgtgaaacatgcggtcgcgcaccacgcattgggaacatcgaaaattatcatattaaaacctgccggattggtacaaatcaaattccgacgctcaaaagtttagaaaatttaaaaacgaaattccgaggcccaaaaatattatttcttggcacccctcggcattgtgacaagcggatttggcactaacaacagcagccggcccatgaataattgcccccgcttctcagatcactcagctggcacttgttcatcggagcctccattcggcgccggacagtgacgtggacgtagtggacggagaggaggagcacgaggaggaagaaacagaacatggaacagaagtgaataatggtgcccgagtggtagatgatgaaactgaaatgggcatggaattggagcaggagcagcaacaacaggaggagcaggaagaggaggaggaaggggatcaaatgatggcactgacaattgaccacagtgatgacgagggggaggaggaggagaagccggaaaaggagcgggatagtaatgtggaagaggcagacaccaatagtgccaaatttgacgacaacaacggcacaattgccgccgacaacggcaccaatggcaacaacaatccgttgcggttgctaatttcggcggttgaagagcagcaacgccaacaacagagggacaacaacgacttgtgatgctgacagacagacggccagagttggcaaaaacaggcacacaaaaccaaacaacaccgactttggcaccgttttttggcactttgcgctttgtggcgccaattttgtgaaaaattttgaacagattctctataacattttgtttactttactattcttatatacgagagccaatggaaatgggtaggccatggggcttgtgccgtcctccncctcatttgttttcccccgcaaatttatgccaaaacgcaatccatttttcatg

SEQ ID NO: 41786 - DNA, 1380 bp, Heterodera glycines
  unsure (1)..(1380): unsure at all n locations
ggagccgatcagtaacaattccggagcggtaagcgaggggaaaagcgagtgccaatacggagggctgaagccaaagcagcattttggatgagggcaggacgacggcgacggcattgcaagtgtcgcaatgaaaaggcgggaagtgacgaaggaagtgggaaaacgaaagtgccatccaacggaggaagaaggcttttggaaatgtgcaggtaaatgatttgccgacattcgcatagctctgcccaagtgctgctcgagagtgtggcctcgggtaattctgggggttttcatggtttttctgtctgcgattctgtgttttgagatatttagtaaaaaacagctcaacgcatatacagctgttgtgttaatttgtgtattagtatgctaaaggatatcggtatttattcatagcaatttagtagagggaacaatttttttaggaaaagagttctaccggaagcatacaaactcgtcagggcaaaaatactcaaagatttggacgattgtgccaatctcagcttcacaattgattgttgggcaggtccatcaaacaattttttaaggtaattttaggcttcaagaagcggtatttcaaaaaataattaagcttgactggtcacggcgtcacaaaaaattgggtgcaaaagaattttgtactcgctgttcaccatttttccggccaacattctggcaatgcgattgcgtgcaatgtccgtaaattattggacagttggaaaataaacgacggacgagtgtttgcttttgtaaccgattctgcagcaaacatgcgaaaggtaagaaaaagttaattccaacccaatcagaaattaaggcattcactgaagttgacgaaaattttaacaaaattttgccattttctgacccgtttgaatggtggaagaagcatggaccaaaacttccaatgttatcaaaattggcgatgaagtatttgtcagcccctgcaacaagcgtgccgagcgaacagactttcaaagtggcgagggatgtttatgattatcgacgttcgagattaaagccgaaaaccgcagaaatgttgatatttttgaacaaggccatcccaatgttggactacaaatactgatttaattttgttggatgataaaaagttcataaaattttccataaaattttggtttagaacaaagaaaagaaattacgcaatttttttatatttataaatgcatttttaaaatttgaaaaaagcccggtcccgtacgggcgcccggtcaaaattttggaccgggcccgggacgcccggtaaaacgggctttttttgaacgggcggcccgccccggtcaattttcgaagcccggtcccgggcccggntccggtacttccaaaattccngtctcntataaa

SEQ ID NO: 41787 - DNA, 1118 bp, Heterodera glycines
tgcgcttcaactgtcaaatggaattgctgtttcaaaaattgcttctgctggtcataattccagccaaaatatcacagacggacaatggcaccaattagtgataaggtggggctgtgccgctttcggaaacggaggatttctgtttttttttctaatttctaaatatttaaatatacatatatgtatttatgaaaaaattgaaaaattttacaaaaatactaatctattcattaaaaatgaaaaactaatgtaaagactaacataaattagcaaaattgctaaaatggtggcttttgtgaaacgtcctagcactctttatatattggaatttaaaaaaatcaaaaaataggatcccatttttttatccaaaaaatcggagcaattttataatttaatttaaattttattaaactaacaataagtaaaacattctctcttagtcaaaatgccaaaggagaagctgatgtcatcgcattgtccgtagatggcaccatgttgtaccttagcaaagtgatcagtttttcgtttgcacattttggcatggacaaattggcacggatcagtgttggccgtgtgccggaacaggacgggtttaaggtggattaatcagtctttcaattgtttctcacatttacatatttttgaatttttaaattttccagggctgcttgcgcaatgttcgtgccgggcccttgccaccgctcattttccattcgctgcaaaaagtgccgagaatggccgatgcaatggcacaggcacacctcacccattttgagcttcaacaccatgaaaatgttgtgccaagcgggtgccaatcgtcaaatgtttggtgaatattgttttaacttttattggcataatgccaatagagccaaaaatttaaaaatgttttacagtgccaagaacccatgcctgaacggtggcacatgtgaggacctgtggaatgcgatgcgatgccaatgcgcgcccggctttgaaggcgaacattgcgaggttggtacggtacggtacggtagcactcgcggtaaacagcaattttttctttttaaaaattcccaactcacaattcggtaggcctaaagaaattccggaaatcagggactaaattctgtggttca

SEQ ID NO: 41788 - DNA, 1369 bp, Heterodera glycines
  unsure (1)..(1369): unsure at all n locations
cagctcggtcctccgcaaacactgatttcagttnatatttagagaataaggagtgnaaatggtggattccanaaaaggtgaccaaganaatngtatcgaaagattattggcgattatcagctcggtcattccgcaaacactgattcagtttatatttcgcgaagaatgagctgtaattttgcgaattagacaaaaatgatcataaagtaacaaatgagagaatttcacattctgctaattaggctttaaatataaactgtttaagtgttgcagacggatcaggttgataagcgccaataacctcagatttactattttcgcgaccccactttttgaattctgacattttcagctcattacgctctaaatataaacagcatcagtgttccggaaggatcggtttgaaatcgccaataacccccaaattacaatttcctactgtaaacttatacagattacatttggatataagaaattgaaatattgagaatatcacaaaagtgatcatgaaaattgtaaattggagattattgggacttatcagctcggtcctccgcaaacactgattcagtttatatttagaggataaggagttgaaatggtggaattccaaaaaggtgaccaagaaaattgtaatcgaagattattgacgattatcagctcggtcattccgcaaacactgattcagtttatatttcgcgaagaatgagctgtaattttgcgaattagacaaaaatgatcataaagtaacaaatgagagaatttcacattctgctaattaggctttaaatataaactgtttaagtgttgcagacggatcaggttgataagcgccaataacctcagatttactattttcgcgaccccactttttgaattctgacattttcagctcattacgctctaaatataaacagcatcagtgttccggaaggatcgatttgaaatcgccaataacccccaaattacaatttcctactgtaaacttatacagattacatttggatataagaaattgaaatattgagaatatcacaaaagtgatcatgaaaattgtaaattggagattattgggacttatcagctcggtcctccggaaacactgatttcagtttatatttagaggataaggagttgaaatggtggaattccaaaaaggtgaccaagaaaattgtaatcgaagattaattggcgattatcagctcggtcattccgcaaacactgattcaagttatatttcgcgaagaatgagctgtaattttgccaattcaaccaaagtgatcctaaaagaacaaatgaaaagaatttcccattctgctaattatggtttaaataaaacctgttaagtggtgccgacggatcaggttga

SEQ ID NO: 41789 - DNA, 1028 bp, Heterodera glycines
  unsure (1)..(1028): unsure at all n locations
caacccccgcattcgtacaactcctcggtagtgccataatggcttagcaacgccgncaancaacagcccccgaacctcaagaagcgacaacaataaaatctccgtgtcgtttctgcaataatttctcaattcttcatccaaataaaagggcgtctccttgttctcattgtacctgaaaaaaaagaattttattcaaaaatttttctattttcctaccatttttcgaattttataaatttatccttgttcatagatcccggcgaatagtcctccatcggtggcagatgttccaatcgtattccataattttctttcttgttgtaataataggggaaaaagggcttgtcctcacagtccaaattaaatgtcgccttcagcgactcaagcttcaccggcatcaataaacatgagtctctccaaatcagctttgaatgtttcttcgagttttgcactttaaattcataaattttcaatccattgatgagcggtaacgggttcttcccggtacggcagaggtaattaaaaacaaaatgacctaaaaatttaggatttaaaaatttagattaattttttttttcattaccgtcaaaacgtccggcgttatgtgcaaatatgtacgtatcgtaattcgtaaacgcagttaaaatccactccacaaaatccttggtcggctcatgtccctccgcctcgctccaatccttgatcctctcctccccacaaattttgcaattcgtcctgtttttgtcatcacagcattccgtacacgtaactctcaccgaaatataattaataacatgctccttctggtcccccttgtaaatagtatcctgcgacgtttccgaatcctgtaaaacaagacctattttgttgttttgttgtaaaacttacccaaacgacaattctatagacatcttttttctccttctcctcaatcggcattatataacatcccccgcttggggtcgtggctcacactacaaagttggcaataggtctctccgcattcatgttccttcttcggattaatt

SEQ ID NO: 41790 - DNA, 914 bp, Heterodera glycines
aaaaattttattggacgcataaaaattgatgggactcataaactggacttgagccggatttggcatgtcaaatgtggcacttttctccgttttaggcgaactcgcactgcccggtggaatgttgaacaaaggcgaaccgccgactgaagccgccgtccgggagtttagtgaagaagcaatgggagggcatcgacgggaggacaaattggaacatttttggaaaaaggggaaaactgtgtaccagggatacgtggatggtgaggaaatacgaaaaaagcgaacacaataataatttaattctaattgtaagaccaccgaaacacggacaacgcgtggggagaaacgacggcggtgaacttccacgacacggacggactcttggaagacatcgaattggaggtagagcaaacccattttagggataaagacacagactaaaacattttagggtggcgacgacgcagaaacggcacgttgggtcgacgtcaaccaagaactgaagctgtacgcctcacatgattatttggtgcacttatttcataaaatgcatgcaaatctcgcataaacgtctttttatactttgaccaaaataacaaattcttaaaatttattctatcatttgtataaaagttatggacggagaatatatttcatcgagatttcgcacaaaaattaagtaaaaaacaaacatttggtaaagagcaataaataagtcaagtgaaggcacaaaagcaccaaattgaacatgacgtcgttcgaatcaatcaacgaccgctgtgcggaattttgggtttttgcctgtcaaaatgagtaatgttctgaaaaataacaatggcagctgaccagtactgctcggcgatgacgaaaccgtcaatttatgagcaaattttagttgaatctccgaacgactggaa

SEQ ID NO: 41791 - DNA, 1255 bp, Heterodera glycines
  unsure (1)..(1255): unsure at all n locations
cagtaaaataaatgaaaatagttcactgtagaaatcggtcactgtagaaatgttacagcaccttaagatgtacaaatgaactttatttttggaaaattttttaaaataaattcttattgttagcctttttatgcaataaataattaatttccaagtttacgtcgacactcaaaagatgctcacggcaaaagaattaatttttagctccttgaatatgtcgtgaaacatttattttccaaaagttaaatataaatttagccaatgcttcatgagtccttgcaaataaaacacttaattaattacctgttcctctgagacttaatttctttttagtttggttttaaaagcgcttataaaaggttagattattgaaaaattggctgaaaatttttggaaaatttttgattacagctctgaatttgccatttctgtcactatttttgctatttgcccaaattttaggcctttattctggtaattttcgcctcaaaaaatctaacaaatatttaattctgatataattacaatttacttttactagtttttctattgtattttttttaaatataaaattttaaaaagttaaaaaaattgaaaattacggattatggattacgggaaattacggtgtccttggacccccgtaattagggttacggatttctgtaattgcaaatccagttacttgcagccctgatttaaacccttaattacctataattaaagtgtccttttttgccagaacaacccgttgtgcaaccttcaagcagcgatgccgccaatttcactcttcgagtggacctttgatgcggacgggaaacaaacatatgatgtcagttatgtggacggtgccaatgtgccgatcagtgtacgtgtgctgaattgtcctggtgtcaatttcaacaaaaaattgggcaacagtttggacactttggtcgaccagttgcccgatgcaatgaaaatggatgtatttggtgtacgttttattggcacaattagggggtaaattagcaacaaaaaaaaaattaatgaaaagggtatagggctgatgctagtgagagtgcttatttgtaagatttgttattttaatttatttttaaatgtgtcctacccatgatttatagattttttatagtgtgcgcagaaaattncttaaattttcagccgactcgaaaattttaacactaatattttccatttgattcaatttttcaaaacttgggtgctcatttttggtcatattttttctcatact

SEQ ID NO: 41792 - DNA, 920 bp, Heterodera glycines
ttcaaatcgtctattttttgaagaatttcaataaatctttgtagttaattaaatggccaatcccactattatatgttgatgaacgactaatttggaacaaatttaattcattgtttaaaatcttgtgcagtccttcggcaatttgcgacaattctaaacgaaaaataacagaatttttaatattaattaatcaggcaaaattcgagagcctcgctttttgttttggcattagtccaaatgatgccaaatttcgtttcttacctctgcaataatcatagtcaattttgatggcatatgcaaaatatcgtacttgttcattaaatactctcttaagcaatgcttcactaaataatatcaaaattttattataagaaaaatgcactcaaaaaagaggtcgtcgcatttataaattttacaaaaacccatcacttgggtaccgcggatttttgtggcaaaaaccccaaataagaacttaataatggaaaatgtcgaaaagtattaaaaaatgtcgaaaaaaccgagttttttattctccatatttaaaaaaatatatcttagaagcctcattttaaatgggccactgacattgtgttgcaattttcaaagaagaaatttctggtcttctcatattccatatgccatgtatctccaggatagaagaagtcgacttgtcgaaacaaatgacgaccgaaatggacgaaaatgcaactgatttggccacactgtggcaaaccatcgccaatttttggcaacaaaaattccttcaaaaacgtataaacttctgccggttgttgcgattgatcattttgggaaattatcgtttcattttgaatttttttgagaatttggtgcacttcgaatggcgtcaaagaatattttgacaattgcagcacaaatttaaaattttctaaacatttaat

SEQ ID NO: 41793 - DNA, 852 bp, Heterodera glycines
cgaaggatgtctgtgttggccaatcggtccgcggttttttgggctcagccaacactcacaacggttaacaattccacccattccgtttcgcaatacgccaaatttatacaaatcttttagattaattctgtcgatcggtctgtcggaagtgaatttgcggatgattttgaccagtcaaatccgtccttcgtccatttgtcgatcactgtcgtgctgacccatcccgtcgctttgactttttttgtggactttttgaacgaagttggcggtcaaaattacatcgatttctacttggccattgaggtgtggttgttttttaagcagtgcgtctcatttggttgtatcaacagggtttcaacgtgtccatggagcatcagttgagggggttggcctcgggcgacactttggacagcgacgcgcgggagacaattcgagaagcggctctcttcatgtaccatcagtatctgtcacaggaagtgaacctctaaacaaatttggtcttcaaaagacgaagatgactcaggcaatcactcgagttccgttgagcgaagcaattgtcaacaagtttttggcccgactgcgcaacgacgaaccatcggatggatggtttgagcaaattcaggaacaggcaaataaaccaagcccaaagcgcaatccgatgcccattttgataatgaacaccccctgaagattgtcgaaattctgaagagtgaagagcgctttttccccgccttcaaaagacacgcgctgtacggtcggatgctcgaccaactcggaattaccactggagggagcgaagtcgctgccgagtcggccgaatcaggtgctgcccaatgagtcagaccaattaaa

SEQ ID NO: 41794 - DNA, 1011 bp, Heterodera glycines
  unsure (1)..(1011): unsure at all n locations
aattattattaatntggttaatctaaagaaagctcataaataaacaaatttgttagtttttaaatcaaacaacgaactgatgaaaagggcaataaaagttaattaaaaccaattacaatattaaaaaaaccaaataaacaattttaaaattaattaaattaaaaaaacataaaaggtacaatttgctgtataaataaaaaaacatttacgaatcactgtaaaaaatttccaataatcactatctttaataagattcccgtaactagagtatgtaaaaaataataatttcattggtattaaaatttaaaaaatcatagtttttaaaactgatttatatatttaaaaaaaatataaagtggaatttaaattaaaaaataaaattttgcttttttaaaaaattttatttaaataataaataatgttacaaatttaaaaaaacatcttaaaaaatagaataaaaatttttctgtttttttatttatgaatattacttccaaaattttttagcaaaaaatgacagttttggtaatagataaataatattttttaataatttgttttttaatataaaatataggaaaactaagttatattaataataagtcaggagaaaggtctaatatacaaattgtggcaaagaattcaatatcatcgtaaactaaattacattattagaaattaaataaataaaacataaacgaaaaccgagctgatgacatattaataaatatattttataatgtaatatttattaaggtacatatttctaaagaatataaattaaaataataaatctattatgtatgaaaattcaaattaaatagaaaaagaataaataataaattcagtcaaaatatggtcatgttaataacttaaaagatatttaaaaattttgattattctataatctatataaaatagagtgttaactagataaagtaataattaaaatctatatatttattaattcttcaaatgccagagctttcaataataataaattttaaaaga

SEQ ID NO: 41795 - DNA, 949 bp, Heterodera glycines
atttttaggctaatccgaagcaaagcacgaatgaatattaaagaggcgaaagaattcacagtatcgtttctaatagggaaatattgacaggatattcggctaaaaacgggtttgatcatttttagcgcatttttaggtatacatttgagacaattgggcaggacaagaaaagaatgaagttgatgcctcatgaaactcggaattggttatgtttagtcgaaaatatgcttacataatactcataaaaaatacaaataattcaacccacctattctatgaccacattctgaaaaaaatcccagaaatacgaggaaagatatgcttggtcacaataaaataaaaaatggctagtatgtaaaaatttgcggtcactaataaaataaaaaatggctaatatgtaaaattggcgtccagaaatttttagactaatccgaagcaaagcacgaatgaattaaagaggcgaaagaattcacagtatcgtttctaatagggaaatattgacagtatattcggctaaaaacgggtttgatcatttttagcgcatttttaggtatacatttgagacaattgggcaggacaagaaaagaatgaagttgatgcctcatgaaactcggaattggttatgttttgtcgaaaatatccttacataatactcataaaaaatacaaataattcaacccacctattctatgaccacattctgaaaaaaatcccagaaatacgaggaaagatatgcttggtcacaataaaataaaaaatggctagtatgtaaaaatttgcggtcactaataaaataaaaaatggctaatatgtaaaattggcgtccagaaatttttagactaatccgaagcaaagcacgaatgaatattaaagaggcgaaagaattcacagtatcgtttctaatagggaaatattgacaggatattcggctaaaaacgggttgatcatt

SEQ ID NO: 41796 - DNA, 352 bp, Heterodera glycines
  unsure (1)..(352): unsure at all n locations
ataataaataaaaattattnggttgcaactctttaaccttttaaaatataatgtttcactaaaattattaaatttctgttttttataaatttacttaaccatttcattttgatacagaatatattttattttttacaaaaaatcaattaacaaaaattattaaattaattcatttcttaaacttattatcattttctattaattatttaatttacaatttattcattgtagtcttcaaattgtgcttgggattaggtcaagccattcaacgatcttttttctatcaaaatagttttttacggcgcgcttttttgaaaaaaaatttgggaaacgagggggggggggggtgggt

SEQ ID NO: 41797 - DNA, 281 bp, Heterodera glycines
aaaaaaaattttttgagaaatttttcagcaattttttagaaattttttgaaaaaacttagtagttcattataaaatttctaaaaaattgcagaaaaatttctcaaaagattttttttcttgaaattttcgtactaggaatttttttatgaaaaatttctaggtttgaaaattttttttaaaaaaatttttcgggggggaaacgacgtgggggggaaacgacgggggggaaacgacacgggggggaaacgacgggggggggaaccggcgggggggaaacgac

SEQ ID NO: 41798 - DNA, 525 bp, Heterodera glycines
tttcatttttaggatgatggctccattcatttggtctcccgtcgcgtttttgtcggctccaaatggcactcccttccgatcagttcctctccttctttgacagcttccgtggacgcttttcgcgtttgtctgtgccaaaagcgaccaaaactgtttctggtgcccggcaaccgcccgtgcggtgcgcattcggcaatttgccaatgatcggacgattgaccgattgaatgccgatcaatcgaaggacgcggcggtcattgtgtcaataaatttgctcaataaaatatgctttcattcaaaatgttgtgtttgtttagccatttgtgttctttaacccatccgaatgactcattagcggttaattggctgacctttccttttatttattcaaattgaatgattctctcatccaattccccattttttgctgattagcattagcttttccatttagcaatccaatttttctgtcaaatctttcgtctgctgatggaattgctctttaggggacctcgtccatccccc

SEQ ID NO: 41799 - DNA, 961 bp, Heterodera glycines
aaaaaataagaaaaattcctattttacaatttttttagcgttttcttattttttcttaaatttccgcgggcgcctgtcagcaccaggggatgttaaacgacgcccaaaaaaaatttcggaaatcggaaaccggaattacggggctccaaaaattccggaaattggaaatcggaactcccaaaaaattccggaaatcggaaaaggaattccgacacccaaaaaggccggaaatcggaaatttaaaaaaaaaattttggcacaaaattacgaaaaattttataacaaattaacaattgatagatacaatggctataatgagattagaatttttgaaaaattcgggacagattcaagaattagacccggacaggtgcagaatttaaaatccggtttttccggactatctgatccggtttccaaaatgtcgacatggataaggatttctcgaaaaaaagaaagacgataaaagcaaataaaatttcaataattcttccaaagcttaaaattaaaacagcgaaaagagcacagtaaaataaataaataatattatttttattcaccacgataacttaaactctttcttattcatgtattttcggcgtatcttttgatatttttaaggactcaaagggacgagaccagtggtgccgataggcgccaccgggtagatttgaaattttttccgaaaattttcgaaatttagcctaaaattccgaaaatcggaattcccggctcccaaaaaattccggaaaccggaattccgtacccaaaaagaccgtaaatcgggattccgtgacatttctcgttagcaccgccggtcactcatttcttttgaaaattaaaaataggacccataattgactattttcggagaaaatctgttaataaatgggccataaaaatactgccataaggaaaaaatagctaaaaaatgcaattttaacctttggagtgtgtttta

SEQ ID NO: 41800 - DNA, 1462 bp, Heterodera glycines
  unsure (1)..(1462): unsure at all n locations
aaagggcaaaattttatcattttgtaaaaaattaaaataaattatttgtgggtgaaaattgacttaaaagctttttaatnttagttgggaataaaatatttgattaattggttctaataagcgtagaaatatcttgacacactttttttgttgatatttgtatctcaacaaattattctgctgaagtggcaaaaaatgcgagaaaaaaaaagatatttttgccttcattgaattaattaaccttttttaaaacaatattctcaatgtcaaagtaaaaaatgctgcttcgattttttttgatttaaaaatgaaaaatttttgagcctcgagactttgacgaaaaatcttcgaaaacatgactacgaaaaaatgaaaaactcctgatacaactcttctcgaatctaaaaaatctaaacttttttgatttgacgaattattgaatagggatgatattttcaagtgaaaaatgaatccgatgaatagaagttttgaaaaatgcacaacgctgacgtctgttgcttttccgttagctgttttgtgggaaatgaatgatccaattaacttttcttgaattaattcttttgaggctttgtggtttttgaagaatgtatgaattacataaaaattttaaaaaataagtcgattaacaaaaataatatacgtaaataaatttcttcatagaaattaattttgattttcaaatttctttagtttttagaattgctttgctatcctcttttattgaatgaatgctggtggataacaatggaaaattcgcttaaaattataaattaaaaattgattggttaatcaattataaaaaataatacaaaaaattaattgtgtaagaaataaataaattaatattaaattgccgaagcattttctcattttattttcacattcattttaatgccttttcatttcatttaattgcttctccgttagccaataagcgatcgatctgactcctccccttcccatttatgtgtatttaatatgcgattttcccactgctcatcacttaatacggattttgtatttttatgtaatttaatgcttttatttaattgtatttaatctgtaatactatttaaatatttaattcctttatgcatttattttatgtaatcgttttaattttatttatatttattttccatgcttttcctgaaataaagccattcctaacatggagttggatttgggagggaaatgggactgatcaccccaggaccccctcataacaatgattggaattctgaggcttgggagtccaaagcctaattcagcgcgttccactggcacatgtgttactttatttatgctttttattgtgagcaatttatgtaaaaatgggaggcaataggaacgggtcggggtcattttggcgcagacaagtttaaagattcataactttttttaattcgaccanaataaaataatgttgatattaatcaat

SEQ ID NO: 41801 - DNA, 1150 bp, Heterodera glycines
  unsure (1)..(1150): unsure at all n locations
gcaacggcaatcggactgggcaacaaagttttgtcttaaatattttaatttcagacgtttttgggattggtataaacctgatgaaaggtccttgcgttaaatgtagtacctgacggaatcaagaccccgagaggatttgaatcttggggtcgaaatcccggtaaaattttttaaaaatcggcgccatgagaaaaaaaaactagccattttcgccaaattatggccatttgagacaaaattttaaaacaaggaaattagaatctggcggtgccgttaggcgccgccgggaaaatttagaaaatttagggtatttcattaagaaaaatagtaaattaaaaaaaaaatcatttcaggataggaggcggcattccacccctggaatacggcctatttgccgacctatgtgcctaaggctcgttactcggttttgccatttttagaaaattgcttaattttaatctcgactaaaataacacccttatcttggatcccgacaaaatcgagattgaatctcggtaaccctacccctggacgatgccaatcccgaattccgatccagactcaaaattccaggttatagttaaatgattcatattttttgcagtatgctattccgtatgcccagctattgctggaaccagtatttgtctgtttttctgatactgattcgcgtgttcggtacttcgcttgtgaggtctgttttttggaaaaagaattgctatgctcacattagagtttctcttaaggcactttacaacattgtaaaaattattaaaatggctgccttggatcactttgaccaactgttcgatattctatggaaattgtcatcggaccctgatcaaaatgttcgaaatggctccgagcttttggatcgacttgtaaaagtaaacagaaaacattaacataaagtaaataaaataagtttcaggaaattgtcgtttccaagaatgacttcgaacttgaaactttgattttgctaattcgagaacgaatttactctgttaactcatcgaatagacgctttatcatctcatgggtaatcacaaacacttcttcagtcaggccgtatccagaanaaaatttcggggaagcacccgacgagtttcttctaaactgcaatttttgcctgggtgcaaattttcaaaaa

SEQ ID NO: 41802 - DNA, 609 bp, Heterodera glycines
tttttcggcgcgaccaattcggcgccctatgtaaaatagctttttcggcaccagtgtttaaaaatcccaaaaaattttcaaaaaagttttcatttgctgcctttgattgtgcatataacttatgccattttctttcaaagtaccgtgctaatgcaatggtgagcaatggtgcataattgtggttcctaattaacttttattttttggttcaaaatcacaaatcggggggtttcgagggtgctgattacaatctgaccataggtttgcctaaatcagaaacccatattcaaatttcgaatatttatattggattggacttaaaagttccaaactgaccagcaggtattcgaaggtaaataacactgcaaaacaattttttttactttttctcaaaattagtgtgtatgtagttgtcagcaggaaatttttgcttttgatagggtttgctccagattttgaaattttttcaaaaatttttcggcgccgaaaaaggcgccgaagtggccgcgccgaactggccgcgccgaaaaagcccgcgccgaaaaagctcgcgccgaaaaaccccacgccgaaaaacccgcgccgaaacggttgcgccgaactggccgc

SEQ ID NO: 41803 - DNA, 933 bp, Heterodera glycines
gtacaacggtgtagaaaaaaagagatagccattttctgagaatatctattcttctgagacagcaattttcaaaccgaccttttgtagggctcaaccgcagatagtaatgcgtttttggggaaaccccacatgtacaacggtgtagaaaaaaagagatagccattttctgagaatatctattcttctgagacagcaattttcaaaccgaccttttgtagggctcaaccgcagatagtaatgcgtttttggggaaaccccacatgtacaacggtgtagaaaaaaagagatagccattttctgagaatatctattcttctgagacagcaattttcaaaccgaccttttgtagggctcaaccgcagatagtaatgcgtttttggggaaaccccacatgtacaacggtgtagaaaaaaagagatagccattttctgagaatatctattcttctgagaaagcaattttcaacccgacattttgtagggctcaaccgcagatagtaatgcgtttttggggaaaccccacatgtacaacggtgtagaaaaaaagagatagccattttctgagaatatctattcttctgagacagcaattttcaaaccgaccttttgtagggctcaaccgcagatagtaatgcgtttttggggaaaccccacatgtacaacggtgtagaaaaaaagagatagccattttctgagaatatctattcttctgagacagcaattttcaaaccgaccttttgtagggctcaaccgcagatagtaatgcgtttttggggaaaccccacatgtacaacggtgtagaaaaaaagagatagccattttctgagaatatctattcttctgagaaagcaattttcaaaccgaccttttgtagggctcaccgcagatagaatgcgtttttggggaaacccacatgtacaacggtgtagaaaaa

SEQ ID NO: 41804 - DNA, 653 bp, Heterodera glycines
gggcagtccccccgaaccgatgcgcccagatttatggggagaccgaatccttcgggaatagcttccctatagcctgtactttaattctgcgttggatttttgctccccataattgtttgagtaccccaaacggacacttgaaaaaatcgatttttttgttttcggggcagtccccccgaaccgatgcgcccagatttatggggagaccgaatccttcgggaatagcttccctatagcctgtactttaattctgcgttggatttttgctccccataattgtttgagtaccccaaacggacacttgaaaaaatcgatttttttgttttcggggcagtccccccgagccgatgcgcccagatttatggggagaccgaatccttccggaatagcttccctatagcctgtactttaattctgcgttggatttttgctccccataattgtttgagtaccccaaacggacacttgaaaaaatcgatttttttgttttcggggcagtccccccgaaccgatgcgcccagatttatggggagaccgaatccttccggaatagcttccctatagcctgtactttaattctgcgttggatttttgctccccataattgtttgagtaccccaaacggacacttgaaaaaatcgatttttttgttt

SEQ ID NO: 41805 - DNA, 1129 bp, Heterodera glycines
tttttgtggcatagagaataatttaaaaaattccttgtataatagaatggccattattctcggcgctcctctccccatgcggggaacatttgtgtggtaaaaattttctcgaaaaaaagagatccccatttttgtggcaaagataatattttaaaaaatcccttgtagaatagaatccccattgttctccgccctcttctccccatgggggcaacatttgtggggaaaaatttttctcaaaaaaaagaaagccattttttgggcatagagaataaatttaaaaattcccggtagaatagaatggccattgttttccggccccttttccccatgctgggaacatttgtatggtacagaatttctcgcaaaaaagagatagccatttttctggcatagagaataaatttaaaaattccctgtagaatagaatagccattgctctccgcgcccctctgcccatgctgggaacatttgtatggtacaaaatttctcgcaaaaaagagatagccatttttctggcatagagaataaatttaaaaattccctgtagaatagaatggccattgctctccgcgcccctctgcccatgctgggaacatttgtatggtacaaaatttctcgcaaaaaagagatagccatttttctggcatagagaataaatttaaaaattccctgtagaatagaatggccattgctctccgcgcccctctgcccatgctgggaacatttgtatggtacaaaatttctcgcaaaaaagagatagccatttttctggcatagagaataaatttaaaaattccctgtagaatagaatagccattgctctccgcgcccctctgcccatgctgggaaaaatttctcgcaaaaaagagatagccatttttctggcatagagaataaatttaaaaattccctgtagaatagaatggccattgctctccgcgcccctctgcccatgctgtgaacatttgtatggtacaaaatttctcgcaaaaaagagatagccatttttctggtatagagaataaatataaaaatccctgtagaaagaataggcattgctctccgcgcccctctgcccatgctgggaaaattttgtatggtacaaaaatgtctcgcaaaaaagaga

SEQ ID NO: 41806 - DNA, 975 bp, Heterodera glycines
gagaattaattcacaatttccgcagctcttacggtaatggaaaaaattttgaagagtctctccggaacggattagcatcggggttgcgagatagaaaattgtcctaaaaagagatagccatttttctgagaattaattcacaatttccgcagctcttagggtaatggaaaaaattttgaagaggctctccggaacggattagcatcggggttacgagatagaaaattgtcctaaaaagagatagccatttttctgagaattaattcacaatttccgcagctcttacggtaatggaaaaaattttgaagaggctctccggaacggattagcatcggggttacgagatagaaaattgtcctaaaaagagatagccatttttctgagaattaattcacaatttccgcagctcttagggtaatggaaaaaattttgaagaggctctccggaacggattagcatcggggttacgagatagaaaattgtcctaaaaagagatagccatttttctgagaattaattcacaatttccgcagctcttagggtaatggaaaaaattttgaagaggctctccggaacggattagcatcggggttacaagatagaaaattgtcctaaaaagagatagccatttttctgagaattaattcacaatttccgcagctcttacggtaatggaaaaaattttgaagaggctctccggaacggattagcatcggggttacgagatagaaaattgtcctaaaaagagagccatttttctgagaattaattcacaatttccgcagctcttacggtaatggaaaaaattttgaagaggctctccggaacggattagcatcggggttacgagatagaaaattgtcctaaaaagagatagccatttttctgagaattaattcacaatttccgcagctcttacggtaatggaaaaaattttgaagaggctctccggaacggattagcatcggggttacg

SEQ ID NO: 41807 - DNA, 954 bp, Heterodera glycines
  unsure (1)..(954): unsure at all n locations
cggtttcggtttttttcggtttttaaccgaaaccgaccgaccgaccctcttgtccggtctctaataaataccaatgtaattttttatttttataaaattgtaaaaataaacatcagatcaatgaacaggtcaaacaaaaattaagaataaactcaaaaaataagatcaacaagaaacaacgagacaatgggcaaatccgctggtctttcctttgtccgtccttctctctctttcattccttttctcctccaactttgctcttcttcttcttcatctttttcgacttcttttcctcgccgttttcctccactatttttcgcttcttctttttcttcaactgttgttcgccttcattttgtaccaatttgttaatttgctcagcaaaatccattttcacccgtcgaacttttttcttcgttttcacccgttccgccgtttctccgccgtcggtcccttcaccattcattgcgccgatggaggccaaaatgctaaaaaaagcattaaggaacggctgtattgtattgcggttgccttgtaagaaaaggcaaaaatgatttggaaactttcacttttaagtttttaaacatttcttattctattgcgtttgaaggcttttccgaatggttaccccacatttgcgcctcgggctttttcaccccagacatttgcacattaggaattgaaaaactcagatttgaacccgattttagacaagtgcaaatgtctggacacgttccgaatgactttccttgcacaaacgttcctccaaattcactcaccgttgcttcttcttcttctgncgtctctgccgctttcggtccgtctccgttcggtcatctgtcccttttcgcgcacttttcacgcgtcgcttcacttcctcccgtgnncacaattcacctctggtcaaccgctgcttgggtccacttcctttataagattttaatgacttgcact

SEQ ID NO: 41808 - DNA, 256 bp, Heterodera glycines
ctccatctccctttttgatagaaaaagcatcagagtgcctaaactaacatgtaaataaaatttggtgcgctttagagcactttctgaaaaatatttatgaaataaaaaaatcgatttattcaagtgtccgtttggggtactcaacaattatggggagcaaaaatccaacgcagaattaaagtacagactatagggaagctaatcccgaaggattcggtctccccataaatctgggcgcatcggttcggggggactg

SEQ ID NO: 41809 - DNA, 1290 bp, Heterodera glycines
gtcgtcaattaacttgtttatttatttcagacatttctgccaatttgaatttaaaaaatgtttgtcttcctaaaattacctagaaattttcgaaattgtttttaagaaaaatactttaatgctatgctattttttcacttaaatcttatatttatcaccaattggtcaaggttgaatacacgggtgccgtcgacgacattttctatgctggcacggggctgttgctgttgaagaacgcggactctgtgcaaatgtacgacttgcagcagaagcgtgtgctggccagtgtcaaggcaacaaaggtgttgaacacaaaactgggtgttcaaaattactgaaaatttgaaaaaaagtgtttgaaattgaagttttatccaacgataaacctaaatcgtcactctgtttccgcaatgtttttgctttcaggtaaagtacgtcatctggtccaagaacatggaatgcgccgctttgctcagcaaacacaccgttaccctcgtcaccaagagattggaggtggcgttgtactctttggtctcgtcttacaatcttttttctccaggtgctcggcactgtgcaggagtcgactcgggtgaaaagcggcgcttgggacgcgggcaatgaggcctttctgtacaccacctccaaccacatcaagtacgcgttgaccaccggaggtgaccatggcatcatccgcaccatggatattccgctgtacattttggcggtgcgcggcagccgactgtactgcttgagcaggttggagttgtaaattccttttttaagacatttcggaatgatctttttgcatttattagaaatttttaacttaactttttacctggctcaattttttcatcctttttatgtgatttgttacacagagaggcgtcgcccgtggaattgtccatcgatctgaccgaattccgcttcaagctggcgttgacccatcgtcgttatgatgaggtgttgaacatggtccgcaatgccaatctgctcggccagtccatcatcgcatttctgcaaaagaagggctacccggaggtggcactgcactttgtgaaggacgagaagacgcggttcggactggcgctggagtgtggcaatttgcaagtcggtttacgagtagaaaactcaactttagatgggttttgacataaactgatttcaaccaattatttttaatgacaagtttcaaactccaaggacttgaaattcttcattgaaaagcactctcattttttattttttggtatgtgatggaatgaaatgcattaattttgacaaaatctc

SEQ ID NO: 41810 - DNA, 1087 bp, Heterodera glycines
  unsure (1)..(1087): unsure at all n locations
gaatcaactcatttacgtgcctcattccgggtttttaatctggagattttttaagctttttttatttttagacttttctgaaatcaacacttacctatgtcgataaatggttccgcgttgagcgctttccaacggatttggcatgggtttctctcaaagaaaaaaaagtttctcgcgccgaagtgatgagtttggctgaacagattgctccggaagtgaacgacaatgagctttttgacgaaattacggcgctgaatgaaatacttgaaaggatttctgacgagaaatttggtgaaatgaacgcagaacagaagtggatgaaggttttcgaggcggaattacccaatcttgtgttgctcgtcagcaaaattctttcaattcccgtgtccaatgcatgcgtggagcgcgtcttctctctttgttcagctcagtggactgatgtgcgcaatttattgaaagttgaaaccatgaaaagtctggcccaaatcaaattgaattacgatctcacttgccccgaaatgtatgatttgctcatttcctcaccaaaattgttaaaactgatcatgggaggtgaaaaatataatatttaatacatttttgatcgaataaattgtaaaaataacgatttgaagcaattttgcaaaatgttctgattttcgaccccaaaatctgattttttggacccgatgttctgattttgaaaatttttcgatccgaaccctgttttaatgtagtctctgactcattgtctgctgtttcttcatgtctatgttttttaattttcgcttcaaactcttttttttttgttagttaggcaatttttgtcaaattgttgatatatgcccaattcaaattgctcttaattttaggccattgtcgcccccagcggacgaaagaaaaagaagcgtgtcaaagcaacattgaaatgttctcgacgactcccgggccaagtggattagcggaatgagtgattattttgaaaatgtcgtctaattgcgtggaaattaattaattatatttgagaaaatgatcggtctcactgtgagagaatttgatttgattctctcantttattctctccgaaatg

SEQ ID NO: 41811 - DNA, 950 bp, Heterodera glycines
agagaaagcacagtgatgcagcacatttattgatcaatcggatgggagaaaggacagaattaagaccaaagaagagattcggacgaagggcaaaagtgaaaagcatcgaagggaaaaaaagggtgaggaaaagcataaaaaggggagagggaaaagcatgtaattaattaattacctgcacacaaaatggagtccgcccttggcccggtgatcgcttgctctctaatggccaatccgtcaggcgacaaatcgtacagccgattcattgcgccgacgtaaagccgacccgtggaacggtccatcaccttggcaggggaaaagcagggggtttagtttcggcatttggacaattgttggctttcataaaatgatttgtgaaatgcttttctcccattgctgaggctgaccattcgctgcagctgaaccgtctcccgtccttcttcttgcgtgtcgcgaaagacggccaaaatggccgggtgctgctgctgattgggcggaggatgttctcgatggaataataatgccgaagttgaggaaaatgatggcacaatgaacaaaataagagaagtgatgaaaaagaggagaagcggtgacgaaattggcgaatgttggggtggatgccattgttttgcggttgcttcggcttttgcttctgttggcatttctctccccgtcctccgccatttccatttttgccgttccctcgtcgaaatttcgcccattttccgccgtttgtccgctttttctcttctcgcggatggcctccgccgttggctcaaccgatgtgacgaagaagcgaagaaattggtgaaagtaaaggaaaagtcgaaaatgttcgaatcggaaggcgaagacaattcggaaacggaagaatcatccaaaaagcgactgcagcaggggcagtcggacggaggggggagaagcatttcaggggaggggaaaggcagcag

SEQ ID NO: 41812 - DNA, 262 bp, Heterodera glycines
tataataacgctgcggacatctacatttttgaattgacattaattggtaattactctttctttttctccatattgaccatcatactcatactcctccttcatttttttttcctttccttctccaaccctctcctccctctcttgatagtttaaactgaaggcgggaaacgacaatctgatccccatcaagctagcttctgcaggtcctgctcgagcggccgcccggggatcgatccccgatctagtaacatagatgacaccg

SEQ ID NO: 41813 - DNA, 1359 bp, Heterodera glycines
tcttcattgccgcgtcagtatttttggcaattgagtctgtcgggtctggcaggccaaaatgcacacagcttaagttaaagctgctgtgcagccgccaatcaaggtcggctagggcttcaagctctgctgctttatgctgtgccggagtaataatgccttgcggattgtacatttggtctttgtacttgttccacaattctatggcattactcggctggccatagaccatgatgctcacaaaaagccatctcatctgatctggccagcgcgacagagctgcctccgccagagttttgtcccaaattttgccgtcttcaagaagaccatgcattattgcagcctcagtgaatgaggtacaaagcaacccattaaccatcttaagatgatctggatctccaggaaagtgacgcataagtgaatagagcgcgaacctttccgggtccgatgggggtacaggaacaattcggccgataggtggcctttttatttgctgccttttgtacaggacccatttgtcctttgcccatcggaactgctctgggactttttcaaaaagaatgtccttaaactttgggtcattcttccactcattttgccattgtttccaatatgctgaacaatgcgtttctggcagttcgccttgctggatttgttgagctttgctcaccagctggaatgccctatatacaatgggctgttggtttggcaaatgaattgccaatttgacaacatgatgtgaaagacgggcaaatggcattgaatgaacaatggcatatgcttccgttgcaccacggaagttcatcttggcatattgagccggctcatcaattccgattttattgccggactcttctttgcactcgacataacaatgtcctggccctttaaacgggtacttgagtgcgtacttaatattcgctttgttaccatatgcaaacagtacattatggtgtactcggtaacgcagcagaacataaggattatacggcacgacatgtgagttgtcgtatattaggccgtttacctctaattgggcaccaccatcagatggtgaaggccggaaatacatcgcgggcctatccgggcgtaaaacagtacattttgagtaaggggctgggaaccccttcttgcaccgcccgtaaattgggtcgctaggaccacaccaactgtcactgcatctgtgcagttgcatatgcattgtttcgcggatttcgcgatgcattttcgcaatgggcgtgtcgtcatctttatcgggcaaagatggaatgtgcgcccatatgtattcctgaatgacatgtggtactgcgtccaggtcagtatgggcaacaatgtgagcgtgtgggcctcctcgaccttgga

SEQ ID NO: 41814 - DNA, 769 bp, Heterodera glycines
agaaatggagcgatggtcggcggaggaatgctttttctttttttttacgggcggtgccattaaaacaaataataatttagcctaaaataaggaattttttgaaaaaaattagcacagaaaactaagcgtgcagttgtgtttcatccaaatgtatgaactcatcaaagtcaatgttcttggaaggggtcgagtagcggacccgccgattgggccccgccgattgggccccagtacgattgggccccgccgattgggccccatggggcagccacttttttttcgtttcacatgttttaaaaaaattaaattattcataaatttattaagtatgaaattctatccattcttacaaaggcaataactcgtacaatagcagttcgtacaatacatttttttacaaaattaagcttatagcttgggacaaatctaacaagggaaccgtcagaactgtgtcagaaaatgcatgtatcataactatttgatagtgcagggcggctactctgaatttttaatgttagcggtgtgttgaagccaaatagaaaagttattggacctcaaaaatcaaaattttgactgtgttttccccttcagggaaggtggtgaagtggggaaaattaaaaaaaaacggtggatcagtgggttaaattcctattttttcggaggtccaggttcgaaaccaacatggaaaaaatacattttaattaatgggcagcaaggctaacgattaaaaaaaccatttatttaaaaaaatacataggtaataattttt

SEQ ID NO: 41815 - DNA, 1524 bp, Heterodera glycines
  unsure (1)..(1524): unsure at all n locations
tcggctgacccacattcaactgctgttcacgtggttattattctccacttcagtcttcaaggatctcacttgaatattttttactaccaccaagatctgcactggtggaagctccggccgggcccacgcccaaagccttcaacgcaaccaccacgaccctcctacacgtcatggccagactacgcgacaagcacgtgtacaagccaatgacggtggagtataggtggcccgctccagcgccatccattttcagggctagttgattcggcaggtgagttgttacacactccttagcggattccgacttccatggccaccgtcctgctgtctatatcaaccaacaccttttatgaggtctaatgagcgggcactttggcaccttaactccacgtttggttcatcccacatcgccagttctgcttaccaaaaatggcccacttggagctcaaacattcaacgcctgggttcagagtcaagcaaccctggcttcatacccatttagagtttgagaataggttaaggacatttcgtccccaagtcctctaatcattcgctttaccgagtataactgcttaacgagctccagctatcctcgggggaaacttcggagggaaccagctactagatggttcgattagtctttcgcccctatacccaagtcagacgatcgatttgcacgtcagaatcgcttcggacttccaccagagtttcctctggcttcatcctgctcaggaatagttcaccatctttcgggtctcagcgcatacgctctgtctccgccccatcgcatgcgatcgagacgggactatgttgcgccccaacaccgcagtgccagggatcacacatcagctccgtaagaagccttcactttcattgcgcctttgggttttgaacacccaatgacttgcgcatacgctaaactccttggtccgtgtttcaagacgggtcgaacagatgaccggcttttacaccgagaacgcacaactgagagcccgagctggaccgaactggttgctggtacgtgtcgcacgcgaccgccaccgacccccagctcgagtcaacacggacccgaaaccattgcacaattcacccagagtaaacagcactcccccgatccgggtaccagaccccgaaaggctggcctcaagaccgagctcacgcagctactccgagcatctcagcgcactccgcctgcaaatgccccattcgccactgaacagaaggacagcaaaccccagtctggaggctagcaggccaacgtacagcaacaaacgggtgaatgcagaccagatacgccagctctgtccgtttccacctcatcggtttcacgtcctctttaactctctcttcaaagtgctttgcaactttccctcacggtacttgttcgctatcggactcgtggccgtatttagtcttagatgaagtttaccacctgatttgngctgcgatcccaaacacccgactccagacacgtaaagatgggtaggcaccgccagttggacaggtcttgcaccttctctggag

SEQ ID NO: 41816 - DNA, 588 bp, Heterodera glycines
tccattagcacatccaatccatccacccatcctccactctttagcataattttcttcacttcattaaccccccccccccctcccgaaattatgtccattataattatcattgttttacaatattattagtgttgttctgtatgctgctgatcagctaattatccaattatcccctcattatcctcccaccttttttccatctctccctcttcttctttttttatttatactcccaatgtgtgcgaatgtttgaaagtgtcgtcgtcgtcgtccaatattcttttcttttatttccatttccatcctcttaaattccccccccccccattcccatcatctcatcattcattgttccccctttccccgttcatcctccatttcctctgtgccgttgtctgagtgagtgccaatgccaatgccatggaaatgcgttcccatcacagcgcagtccaattttttttaccccacattgagttgtccatgatcttcatgtccaaccatatgtaaatatttacttttttctcaaataaatcaaattatactactgctggtgcggtatttataattttccccgattcattgggatgg

SEQ ID NO: 41817 - DNA, 1270 bp, Heterodera glycines
  unsure (1)..(1270): unsure at all n locations
gcctgcaggtcctcgaacttgacaaaattttttgaaattttgcagcatcctataaagacgcnnagggntancgaangnnagcaaanngnaccttttagaagngggngagcaaagggatgncaaaaaaganngacaggagaagganggngacgaagggacnggcgaagtcaaaccaggcncggcacccgacgncgaagcccaacacgaagacgcccaangnacgcgaagnnncaagcaggaagaccaaaagccaaaacgaaaaaaaagagcccaagaagaacagacaccaccagggacgggagnaccgccaaacaaccggccgaaagccacgccacaacccgncacaacaacgcaccacagggcaccaacaaggcacacaaaccaacaccaannnaacnaacnannncgagancgncgacacnaaaaggcgngaccccaggcanaacannagacaagaagaaagcagggggggggggaanagccgaccnaggcaaannancccacaccgacccccgcnnaaanccaannngagnagccaangcccaaaanncagcgcagaaaaacgncggggcanccaaaaagacagnccngggcccgccaaacaccaaaangccgcnncnaacgcggaggncgaaggcaccccgccaacgcaancggccgaggngagccgaagcgacaaaaanangggngggngnaanaannacaaccaanaancacnncaaccccaaccgcaaaagaacataccacaacnnagcccaaactcagncaaagaaggaaancnagcacnaagcgacagctccaagtatcctctactaattatgtaatttttataaacgtagcaaaaatttataaaaaagttctaaccaaaaaagctcgaaaaatttatgctcaacaattttgaccctaacttttttgcaattcgataaaatttttttgaaatttaacttaataatagagaaatctttgggctatcttttcgtatcaagcacggagtgaattaatttaagtttgaacaattttcatgcatttaaacgaccttacgtttttttggatgaccataaaaatatgaccctattaattctttcataacttttttctaaaacaatcaatttaaatgttgtttatataattagatagcccaaagattactctattattaagttaaatttcataaaattttattgaatctcaagaaagttagggtcaaaattgttgagtctaaatttttcgagcttttttttggtaacaactttttgtaaatttttactag

SEQ ID NO: 41818 - DNA, 1332 bp, Heterodera glycines
aagaggaacagaagcggttacagaaagtggaagaggaacagaaagtggaagagaaagtggaagaggaacagaaagtggaagaggaacagttagagaaagcggaagaggaacagaaagaggaagaggaatagaaagtggaagagaaacagaaagtggaagagaaagtggaacagaaaatggaagagaaagtggaacagaaaatggaagaggaacagaaagtggaagaagaagtggaagagcaacagacgtggaagagaaagtggaagaagaacagaaagtggaagagaaagtggaagaggaacagaaagtggaagaggaagtggaagacgaacagaaagtggaagaggaagtggaagaggaacagaaagtagaagaggaacagaaagtggaagagaaagtggaagagaaacagaaagtggaagagaaagtggaagaagaacagaaagtggaagaggaacagaaaaagcaacaaagggaaagaggaaggaacaaaaaaagaagagagcaagagaaagcgagagtgatgaagtgaaatgggaaggtagaaaggagggagaaaggggatgagaaagaggaaaagtaagagattttaagcgatcatattaaaatttgagttttaagaaaacgttaattgaattcccggccattaaaaaaatcagttgccttcttacatataaaagttttttggcgcgtagcgccctctagagactgttaaatagcgaagctatttcaattttaaaaaaataaatttaaatcaatttaaataaaaatgtcgcatttaaattaaatttaaaacaatatcgtttttaaattaattatttgttcatttccaaattctcatattcctaaactatgaggatcgcttagcagccaatagatgctttttacacgccccaaattatatctcccactagagccagcgttgaaagcgcccccggcgctttcacagggcccgcagggccctggttaaaaatataaaaatatataagttgttaatatttttgggttaaatatttgctacatataataataataataataaaaactaaagattaattgtctcaagtagttattttttagcaaaatacttaatttatgtgttttccattgaatgaaacattaatttacaaatgaattaatgcatttaaaacaaaacgaattctccaaagctgaatgaaccggaaatgatagaaaatttcatgagataattctgagagctataattaaaaaaagaaaaaatataaaatgagccaaatcgacttaatctattcatatactattcattatctgaaaaatttagattatcagtaattctgggtttttcctgacatt

SEQ ID NO: 41819 - DNA, 921 bp, Heterodera glycines
  unsure (1)..(921): unsure at all n locations
tccctgcgctacactaacatttgcctccacgatgtcaaaatggtatcaatttaatgatatgtctgctctcnttaatttttctttggaagacttttgtccttatttttcttttgatgacttcgaagttaggaaagtcggaaatttactcctgaaaatttccctgcgctacattaacatttgcctccacgatgtcaaaatggtatcaatttaatgatatgtctgctctccttatttttctttggatgacttttgtccttatttttcttttgatgacttcgaagttaggaaagtcggaaatttactcctgaaaattttccctgcgctacattaacatttgcctccacgatgtcaaaatggtatcaatttaatgatatgtctgctctccttatttttctttggatgacttttgtccttatttttcttttgatgacttcgaagttaggaaagtcggaaatttactcctgaaaattttccctgcgctacattaacatttgcctccacgatgtcaaaatggtatcaatttaatcatatgtctgctctccttatttttctttggatgacttttgtccttatttttcttttgatgacttcgaagttaggaaagtcggaaatttactcctgaaaattttccctgcgctacattaacatttgcctccacgatgtcaaaatggtatcaatttaatcatatgtctgctctccttatttttctttggatgacttttgtccttatttttcttttgatgacttcgaagttaggaaagtcggaaatttactcctgaaaattttccctgcgctacactaacatttgcctccacgatgtcaaaatggtatcaatttattgatatgtctgctctccttatttttctttggatgacttttgtccttatttttcttttgatgacttcgaagttaggaaagtcg

SEQ ID NO: 41820 - DNA, 946 bp, Heterodera glycines
ccggcaggcaatagatggctttcaatctgcaagaaattacgattggcaatatgtggttgtaaaaaacttttgggtatggaattattttttgaagtgagtcaaacaccctattagtgctttgctgtgccgagaaccggcaggcaatggatagctttaaatctgcaagaaattagattggcaatatgtggttgtaaaaaacttttgggtatggaattattttttgaagtgaatcaaacaccctattagtgctttgctgtgccgagaaccggcaggcaatggatagctttaaatctgcaagaaattagattggcaatatgtggttgtaaaaaacttttgggtatggaattattttttgaagtgagtcaaacaccctattagtgctttgctgtgccgagaaccggcaggcaatggatagctttaaatctgcaagaaattagattggcaataagtggttgtaaaaaacttttgggtaatgaattattttttgaagtgaatcaaacaccgtattagtgctttgctgtgccgagaccggcaggcaatggatggctttaaatctgcaagaaattagattggcaataagtggtttaaaaaacttttgtgtaaggaattattttttgaagtgagtcatacaccctattagtgctttgctgtcccgagaaccggcaggcaatagatggctttaaatctgcaagaaattagattggcaataagtggttgtaaaaaacttttgggtaatgaattattttttgaagtgagtcaaacaccgtattagtgctttgctgtgccgagaaccggcaggcaatggatagctttaaatctgcaagaaattagattggcaataagtggttgtaaaaaacttttgggtaatgaattattttttgaagtgagtcaacaccctattagtgatttgctgtgccgagaaccggcagggcatggatgggcttca

SEQ ID NO: 41821 - DNA, 852 bp, Heterodera glycines
catctgggcaaccctgggtttaaattaataaataagaaactcagtaataataattcagaaaaattgaattcaccaatttacattattctaaattacgactgatcaacagtcatttaaagaaatcaaaaaaataagaacccgactgaaaaatttatattatacaaaaacaattaataaaacataaaagcaaaaacacaaaaaaaattaaggtttaagtaaaataaattggagcaataaaataaaatataaaataaactaaaattactttttatgcttttttaattttaaagcgaccaaaatgggattgagaagattaatggaagatatgacaatgcaagagaaatgagcatttatctatgcagcaaaagtaaataaaataattaattgccataataaatctaaaaattgaatgaacttatttttgcaaaaaataaacagaataaatatttgaatgaataaattatcaaaatacttaaattaataataaaaaagatttccgaaaactgaaactctcatcgaacgaatataagcgaaatattgaatattaggaaaacaaaaagaaaattcaaatattaatttctttagagggattgaaccatgggaaagaagtagaaaatcaagaagattagccacggggcaatttgcataatttgcagttagactttttaagaatatattaattttttttaaatgttttccttttactccaatttttatgactaatgttttagccagactcccaatcttactagagcttgtttttcccggttcacgtttgccctaccgggaccgggaccttggaggaccgggaatttcagtctcggtcccggtcccgtgacactctacataaaa

SEQ ID NO: 41822 - DNA, 767 bp, Heterodera glycines
gcgcgtttgttaaaactgccagcgcgtttgttaaaactgccagcgcgtttgttaaaactgccagcgcgtttgttaaaactgccacccatgcgcgtttgttaaaactgccagcgcgtttgttaaaactgccaaccatacgcgtttgttaaaactgccagcgcgtttgttaaaactgccaccaatgcgcgtttgttaaaactgtcagcgcgtttgttaaaactgccagcgcgtttgttaaaactgccacccatgcgcgtttgttaaaactgccacccatgcgcgtttgttaaaactgccagcgcgtttgttaaaactgccagcgcgtttgttaaaactgccagcgcgtttgttaaaactgccagcgcgtttgttaaaactgccagcgcgtttgttaaaactgccacccatgcgcgtttgttaaaactgccagcgcgtttgttaaaactgccagcgcgtttgttaaaactgccagcgcgtttgttaaaactgccacccatgcgtttgttaaaactgccagcgcgtttgttaaaactgccacccatgcgcgtttgttaaaactgccagcgcgtttgttaaaactgccaaccatacgcgtttgttaaaactgccagcgcgtttgttaaaactgccagcgcgtttgttaaaactgccacccatgcgcgtttgttaaaactgccacccatgcgcgtttgttaaaactgccagcgcgtttgttaaaactgccagcgcgtttgttaaaactgccagcgcgtttgttaaaactgcca

SEQ ID NO: 41823 - DNA, 832 bp, Heterodera glycines
attttaatgcgtgcaaaatgatacaatataaaaataaattagcttttataaaatttgtctcaaacagtgaagattcgtcaatgaatctgaattcctgaaaatcaaacgctagaatgctgatttgaaaaatgtttcaaaaacgaattgatgaatactccacgggtggcgtaccacgcggctgacgccaaccgtgcggtcgacgatcccaagaagtttgcgcggaagcggccagcgatggttgctgctttttggaattggtgatcggtgcctcggccgtaggctttacatgaaatttattgattagcctgtgtgtacgcatgcgcatatgtaaaaattcttccaacttagtaagtttcaagcgtagtgtaactatttgttacacatagggcaaaatcaattcacatgtaaggaatccttacataataggaaaacttgcggcatatcaataaacactaatttagagcttgtaaagttgcttatataccttgtttgatgtaaggattgtcgaaggcttttgcaggaggccatttcaccatttcaaggcttttcaacttgaacgcgatgtccttcttttgcgcattccttttgaggcgtccacaagcttttaccagtgcagctacttctccttccagctgctgacgcctttgctcaacctcaagacgttgatcttgctttcccttgcaccaaatggccacatgtttgatgattgtgttgcgatttaagtaaaaatcatagttattttttaaaaaccttttgctaaaaacatgtaacctaatttacaggtaaatttattgctgacacaataaaaaaaaataaatgatgaagtgggggg

SEQ ID NO: 41824 - DNA, 1193 bp, Heterodera glycines
tcggttcgcgttgatcagcgtgattgaacacacagcaaatgccccagattgattgaggcgatcagcggctgagcagcagcagtcccccgccccattccgccattaacactaattagttggagacaaattgccccccgaggcagccacaaaaaattaggggtacaacaaattaactaattagcgcgctatcacagcgcccacctcgtcgctgtcgctgccgtggtcgtcgtcatttgtgattagtgccgctcgatgtggtgggaatgtggcgctttttgtgtgtgtgggttggttcgcttagttgaaataatcgcgcagcaccactaatttgttaattgaagcgatcactcttcccctccccctcccccctctccttctctgatcatttgccgccctgcccctctcccactctcaaactctctcgagaccatttctgatcaccagaataattggtgactgttggcggtgtgatcaccctccttctcctcccactctctgatcactcaaactctctctagaccttttctgatcactacactaattggtgatttggcggtggtgatcacctccccccccctctctgatcatttgccccgccgtccctctcccactcttaaactctctcgaagactttttctgatcaccacactaattggtgattttgcgatgatgatcacgctcccccatccaaccaattatttttttgactcacaacttttaatgggcacatatttcgaaatgtggcccttctacgagactctcgagcatcattactctcatcgttaccatatttggcatttctctaaaattccgatcgcttcgagaccgcgctcactaattaacccccgtgactcctcgtttgttaataatttcattaaactccaattgcatctaattttggactggcatgagatttatctgcctgaaataataattaattgaaaaaatccatttttggcactcaagactcttgagcgtcagccgccggcacctctttcttatgcccatcattaacagcctttgcctttttcaatccatcttgtgccatttccatgccgttgggctccctccatccatatgcttttcctttttcttcgtttgggccccttcccctaatcgctatttccggcacctgttttgccctgtcacccttccctttaatgcatttaaggggctgtgcgcggggggggggg

SEQ ID NO: 41825 - DNA, 1012 bp, Heterodera glycines
gctgcttttcatcgtgccacacttttgtcactcttctggcgccattgtccaccaccgccgcttgaggaaagtgccgtttctgtcgcggcggtgtggcaccgccaatgccatcgaattgctgcgtttgcttttccttttccgatgaacatgaagcagttcggttgcgctggcatcgctttcgtttgcttcttcttcctccccctttaatcgttccttttctccctttttcttcctttgcttcttcaaagttcgtcttcttcatcttctcctgctgcctttcttcgtgcacaatttctccggctgttggcatcagattcttattgttttgattattaattttggtcgcacaaaaagaaacacaaggggaaaatattcaaaggaacgcaaaacaaatctatttagttttttatctgtataattaattaattactaccgtatttacactcgattataaccctctttccgaggggaattgaacaatagagcccccgggggctagtaaatacggtaattactttttgattgaaaacgataaaaaaaaataaatttcgataaatttgaactataactttcaatcattcctatacattggcctcttcaatcaactcgatcgtttaatatgttgcaccaattaaagttaattagccataaaagaaccaaagaatgaggtacatacagtaagcctattgagagagaccaccaatgaccctttcagggctcattgagagaaagaggtcgcagagtgtgtaaagaaaaatgagagaagaaagggctgtacggagagagtggaggaaagagagagaagcgaaaccacgatgagagtggaagagagaagtgacaagagagtggatgaatgaaagaagtaagacaaagaagagggaatggatgaatgaaagaagcgagacaaagaagagtgagtggatgaatgaaggaagcgagagccgtgtcgagagagtgggataatgagaagcgagatcagtgccgagagagtgtgggataagagagaagcaag

SEQ ID NO: 41826 - DNA, 1200 bp, Heterodera glycines
cagattagtgctgagccaatggcggttcggatgcagtcattttggattggatttctattggatttatgaaaaatttatcattattatatccatttatataaaaaaagggaacaaatgaaatgaaatgaaatgctcagaaaatgcttgctttttgcaaagattgtgactttggaaggctaaaaccagtcttttattaacacattttacgttttataatttgtagtttataaaaaaagggaatatttttagaaaaaaaatattctttttatgtgatcgttgtgatctaaaatttcattaattcataataatttgtagtttattactggttattgtaaaaaaaaataaataattttaaaatgaatgattttttaaataaataaatcgtaaaattggtgaatgaaaatgaaatttttgctttttaaagacgaattccaaacttttcggagagtattccaactttttattgctaaattgaccttttgttaactaaacacgcattgttccctttttgcaattattaggtcattatttgggccatggaaattaacttttttaaggggccaatggcaactcgtataaaagtcaacacagattttacaaaataaagcctaagcttaagtctatgcctaggcctagccttagcaattgtacgaggtgtcattaatacttttttaataccgtaaaaactttcgcattatgtgaaaattattattattattattcgtaagagattaaaatcaattcatatttttgttgttttattttgtggtcacccattttttttgtcacttactctacaatattcacaatgatcatctgaaaaacgtatttattaatcattttcattcaccaattttatgatttataaaatgagcacaataatcaagttataaactatgaatttaaattcacaatttttcaaaaaccaaccattgctaaaaatgctagtgccgaacaactctaattaaaataataataataaatgttgatgattgtgcatgttttgccaacgtgctaataggaggcgaattcgtttgatctcccccccccccaaaaaaaatgtctgtgttttatttttgttgttgttgttttagtgtcctttgtttatctctgtctctctgctgttcaatgtattgcattcatttttttatattagcgtacccatgggtgatcattgatcagagtgaccctgaccagacc

SEQ ID NO: 41827 - DNA, 850 bp, Heterodera glycines
tttttaaattcgaattatttaaattcaaatattttagctacttttttatttgggagaacaatttgttaacaaatattgtccacaaaattttccaactcatcaatgctgcacaaaaaatgccaggattaagtcgaattaaatccaagttgatcagaaaaagaacatttttatgaacacatcaaaattcatcatttaaaattccttaagtgctaatgaatgaatgcatgaatgaatgattggcgcaagcatctcttacatcatcatcttcctattatggcggcgctgtgatcccccccccaactaattttatcgatgcttttcctctgtcagtgctcagtgatggcttcaccatgcttcgcccttttttgacgggaaaatcggcgatttttggagggtttttgtgttcattcacagccaaatgtttactctctctcttctcctcgctcaattcacttttcacttttgcaaaattttttgttgcaaaagtaaattttaaaaattgcggccaaaaaaatgttcaattttttcctttttcttttggtactgaagtgcccattttcactgggaagtcctttacgtctctctcttactattttaaacttgtaagacgtcttcttactttttaaggggggctgtattagggggggggggctgtattagagagacgagagagtgtattaaagagagagacagttagagatttttagatattgtatatttaatggaaaaaataataatattttttgccaaattttttaactttaaaaaaaaaaaggttttcaatataaataccaagtttacagcaaaaaatgattatatctattaattataagccatcttagaaccatta

SEQ ID NO: 41828 - DNA, 921 bp, Heterodera glycines
aacagtgcgactgggccccctgggcactgcgactgccaacctaaaaacgggggaacatttattcgcttccacgggtttttctactccaccactccccttttattgtccaagcccaaatcccttctgaacatgtccccgaatacgggtgcatttcatttcgctcacattgtttcacccggttttttttaaaattaaattttaaacaaaaatttttagtgaaaaaaaaattctgtttaaatgtaagttttcagggaggaaatgatccgggagggagaaattatcgagggggggggggaggggaggggacgaccggattcagtatttttgagacaattactgatttcgcacatttgggtccgcgtcaagagcgtcggtgtcctccaaactttcgacaagtcctttgatggcggtgtacgtggagaccaaattgtccagccgagcgccggaaatgaattcttcattcagtccggacagagtctaaatttaaaaaataattggggtggtcaaaccgatgctttttcttcgcttaattgcttacagctggttgtgtgtcgtagaggaacatgtccatgtccaaaatctgatccgttttgcagcctgcaaaatccatatggctgtcaaaacctcaaaaaaaatttgtcaaaattttttaaacttcaattttctagttaatttgatgatatttggtaaacacttgttatgtatcaaatatatagtaattaataaaaattattgtggacaagcctttttcccagggcccgagtttttgagctataattttttgcattatcaaccaaatctaacaattttggtatcattcaaaagccttacacatgttctattcgtcttacaaaaattcggggttcgttcagaattgagcaaaaaggtcaaattcgcgttcagcgtaccaaataccataaa

SEQ ID NO: 41829 - DNA, 693 bp, Heterodera glycines
tggctaatttagcaattagcattttaaaagaaagcacattattaaatgaaaagaaatgaatgactaatggaaaaggggcaattaaaacgaaaccaaatttgggactgacaatgagacaaaaagggcaaaacggaggagaagcaaagtgaatgaaaatgggaggtgagaggagagggggggggggcaaaatgggagggaaaaagggggaaggggggggggattcaagccaagccaaatgcattttccattccaatcacaacaaacaaagtccccccccccccacttttgtgcaaaaaatatcgttatattcatttctattcttcagcaatctaatttcaaataatgcataaaattattttttgattttctgatattaaatatatatttaaataatttaaaataaaggaatttttaaatcataagaagcaatgccttttattaataggataaatatttgtcgagctttcagaatttttgataataaatttccaaaaaataatgaaattttttgaaactttatgggttaatagagaaattttaacacaaaaaattcgcaaaattgaaaaaattaaaatttggggagacaaaaatggtgcaccaaaacgaatccaacctcaaataaataataatttgtatttaattcaaattctaaaggatcatttcgccacatcatttaaatattctcttctgctg

SEQ ID NO: 41830 - DNA, 1004 bp, Heterodera glycines
aaatatactttgtttttcaatttgagtctgttggcgttttgttttacgccaatcattttttggcaatttttttccttttttcccctccatgggccccatcgacaaaattacaaattataaaagccaaaagttttttgaattgaaacatttaattacccattcgaataccttatgcaatgcataaattttgtgtcggcttttactttatgaatatacattttaactcatccgcatatttatgaaattgacataaacaatttgtcttctcctccccattatttttattgtagatagagaaccaaatcccactcactgtaaacggttaataatgtcaaaagaaagggccactgctattgttgtgttttgttggtcagtgttttgtgcttttctttctttcccattgtttttctcttacttccatttttcttcagtcttcttctcatcgctgctgctattggacttgttttgcttacgctgtatcttttacagaggcgccaaagaaaggctttagctgcgaaactgaacgctctacagcaacatgcatttgacccagtaaacgcagagtcgtcaatgtcgcttaatgctgaacacggagtggaagtgccggattccttacgctcgggagattccgatgaagacgacgacgaggactacgacgctccacctgtaatttcgtctcgtgcaaaggcagcgccgccacccgttaatgaaaaggcaaagaaaggatagtttttaatttacatatgctcatctaattcatgtacatatgtatgtatgcatacgttttttaacaaagttgcgatacgaattaactgtttttttcattcgattatcggcggataatctcgaaatgatgccacttttagggtgcgagtgagatgacctgaataagggagttccaaatttaacagggattcaatttttaattttgaagggtgtgcctttaaagcgtagccaaaggaagttgggtaacatccattcattttttgtcaattcgtttttat

SEQ ID NO: 41831 - DNA, 942 bp, Heterodera glycines
  unsure (1)..(942): unsure at all n locations
aaaaaaaaaaaaggggggggggggggggggggagaaaaaaaaaaaaaaaaaaaaaaaaagagggggggggggggggggtggtttttttttttttttttttttttgggggggggggggggagaaaccaaaaaacaaaaaaaatatttttttttttttttccctttttaaaaaaaaaaaaaacacccgcccccccccaccaccacaaagggggggggggggttttttttttctctgccggatggctgttggggttgggggggccccccccctctttttttttttttttttttttcccctccccccgcgagaagaaaaagaaagcccccccacaaaaaaaaaaaaccatccgcccggacccaaataaaaaaaaaaaaaaatttttttttttaaaaaaaaagaagggaagggagaaaaaaattttctttcattttttttttaggggggaaaagggggctttttaaaaaaaaaaaaaaaagatttttttttttaggggaccaaaaacaccccttttttaagggccgaaaaaaaaaaaaaaggggggaaaaaaaaaccccgatatttggaaattaaaaagaaaattcttttaattagggagaatagaatatgtcccaaagatccctggaataaatcccttaccccacccattaaaatccccattccaacggatcaaatccaacaaactttaagaaaggttcaaaccatcaagccatttcactagagcccttggagattgaagcctaaactacatataatgctcgagatcgggcttattgttgttagacaattaagccgctcgataaaattccatcgaaaatgaaaagtctttttctctccagtctctctatttattcnttcatctttaggtttttccctcgntggaaaaccantcgggnctctctgggaagataaaaatggggatgttcaatgtttctttacatttct

SEQ ID NO: 41832 - DNA, 1664 bp, Heterodera glycines
  unsure (1)..(1664): unsure at all n locations
atagcgataaccatcacaaaattttcctttggcacttttttttgatactagttgagacattctctaatatgccccattaaatgcacgccactatatatttttagatgaaatttcacctattttcacctgttttcacctgtttccttttcacctattttcacctgtttcccttttcacctgtttttggtttatgtcccacaacctttgattctcatgcagtttcattttctcgaatttttatttttttcttaaattttataagcaataaattcatccctaaattcttcctgaggtctttgcctttcaaaccgtatttggttttcgcgcattgtttcttttagtttatttgccaaatctccaatacctaaatctggctgcgagtaagcggtccgataaatatgcccaatttcttgccgataattgttggctatttcgattgattgtttggcctcttctgctaattcttgacacatagttaaatcttttctgtctagacatttttccataccttttttaatatttttcatatttttttcttcttttttattttgtcaaatagggcatgaatttttaaaactccatctaataatttgctatgccaaaaatttacaccaggtttatcagggtttttattttttatattttgggcttcaaccatggtattatgtgcagaaaaagaaaattcttttgcttcgttatctaacctaattatgtctctaaatacgccttctacagttcttcgggcactggtaaattgctctttttcttcttttgaaaggcaacaactttccgttccgaccaacaagaaccaaactagaaataattttaagtaaaacatttttatttgaaaaaattaacaagtttatttatagatttaaaggctgacaatatcaatcaaagagtaatagatccccttcttccctccgaattctttcaccctcgcgccgattttcatggtgcacacggccccagacaatcctctcaactcctcctgaatttaaattagaatggtattttttctttaaaacattaccattccgtttttcttcccacgtacatcaaaaaatgccacattttccaaaatcccagtatcatctgccacagacaccttcaaataaggtgtcagtgccttctcaacgccacatgaacacacccccttacggcataaaacgcaagccttaaaaaactgatatatttttttcatttttaatacaaaccctgtactctacatgtactacgttctcaattctcactctcacaataaaaactcttccgccttcaataatctcgaaatttttaatttcagcgattctttgcattttctggaattctaccaaaaataataaattaaaattgattaaatatttgggtcaaaaccttcactttaaaaacaacatgaacatttaatatttattataaaaaagcatgcgaaaaaatgatggtaattttaaaaattcttccagtttattctccgcaaccacccggcgtgaagtgtcaaaaagtgagggtgggagtctatagaacaatgaccacgatccgaccnaatctctaaaatatttttttaaattgttttttctatgttccaacctatctatacgtggntagaacatatcaattaaacttcacaggtnntcaaagtagtctctgccccagctttgcccatt

SEQ ID NO: 41833 - DNA, 1087 bp, Heterodera glycines
  unsure (1)..(1087): unsure at all n locations
cccaagagaaaaaagaggatagccattttttcgggccagaatttttttcggtaacatttcaattatggtgggagtgtttggtagagccagactagagaaggaaaatgttggtaccaagtttgcggtcaaatccccaagagaaaaaagagatagccattttttcggcaagaatttttttcgttagcatttcaaatatcgtgtgagtgtttggtagagccagactagagaaggcaaatgttggtaccaagtttgcggtcaaatccccaagagaaaaaagagatagccattttttcggcaagaatttttttcgttagcatttcaaatatcgtgtgagtgtttggtagagccagactagagaaggaaaatgttggtaccaagtttgcggtcaaatccccaagagaaaaaagagatagccattttttcggcaagaatttttttcgttagcatttcaaatatcgtgtgagtgtttggtagagccagactagagaaggcaaatgttggtaccaagtttgcggtcaaatccccaagagaaaaaagagatagccattttttcggcaagaatttttttcgttagcatttcaaatatcgtgtgagtgtttggtagagccagactagagaaggaaaatgttggtaccaagtttgcggtcaaatccccaggagaaaaaagagatagccattttttcggcaagaatttttttcgttagcatttcaaatatcgtgtgagtgtttggtagagccagactagagaaggaaaatgttggtaccaagtttgcggtcaaatccccaagagaaaaaagagatagccattttttcggcaagaatttttttcgttagcatttcaaatatcgtgtgagtgtttggtagagccagactagagaaggcaaatgttggtaccaagtttgcggtcaaatccccaagagaaaaaagagatagccattttttcggcaagaatttttttcgttagcatttcanatatcgtgtgagtgtttggtagagccagactagagaaggcaaatgttggtaccnagtttgcggtcaaatccccaggagaaaaagagatagccattttttgggcaagaattttttt

SEQ ID NO: 41834 - DNA, 1003 bp, Heterodera glycines
cgccgagaaaaaaattccagaacaattcgtataggcgtgattaatctgagaatgcggttggaattccttgcactgttgagcagaaaaagagatagccatttttccaatcttttcacatacaaacgcgccgagaaaaaaattccagaacaattcgtattggcgtgattaatctgagaatgcggttggaattccttgcactgttgagcagaaaaagagatagccatttttccaatcttttcacatacaaacgcgccgagaaaaaaattccagaacaattcgtataggcgtgattaatctgagaatgcggttggaattccttgcactgttgagcagaaaaagagatagccatttttccaatcttttcacatacaaacgcgccgagaaaaaaattccagaacaattcgtataggcgtgattaatctgagaatgcggttggaattccttgcactgttgagcagaaaaagagatagccatttttccaatcttttcacatacaaacgcgccgagaaaaaaattccagaacaattcgtataggcgtgattaatctgagaatgcggttggaattccttgcactgttgagcagaaaaagagatagccatttttccaagcttttcacatacaaacgcgccgagaaaaaaattccagaacaattcgtataggcgtgattaatctgagaatgcggttggaattccttgcactgttgagcagaaaaagagatagccatttttccaatcttttcacatacaaacgcgccgagaaaaaaattccagaacaattcgtataggcgtgattaatctgagaatgcggttggaattccttgcactgttgagcagaaaaagagatagccatttttccaatcttttcacatacaaacgcgccgagaaaaaaattccagaaacaatcgtataggcgtgataatctgagaatggcggtggaattcttgcactggtgagcagaaaagagatagccatttttccatcttttcacatacaaacgcgccgag

SEQ ID NO: 41835 - DNA, 1222 bp, Heterodera glycines
ttttgatcatgtcaatgctttcgttttcatgacatcaattatgttcatgattccgagacaaatgaaacatccagttgtcccacttaaagttccaacgttcgttgaattcttcgagattttgtatacaaaccaacagttccaatttataaaacattttttactggattcacaaatatttgattggactcataaactctgatcggactcaaaaaagtcgattggactcataaagtgcactagagcccccccatttttctacgttcgaccttttgcatattttgtccattgaagacttttttatgctattcagactttaccaaaaaatgttagatttaaggaaatttgtctcttttgcgtacgacaaatccccctcagggttagtcgaacgtaatgcacggccctttccttaatctctacgttccctcttctcgctttttaataaaattctcccatttatttgtaagtgatgaaaagccaccgccaaagaagtatctgaagactgagaaggcacccgtggccaaaaaggagagaaatgcaaagaccgcaaaaccagcgaagaacagaatcgaatcagactctgaagaggaggaagtgtcgttgagttcggaaagtgatgcctccgtttctattgatgatggcgacgacgatgattatgattgataacaactgtttaactcttccctcccccatattgcttgtgtattttcgattaaatcttcgatctcttttggccagctgacttatttcgattaaatttcttttttttcacgtcgaacctggttctatacttccttagtttatcgataattggtctatatgttttggtgtggcacacttaattttatgggcccatctctgctggttacgtcttcgagtgatcgattcatatttccttccccccatttattcgtcactcaaaacgactaaaaatgtaaaaatggggagaggagaataaataataaattttaatggaccgaagtttgacctgctctgcgtttgattggatcaatttggcctttcatcgggcgtcgtcccattcattgatttgggtccaattcccaaattggcatttctatttcaaatcggaattccattgggaaatttcccccaaattggcatttcctttgggaatttccccgccgttcgtcaattttccttctgttgcacattcaatcattatttcatttgctcattccttcgcttcgaatagtttaaatttccc

SEQ ID NO: 41836 - DNA, 253 bp, Heterodera glycines
cggtgtcatctatgttactagatcggggatcgatccccgggcggccgctcgagcaggacctgcagaagctagcttgatggggatcagattgtcgtttcccgccttcagtttaaactatcaagagagggaggagagggttggagagggaaagggtggggggagtatgagtatgatggtcgatatggagaaaaagaaagagtaattaccaattttttttcaattcaaaaatgtaaatgtccgcattgttattata

SEQ ID NO: 41837 - DNA, 1419 bp, Heterodera glycines
acttgcatggtcgtaagtctcttccacctgctccgcttggcccatttcttgctgctccatctcggcttctccttcctcgtcgtcaatttgttgctattggactgctgaaattagtttgaaatattttaggacctaaaaatccgttgaaaaacatacttttcttagccagataggcttgtctcgccttctccgtctgagcttttctttcctctcgccttttcagttgttcagcacctcttctgccttgaagcttaagcaattatttttttagccataataaaaaatttaaaaaatttcagataaatgcgaattgaataactttctaggccaaaatttttactcaaaacactgaaagtttgcacattttccttttctctatcgatatgtaaaatttggtgtggatttaacaagcagaaaaaaagttaaacaagatgaagtacctaaatgttgttcattacattattaaaaacgaagagatagtacataaaattgagagaaataaagataaaaagtaaatatgacagaaggccaatttttttctataattatccataaaaaatattttttgccaatttttttttcttttttaccatccatggaacgaggcaggggcgttttttgttgcttttcacttacttttatgcggcgcatttttcaagaaaaaaatttggggaacagggggtccgcggtttttgaaaattctggtccgttttttatttttttttgcccctatttccttcccagttgacttttgttcattttctagcgaatcggatttgcacttttaaaaaatgttcagggctcggcgaaagaatttgttacgccaaccatatttttccacacagtgcagcagaaaggtgggcaaatggacaagctttaaatgcttcagcaattgtaatccgttggaatggagcccagaaaacacatgaaaagaaaattgttttagagtttttcgaaaataaggttgactcttttttatagatgaaattattgaaaattcaaactattatatttaaatatgggtttgggacgatatctcccgacccatgggtgcgaaaaacaaaaaaaaatttcgaaaacgaaacgaaaatatttatttttcacgaaaacgaaacatgaaacgaaaattaaaaaactcgaaaacgaaacgaatttttttcttggacgaaaacgaaacacgaaaacgaaactcaaaaagtgatcaaaaaagggacgacgatgaaaacgacacggaatttcgcacacccctgctccggatgatgaaaatttaaaagatatttcgacgttttggttgtggttaccttattttgggctttcttctcgatgtgtttttttaatccacaactttcaattgaattttcccattttaattattatttttgctttctctcaaggaaatgaagtgttgtcactttggcc

SEQ ID NO: 41838 - DNA, 1432 bp, Heterodera glycines
acttcgccggttttccaaatgtcacaaaagaacccaacggtttctgttgatttgtaacagttgcagaaatggggcggcggtggtcggtggaggaaagttttttcctttttttgacgggtgccattccgaaaataataataatttagcctaaaaaaagggaaaatttttgaaaaaacgagcataaaattaagcgtgatttgtgtttcatcctcatttacctatatattcatgtgaggtcaaaatttcagcacgcgcgcttaaatgatggaaaatttgaatggttttcgacctcccccctcccacttctatatttgttcgacctctctctatgtatatgcctagagcccggtaaaaaaaaaatttccgggagcgggagttcaaaattttccgggacgggagtcccgaacgggaatcccgtaaaaatcccgctcccgttaaaaatcccgttcaccgaaaaaagcgggagtcgggagcgggactcccgtaaaatcccgcgggagtcccgatcccgccgggctctagtatatgcctacctaagttcctgttttttggctataaaatggcattcttccttatcctccctttcattaattcgtttataattttcccacgggaattttgttgcataatgtcttagagaattccgtacggtttccttttatatcatatcgcattttgacgagtgccatttagaaaataataatagtttagcctaaaataaggaaaatttataaaaaattagcacaaaaattaggcgtaacaataaaccatggctcggattcgtacttggatgccaagtacatacttgggtttcggcttttgtgcttggaaaattttaactgtacttatttccaagattgtacttggaaattgggattttttctaatgaaggtaaaaaaatttacacttaatgaaaaaaatatgaaatttttggcattttgtcaatactcattatttctgcggaatttaacttaaagatagaaattttctgtgaaaaaatttgtttaaaagggtcaaaatttcggcaattgtgaagattattggtcccgaaattttttaattaatttttttttctgaaaattttttaagcacttataggtgtgttttgaggcgctgagcacgaatccggactccatttcgaccaattccgaatccctaatccgaactcgaacatttttcgagaactaaattttaaatttctcttaaaacattgtttttagcgttttcggggttgttaactttagacaaaaaccgtttaaaaacaaaaatggtcattctgtaaagatacgaacaaaaaataaattttgataattttttttgttcgagttcggatcaggtattcgaaatcgctgcccgtcaaaatgtccctgcgtcataatgtcccagcgtcgaaattaaggagcgtcataatgtcccagcgtcataatgtccc

SEQ ID NO: 41839 - DNA, 747 bp, Heterodera glycines
  unsure (1)..(747): unsure at all n locations
tttacagtaggaaattgtaantttgggggttattgggcgatttcaaaccgatccttccggaacactgatgctgtttatatttagagcgtaatgagctgaaaatgtcagaattcaaaaagtggggtcgcgaaaatagtaaatctgaggttattggcgcttatcaacctgatccgtctgcaacacttaaacagtttatatttaaagcctaattagcagaatgtgaaattctctcatttgttactttatgatcatttttgtctaattcgcaaaattacagctcattcttcgcgaaatataaactgaatcagtgtttgcggaatgaccgagctgataatcgccaataatcttcgattacaattttcttggtcacctttttggaattccaccatttcaactccttatcctctaaatataaactgaatcagtgtttgcggaggaccgagctgataagtcccaataatctccaatttacaattttcatgatcacttttgtgatattctcaatatttcaatttcttatatccaaatgtaatctgtataagtttacagtaggaaattgtaatttgggggttattggcgatttcaaatcgatccttccggaacactgatgctgtttatatttagagcgtaatgagctgaaaatgtcagaattcaaaaagtggggtcgcgaaaatagtaaatctgaggttattggcgcttatcaacctgatccgtctgcaacacttaaacagtttatatttaaagcct

SEQ ID NO: 41840 - DNA, 1481 bp, Heterodera glycines
aattccgggctttactaactgtgtgtgtaatagttaaccgatctcatataaataataattaggtgcattataaagaaatcgcttggatggccctttgggtggacaaatacagaccacgagacttttctaagctcactttccaccaagagcaagcagaacaacttgtcagtttggttagcaccagtgattttccacatttactcttctgcggaccaagcggagctggaaaacggacgcgaattcattgtttactgaagaaattatacgggaaaggcgtggaaaatgtgcgagtggaggaaattcccttttcggtaagaaaatttgaaaaagttttgatttttcaaaaattttgttccctaatttttattcgttctttcaggtgcccagcggtaagaagcttcaaattcactcggtcaacagtaactaccacatagagctgaccccgaggttgtccccaccaattaatttgctaatttttacattttctgtcaatttataatatttagacttggctttattatgactgttttccctcatccgtgacccatttcagtgacgttggcatttacgaccgagtgattgtgcaagaagtggtcaaaacaatggcacaagttgagcagctgaacaggtccacgcaaaaggctttcaaagtggtcgttctgatggaagcggagaatctgagcagagaggcgcagcattcgttgcgtcggaccatggaaaaatacgcggggacgtgcaaaatcattttgtgttgcgagtcggcgagtcgcatcatcgacccgttgcgcagtcgatgcatgttgatcagagtggcggcaccaaacgacgcgcaggtgggacgagcccaacgcagcgcgaaaaacttgcttgggggttttctgggagtggggataatcgaaaatacaagtgtgaaatcccttataaaggccctgaagcggcacttatggccaaaagatactcataattttccttgtaatttggggccgggactgaacaccaaaaagacccgtcagaataatgaacattataaaaaatatattcatcaaaaccctttgtcttatttgtgtaaatctcaggtgttacacttttccgagtttctcaaattttcaatttgaaattcattgcgattctcgacaaaacatttcttcagatgcgcgaatgcattgagtcggtctgcgcaaaggaacgcgtgaatttgtcggaattttggatgaaaatgttaatcgaaaaagcgggcggaaatgtccgacgtgcgatttgtttgttggaagaggagtgtagcacaaaagtgaaggaaataatgagccaatttaatgggaatatgtgatttagtggtaaaagtttggacaagcaaaacatcatggagcccgagtgggagacgtatctgaaacaaaccgcggaattgataatgcaaaagaaaaatgcgaatgggtgagtcactgtcattctgagagaccatttgacacggaaagacaagcgaa

SEQ ID NO: 41841 - DNA, 759 bp, Heterodera glycines
ttgttttcggggcagtccccccgaaccgatgcgcccagatttatgggggagaccgaatccttcgggaatagcttccctatagcctgtactttaattctgcgttggatttttgctccccataattgtttgagtaccccaaacggacacttgaaaaaatcgatttttttgttttcggggcagtccccccgaaccgatgcgcccagatttatggggagaccgaatccttccggaatagcttccctatagcctgtactttaattctgcgttggatttttgctccccataattgtttgagtaccccaaacggacacttgaaaaaatcgatttttttgttttcggggcagtccccccgaaccgatgcgcccagatttatggggagaccgaatccttcgggaatagcttccctatagcctgtactttaattctgcgttggatttttgctccccataaatgtttgagtaccccaaacggacacttgaaaaaatcgatttttttgtttcataaatatttttttcagaaagtcatgcgcacccgtccgatctggcaagttaagcaacgattgctgactagccaaaaggttcggtgccgtgatgaaacgaaccagcactgcttaccccgcggcacccggcacggtcccccgaaggaatggatttaattaaattctctccttcggggatttttttccattaggtcgtccgttaacgttcgattgctctagtcaattttttcaaaattttgttgaaatatttgccgtgctct

SEQ ID NO: 41842 - DNA, 1011 bp, Heterodera glycines
attatttatttatttattcaaaaataaaaatacaaaaagaagacaatgtgccacttacacttttggcggaaatgaggtgaaatggaaagccgtgataaaagaattgaaattttgaatggagaagcagaaattagaaaagtcagacttccaacaaagggaaaagtggttgtttttttttagggttgtaggagaaaaaaaaaataaaaaaaattttttttttttgaggaaaaattttggtgagaaaagtgaagtactggaataaatgtattttttttgaggaaatgtttggaggtctgacagaattatttattgaaaagacgagggtattgtttttcgagtgattgaatttggtgaacaattttgtcgtttggtggtaatgattttaatgcttcataacatacgaggattgtttggtcaaaaacttccagcggtttgtaaatgtcgtcgctggcctccttctggtttggtgcattttctttgacgggagtcggaacatttgtctggcgaggttgcattgctggtgccacgggagcagggttttgttgacgttttcggaagcgcgcttcatattcttccttgagttgttctttggtcagcgctgggcggacgaacaggcggttcaggttttgtagagaacggagtcgagcacgctcgcgcttccatcctccgagtgccatgtgttggtgtgtggttgttggcatgaccaccttgagcgggcgtggtgttgttcgctgcgggtcgtaacgtccgagtcgaaagacggcggttggttgggcctcaacttcaagatggtccaggatttttgtggcggcttccctgtcttcctgaacacgttccgatgggcgaatggcattgctttccgggaggccaatgaagaccagggtgcgttgtcgttcttgctccgcgagtgcgacagcgtttgggtccaggtcctgtgcaggtgccattgaacgttttgcgcgaggcggagtgatgtttgatgcgttggttcgcttcatgtcggataattag

SEQ ID NO: 41843 - DNA, 1389 bp, Heterodera glycines
  unsure (1)..(1389): unsure at all n locations
tggtggacagtttgtgcacgcatcaaggcgtgcgggcgacgtgtctgccctgctacancttcagctagcagagacgagcgcacggtcattgcaagcgcagcacatcatttgggtagacaatcgaccggttggcgcgccgcctcattaccgtgcgggtgctgcacgcgaggagtatgcactccttgaagaacaactgcgtcccgctcggcgtcgcttgtccacagacagcacttcagttgtcattgacattgcacgcgtcggtgttgcaccgcacccactgcaccagcaccaagccaagcacatgcacgagcacatcaacgtgcaatggcaccgcactcaaccaatggaggaattttcagcaactcttcctgacgtccgatttggtggccaccatgtcaaagcgctactcgcttccggcgacgagcatgttgccttgcaccgcgagttggtcaacccgcgggcaaagttggcacaattgggagtggaaacggtgcgcaacataccacgaaaggcagacacaacaccagcgctgcacagtgcgtgcagtgcggacgaaactgcgtccaccgttgcgcatttacaacgtgccgaagcgcgctcgagcgcaacaccataccgactgatggcacccaacaactacgcgggtgctgcacccagcgtcaaagtgaccgaggcacgagaagtggaactgctgaacaacgtgcagctacgaaggccggaatcttggagcatggcgcaggactacgcgtgtgcagaggcacgcttcgggggagcactgcagtaccggatgcgggcctcggagttcgaaagttggcaagtgccaaccgttgaactagaacgtgtcgagtcatcaatgcacgctcctgagttgcgcattaacatcgggcgacgaggcgaagtgccgactcccctgtggtgctgcagttctggcgaagagacggtcgtgcttgacctgcactataatcgccctaagccggaataccctgttgctcaacaatgcgtgcgggtgtcaaaccaaggccaatcggcgcagttcaactcgcgcgaggcaggctacgtgcaaatcacgacgaatgttgggctggcctggtaaaaattggcgataaaaattgctaaactgataaaaatgcatttattagggagggcgcgcgtcgtaatgaagccgagctggacgtcgtgcgcacgtatgcgcgctttggcggacaatttacaatgaattgcgctgcatccgggcaaatggacaccggcgagatgattgtcagactaagacggtccgaaacggatgagcaggccccgccgcacttgattcacgtacttcttcgccaatacgctagagcgcaactgcatgcgacacatgctcaacaagttcacctgcaccatgacttgcag

SEQ ID NO: 41844 - DNA, 949 bp, Heterodera glycines
  unsure (1)..(949): unsure at all n locations
gctcgagagcattgtacgtatgaaatttctcaaaataagagatagtcatttttcttggatataagataaatntaaaaattctctgtgaaattaaatggcgattgcgcaccgcacttcctcatcatgctcgagagcatttgtaacgtataaaatttctcaaaataagagatagtcatttttcttggatataagataaatttaaaaattctctgagaaattaaatggcgattgcgcaccgccctccctctcacgctcgagcgcttttgtaacgtataaaatttctcaaaataagagatagtcatttttcttggatataagataaatttaaaaattctctgagaaattaaatggcgattgcgcaccgccctccctctcacgctcgagagcttttgtaacgtataaaatttctcaaaataagagatagtcatttttcttggatataagataaatttaaaaattctctgagaaattaaatggcgattgcgcaccgccctccctctcacgctcgagcgcttttgtaacgtataaaatttctcaaaataagagatagtcatttttcttggatataagataaatttaaaaattctctgagaaattaaatggcgattgcgcaccgccctccctatcacgctcgagcgcttttgtaacgtataaaatttctcaaaataagagatagtcatttttcttggatataagataaatttaaaaattctctgagaaattaaatggcgattgcgcaccgccctccctctcacgctcgagcgcttttgtaacgtataaaatttctcaaaataagagatagtcatttttcttggatataagataaatttaaaaattctctgtgaaattaaatggcgattgcgcaccgccctccctatcatgctcgagcgcttttgtaacgtataaaatttctcaaaataagagatagtcatttttcttggatataaga

SEQ ID NO: 41845 - DNA, 904 bp, Heterodera glycines
gtagaaaattagcttggcctccacctacctcctcttccttctaacgccgagcagttttgcgccttcgcttccaccgccaccttccgctccgtctgtcacgtcgctgtgctcactggagcgctgctccacccctttaacagtgtcggaggagtcatccacaacggttgccgtcgtagccgagggggagtctgtggcgacgggggtgtcttcaatgtcctcatcctcctcctcctcctcctccccatcatcggattcgatgaacagcagtgtgccgtggccgccgctgccctcttcatcaccgtccttctcggaggagggggcttctttttccagtctaaactcggcggtggtaggtgtggtgacagtagctgtgacactgtggaccaactttcctgtcccgttttcctcctcttcgtactccattgagcccacagcagtgcctgtcgtctgagccgttggtcgcagaatccaggcgacagttccgaatgaatccattttgggggtgggggtttagtagaatggaggaagaaattttttatctacatatttatatctatatatgtgtgtgtgcaaatacagagggacgcaaaaaaccgaagaagggaaaatgttcaagcacccgttcaccatgtgcgtcgccggatgcaccggtagcgggaaatcgcagtgggtggaccgccttctttctcacattgatctgatggtcagtgaaggccctatcactggcgtgctctactgttatggggaagtgaacgacaatgtgctccggctacaacgtatggagaacaccgccaccacttcaagtgacaacaacatcacggagggaaaacattcgatcagaatgtgccatggagcgcccgaaaagagggatgtggagcgggaagcacgcgctacgggcggacgg

SEQ ID NO: 41846 - DNA, 1173 bp, Heterodera glycines
  unsure (1)..(1173): unsure at all n locations
tatataaatnttgtaaataaattgccaaatatgtataaaaaatcttaaaatgtataccaaatatgtaaaataaaatttttactatggctatttttgggaaaaaaattttggtaaagtgctaaataggcataaaattccaaaattaacctaaataggcttagacatctactgttttaaaaattcagttttgatgtctcctttggcatttaataaaacggcgcgttcagtgacgacgacagttgcaagatgaaagagcagtaactcagcacgtaccattttgtgctttcgctggctccgagttcggcaagtagcaaaggcactgacaaattggacacccaaccgaaagattcgacccaaaaaaatgatcattagaaaacggagcaatttgcgggtgtttgtctcatttgattgtatatttcttaaaagttgctgtttaaaaaaaataaaattttcgaattccgaatgcttccggataaagcagcacaagtggacatctgcttcaggcgaagccaaagtgccaagcaaagaatgaacgaacaaatattcagcagccaactgcaacccgcaaaacagtcggggccggttcgatggtcatacaaagaaccaaactgaagctaaacgaaaaatttaaacaaaattcgtatttcagtatgtaacagggatgtcacggagttccgaacattttggtgcctcggaatgccatccctggtgtgtaacattagaataagaacggcccattcttcgtgagttttcccatttcctgtcaatgtcaacctattgagctgaaattttaatcatacgtagcaattctgaaaatattagaaaagtgagccaaatctcaacaactatcaaaaagaaactgatgaaacaagctaaataacaaaaacaaaaatttgtcatatttctctctgtctcttaggcagagctttgttgagttttccaagttctccggagaaattaagggccatgaggcttanatcaactcaaatttgtgaccaattgaatcaagctggtcagcagcaacaaactctagatcacgtacagatagataccctacataagctcaaaaagttagagcgtactgaaaaattgtccccattttaaaaattttataatattttttcagtcaccatttaccnttcttgctttgctgaaatcttatttttcaaaaag

SEQ ID NO: 41847 - DNA, 245 bp, Heterodera glycines
gggggggggggggggggggggggggggaaatttttttttttttttttttttttttttgccggcccccccccgcccccccccccccccccaaaaaaaaaaaaaaaaaaaaaaaaaaaaaagaggggggggggggggggggggggggggggggcgccgccccccccccccccaacccaaccacaaaataataataatttttttttttttttttggtggggggggggggggggggggggggggggggg

SEQ ID NO: 41848 - DNA, 598 bp, Heterodera glycines
gcatctcaaaacagtacaataacaaagaattcttctttgacaaaattcaacacttgtgtcgtctctaaaacattagagacacactaatgtgcatctcaaaacagtacaacaacagagaattctttttgacaaaattcaacacttgtgtcgtctctaaaacattagagacacactaatgtgcatctcaaaacagtacaacaacagagaattctttttgacaaaattcaacacttgtgtcgtctctaaaacattagagacacagtaatgtgcactcaaaacactactatttaaaactgacaaattacatttttgtgtctcatggattaaagatggggtgaaaataaggaagggatgggatacgaatttcccattgtctctccttttcttttcttttactcttttttcttttccattgcaatttactctctcttttttcccactccctccctctcccacacacacacacacgcgtccaacagactgctgctgcacagccgcacgcgtctatccactgtctgcccctcccacccgccgctgtctcgcgtggacagacaggcagacagtgaactatttcttcccttccttccctctaaccact

SEQ ID NO: 41849 - DNA, 1052 bp, Heterodera glycines
aaaaattccgactttttatgaaaaaattccgaagtcggaattccgaggccccaaaatttttcggaagtcggaattccgaccccaaaaatgtcggaactcgaattaatcgtacaaatgtaaaaaaataattcccgggagagggttcagacccaagcacactctcaaccagagaaaactaccacttaaccaactacataattgtaagacaaaaaaaatggatccaaaaaccgaaacctacggtctatcagtcttgtttgatcaagattatcccacccgtttgatggtttcaaattccgtataatcacgagtttatcaatcaattcagtatgattactgttttatcaatcccattcgtattaagagagtgtccaagaaacacttggtaagaagaaactcatggtgtgaacaaagtgtattagaaccggaaaatgataacagtgtgtgtgttgtgattgttgtggaagagatccggaggaggacaaaaagcatcagcagcaattgaaaagtgaaaaaatttaaatttcgtaaaaaaaattgcataaaatttgtcgacgaggcgaaaagtggaggggggggggcacttaaaatttagtaaatcaaagaagtgaaaaagcacagaaaaacaatgaattatttggggtaacaaaagaagcaatacaaagcacaaacaatgaattgtgatgatatgaataattcataaaattatttaaaaattaaataaaaatttgtgaattttaagcagattttaagaaaaatgtaaatgcaacgattggatggggaggagggattctggtactgtctctttgggtcagatggagtaaaaaattttaaggtccagaaattttgtttatttttgaccctcacgaaagtgaggcctttaaaaaacccatgaaattcggtggctctgccaatttttttaatgggttacaatttaaaatccaggtaaggtaaatagacttttttgggaacaagcggggcggaaggccggcggtgccgaaaggcgccgccgggaaaatttttgaaaatttgagtataatttgttagcagatttt

SEQ ID NO: 41850 - DNA, 1021 bp, Heterodera glycines
  unsure (1)..(1021): unsure at all n locations
ttttttttgcttggctttgttcccatgtttttgtttttttccatattatttgttcatatttgatatttttattaatgaaaatcggttacttattacttaaattgatgatttgttaaacatgaagccaaatctttcaagaatgatagccaataaccaggggtgccagatccgaggatttatcctcattttgtggctttttgataggtcaatgaggatttttttttggaaaatgaggatttttgtggcttttggggacggtaggggtcaactccgtctggccaactccgtctcagacaaaaaaaaatatttaaaaatttttttcgacgaatttttcaaaaaatatacccctaagaaattaaaaattttctcaaaaattcatctgcaaatctatttaggtatttattttcatgttctgatttttaaaattattcttaatgccggtggtgattttttgtgcgacgacatttgccgcgctgtggttgcacgtgtgtatacccgtgctgagacgatcctaaatagntatcaatgtgggcgatcctaaaatagtattaatgataataattaattaaaataattattattcaattaaaattattaaatttaaattatttttaaataatgtcaaattacagtgaataattttaacattttgttaaattttttgcataaattttggcttccattagaaatacgtcattgtttgagttccgtaataagatacgaaaaaatgcggcgaaaaaaaaaatgctaaaaatgggtgggaaaacaaacattaaatttttaaaaagcatatggccatggaatttggaaagaaaaagaggctgaagaccgacaagaaattcaatacaaaatatttaaagccgcagaggaacgggctgggaacacaaaaagccagaaatggatgaaatttcagaaatttaatgaaaaaattgatgaaaaaattttcgtttaaatacccgaaaaaaagctttggaattcccccaccaaattccaaaaccaccaaaatgttttccctttaaaa

SEQ ID NO: 41851 - DNA, 1011 bp, Heterodera glycines
agtttttccttcacattagaagactctttctgtttcctctccgtctgatgttgtgacatgcatttttccctttttgtcgggcggctgtctggcgagcggactatggggaggaaaagacagacaaattggaaagggacagccgggcgacggaatgggcgaattaaggagggattggacataaaattttaaattataaaataaagaaaatttatgtaagtgaaggtgccaataaaattcctaatggaaataattgcagtaatacagatctgatttagcaattttcattttcattttacaccagggatggcacgaattccgattttctacatttttggggtcggaattctgattttcgaaaaaattttgatcgtcggaattccgacttccgaaattttttgataaaaagtcggaaattttcggaatttttttttaattttttcaaaaaattactaagctagactttcgttcaagggtaaattaaaaacacttaatggttctgaaatggcgtgtatttaataggcataattgttttttggcgcaactgaatttcttggcgaaatcaaaatttaaaaataaatttttagtttttcacaaatttttattgtaataatggtgaactacttggaggagatgtgaaaaaggatccattcattctttttgagttcccggcgccactgatactccaccagcgtttctgcaaatcggaacccagggatgcgtctctcgcgaaaccagtccttcgcgggcctccaactcgcctagatgcgttgggtatgtgtgccatcctcagctacaatttacacaaaataaatacctcatttaacatttcagggcaatccacaaggcgaaaatcctctaatccgtcttcgatcattccttaacacgaaaaccattattttagttttagaattaatggtaaccttatttttaacttcgcaaaagggagcatgcgaagacggagcaagtagtgggacgagacggagggcgggggaagcagtctgacgagtgcca

SEQ ID NO: 41852 - DNA, 117 bp, Heterodera glycines
tgcggacatctacatttttgaattgaaaaaaaattggtctttttctttctttttctccatattgaccatcatactcatactctccccacccttttcttcttccgccacccacctccc

SEQ ID NO: 41853 - DNA, 999 bp, Heterodera glycines
aaaaaaaagggaaaaaagagaaaaccatttttggcaagaatttttttgtttggggttccaaatatcttaagattgttgatagggccagccagagaaaggcaacggtggttcccaattttgcggtaaaaaaatggaaaaaaagagatagacatttttggtcaagaattttttttgtttggtttcaaatattgtaagattgttgatagggccagacaagagaagacaactgttggtaacatttttgcggtaaaaaatgagaaaaaagagataaccatttttggtcaagaattttttttgtttgcgtttcaaatatcgtaagattgtttgatagggccagacaagagaaggcaactgttggtaccaattttgcggtaaaaaaatgagaaaaaagagatagacattttttggtcaagaattttttttgtttgcgtttcaaatttggtcaagaattttttttgtttgcgtttcaaatatcgtaagattgtttgatagggccagacaagagaaggcaactgttggtaccaattttgcggtaaaaaaatgagaaaaaagagatagccatttttggtcaagaattttttttgtttgcgtttcaaatatcgtaagattgtttgatagggccagacaagagaaggcaactgttggtaccaattttgcggtaaaaaaatgagaaaaaagagataaccatttttggtcaagaattttttttgtttgcgtttcaaatatcgtaagattgtttgatagggccagacaagagaaggcaactgttggtaccaagtttgcggtaaaaaaatgagaaaaaatagatagccattttttggtcaagaattttttttgtttgcgtttcaaatatcgtaagattgtttgatagggccagacaaaagaaggcaactgttggtaccaagtttgcggtaaaaaaatgagaaaaaagagataaccattttttggtcaagaattattttgtttgcgtttcaaatatcgtaagattgtttgataggg

SEQ ID NO: 41854 - DNA, 1171 bp, Heterodera glycines
agcaaaaatccaacgcagaattaaagtacaggctatagggaagctattcccgaaggattcggtctccccataaatatgagcgcatcggtaggggggacggcccgagaagccaaaaaaaaattttttttggataaaaattatttaaatgaactgactagataatatttaaaataggttatttctcttcctttcagtatccctgcaaagtttggtgcgcttctgatcagtttctgaaaaaaagttaagcctaaactttttggcctgtttaaaaaggaattaaaaatttttaaaaattttattcatctccctttttgatagaaaaagcatcagagtgcctaaactaacatgtaaataaaatttggtgcgtttcagagcattttctgaaaaaaatatttatgaattaattatgcaaaaaataaataaataatgaactctcctccttaataaaaaatccaaatatttaaaaatctataaaaaatttaaaaatgagaattcatgcgagattttctggaaataagcttatttgggcctagttaagctgtaaaaaaaatttggggcgatttgaaagagaatagaaagagccaggttcgatgatgttttggtaagccaaaaaaaatccaaacatttaaaaatctataaaaaatttaaaaatgagaattcatgcgagattttctggaaataagcttatttgggcctagttaagctgtaaaaaaaatttggggcgatttgaatgagaatagaaagagccaggttcaatgaagttttggtaagccaaaaaaatatccaaatatttaaaaatctataaaaaatttaaaaatgagaattcatgcgagattttctggaaataagcttatttgggcctagttaagctgtaaaaaaaatttggggcgatttgaatgagaatagaaagagccaggttcgatgatgttttggtaagccaaaaaaaaaatccaaacatttaaaaatctataaaaaatttaaaaatgagaattcatgcgagattttctggaaataagcttaatagggcctagttaagctgtaaaaaaaatttggagcgatttgaatgagaatagaaagagccaggttcgatgaagttttggtaagccaaaaaaaaatccaaacatttaaaaatctatataaaatttaaaaatgagaattcatgcgagatttt

SEQ ID NO: 41855 - DNA, 871 bp, Heterodera glycines
  unsure (1)..(871): unsure at all n locations
gaggacaaaagggacagaggaaactttttcaagaaggaaaggaggaagccaaatccgatgatgaccttaaaaggaaaggaaaagcctttgaaggggagggggtgggagggaagcagggcttacgcaaagattgctgaaattgcaggattttcaggattttttttgggggggggggggggtcaattgcggattgctgaatctttccagtctcctaaattttgacttttgagcagccccatcctggccaacatcacccgaaattctcttcaaaatttccaaatccgattgcgtgcagccccgccgccggagggagagaccattgtgtggatgtcctggaacattgggtagttggcatggacacggttgtgcttgtcctcctcgtggttgtggaactcgccaaaagaggcgaacagaacaacgaacagcgactgaaacacacacgccaaaactgagaattggcgacgctgaacgaggaaaagaaaggtaaatggatgaacaggaagaggaaaaggagaaggggaaggagagtaagaagaaagggagaaaggaaaggaagagggagacaaaggaggaaggaaaagaaagtagaaaaagaagagagagtaagagggagacggagtagcaagatgaaaagaagagagagggtaggaaggaagaggaaaaatagtaggcgaaggagagaaagagagtaagagggagacggaggaggaaggaagagaaagacgaacaggaaaagggagaggaagaagaaaaagatgaaagggaacgggagagggaggagaaggaggaggatgaaacaagagagaaatcanaaggaagatatagaagagaggaggaaggaaagaagagaaagatgaaggggaaagggaga

SEQ ID NO: 41856 - DNA, 888 bp, Heterodera glycines
ctctaattcgggggggggggactataattcaataaataccgtaattgtattttacgtataaatatgtattattcatttttcgccacgcacccgctccacgttcatagtcttgcatgcgttcttggaatgcacggatttgactgtcattcagatgatcagcgctgatcgttatcagctgttccgcgaacgggtcacgctggagcagtgcatgcaacggcacgtgcggtggcacaaagtgcagcatgcacaaaatgaacagcacgcatttccagggcgagacaagctgaaacaaggcactttccttttgtgccgttcttcgatttaaagtttcttaccacataggtttttgaatgacactcgcgcagtcgtgcaccgacaactgatagcagccgaattggtgccaaaaatgagcgaggatgcacaaagttttgccaccacgctgatgaaacgcacaccgcacagacaaacgcaaggcccggcatactgtagacggcactgtgcctggcgtactgtataaacacagcaaattagagctactcattgacatgttgtatttccgaatttttgcctaatcagaaaaacatataccgtagattttgatgctgtactctcaaaagcacaataattctcacagaaaatagtaatctaatatactttaatacaacacctagtgtattttcttatactttacactctcggaaaatacagtaaccaaagaatactgtattatttatatatgcctgttcatgttgctttgctgccggttgagccaataaaacggtgaactgggccagcaatgcgctgatgtcgagcagtagcagaagcggtagccaacgccccgggggacggctaagggcctagaaaaaatttaaaaatttttttgaattt

SEQ ID NO: 41857 - DNA, 1155 bp, Heterodera glycines
tgccgtgccaagagccactgaacggctgtcctccggctcgacgatcaacggacgtttgccatttttgttcctaaacatttacgggtaaatggaactgtatatgtaggtatatgtttgtaaaatgggaatgcaattcacctttttgacacccaataattgtatatttgtccaacaatttgtgccgatacgcccaaatgtgctgcaacaatcttcacatcgacgtactgctcaaagtgctgttgcatttcagagaggcgattcttctgaaaacaaaatgcattaaataattcaaagacaaaaaaggggttgacattttgtcggggctcgagtccgagttttcgaacacggtcggccaaatctgtttgccatgtgttaaacaaaagccttattccatcgaatccatctcccatagtttgacgaaacaaacattgaatcggaaatttctgctccgttggtgctgtgatcggcttgaatgtttgccacaaaggctgacgtatttgactccgttcagctcgcggtcatcgttttcaatgtccagcacaaaattagcaaattgggcgcatgaaacatggaaagtctcgtcacatttgggatgagtgcatttgatgcaggcacccgaacgagtgtcgcaaacgcaacacctgaaaatgaagggggaaatggcaaaaaaaattattggaattatttttcaaataattggcacgaattctctgctgtacaaaattccacttgcctcgctcgccatttctctgccggcacttcgttgacgtgagtaatcggctcgcgctgctccgcatcgccaaagcgaacctcgatgatgaacagtgcacaaacgacgtgcgcccaactcttaaaatggactttttatttgggaagatttcggatcctgtcgcgggattgggattcaaaatgttgctgactcccccctcctaaaaattcttttataaaattttcaacttaaattttttttaaaacttttcagtgttttaaggggggggggcgacctgctccacaccagggatggcattccgaggccccaaaaattttcggaagttggaaaccgaaattccgggggtcaaaaattttccggaagtcggaattccgaggcccaaaaaattttcggaagtcggaaatcggaattccgtgccatccctg

SEQ ID NO: 41858 - DNA, 1273 bp, Heterodera glycines
  unsure (1)..(1273): unsure at all n locations
cgatgacaaaatctttgtttatgtgttgatgatggatgttacaaatagggttcgagcctggcccccgtcacccccgcctccccgggcgcgggacatggtttttggcctcaccccgcccccgtgactcagacccccgtcttcaaatgctgtattagcctgcaaaattccaaaaaatttcgtaaattttgaacaaatttatggccaaaaaggttggagaatttggttttttgaatttttctggccataacgactaagaaaaaagttatagccaaaaacccgcttgggcccaaacgtgccggggcccaactgacgggttccgtaagaatggcatattcgtgagataaaagacaaaaaacttattcaattttgaattttttaaccaccttgaaccagaaatccaagcccaggcatgaaaaaatgtatttttttaaatcaatttttcatctttttatggtgaaaaactgataaatttttatatggaaatcggatattccgacagtaatgagcaaaattaaaaaacaagcagcttttttgaacatggatgacattctcgtaattaaaattgcaggccctaattttaactttaacgattggattgtgcaaatcgaatggcccacattttgataacaaatggatgcgttggcgtttcaacgttggcagacgctgattggctgaagtgaaattgcagttcggggagacgcgtgcgcttgcgaggaaggccagacagcgaagaaaagagacagttggatggttatggttagacagcgaagagaagcgagagcgaggattttgtggagcagacagtgcacgcggtctgcctctctaaccaagccaataaaattgcagtgatcaaattaaaggcaattaattaattgtttggaatatgctattttacacccaaagtatttaaacattttcaattttttttttgccaatgggacttactcgcttcttccttttaccttttttaggtttttgatttttataatttttggcaatgggcaaggattagaaaaaatgataattaatcatttaattcagcatcaaaaaatcctaaattaagcattccgccactcatgcgcgtttttaaatccgccaatataaatcaacatgcattatttaatgattggcttttggtaaaattaaatttataaaattttattaacttttactttttgctttgaaattgtcattattagggtttccttttttggcacaaaaaatatcgaaatagcacctannaaggcataanaatcgncaaatacctaggcat

SEQ ID NO: 41859 - DNA, 988 bp, Heterodera glycines
gagattttctgggctgtaatgttgtccgtagaagggcgctcgagcggccgggtaaggatagcgagggaagaacgaagcaatttcagtcggtgcaaacccgttgaaatcgttttcacgctccaaatcaatcgcgaatttccacggattgtcccataaacggcaaatcacaatctaatgttccatctgaatagtaataaaatgatcatcacttactctatcgactcttgcatagtaatttctagtcgcacttctattatccaataattgttccagaaatcggcaatatccgcaaactgtacttgaaacagagacatcagctcgtctcaatcctcttcattgaaatcaagcagttcgaaaatgaattagtctttctagaagaatacattgcaggcagaacatcaaaaaatactctcccatcactatcggtgtatccttacaacattctagcaggtctggcgtgcgtggagtctttgacttcatgtccctctcgttagcatacttcgcaaaaaagatcgtaatagtcaaatacatcgcatggacgccaaaaaagagacttttctctatggtaagtgacgcaccgccaaaatagtgatatttaactattatagagacgaacctccaaaatactgattcccagtcacgaacaatgccctccaaaggaaacacttttcatccgaaatgcgttttctgagctcctttcttcaaatcaatcgagcaaaaaaaaaagtttttccactagaaatcggccctagaaataaccaaaaaattctttgaacgaactttgcgtaacaaacgaattgatttgatttacacagcggcccaattttgggctccaagtacaattatgctggatttttggtcttagtggtctgtgagttagtcaccaaaaagtgggtctcaggttcaaatcctacctatgttgtgtgttaatttcaatttcttcttttaaagaagaaggcagaattattttttcattaataaaagtttt

SEQ ID NO: 41860 - DNA, 937 bp, Heterodera glycines
  unsure (1)..(937): unsure at all n locations
attactataaaaattaggtttttgaataattaatgccttttaggggcnactctcatggngganactggcnatgnagtctttgtgtggttaccgtgtattatttatccgttcgagtactatgaaaaagaattaatttgcgtaatttatttatatttaacacttcatatgtttacagttacaagaaatcaataatgagccatttataaatttaatttgtgcctttttaatatagtagttaattgtcatattatattcaataagaataaataataataataatatatttttatataataatttgtaacaaataaaataattaatgactaaattaaattgtatatttagtgaaggtttacatattaaattttttagctttttatcgttttcattgacactctttattaagcctcaattatatattttttaatttatagaaagatttaattaatttttagagtgaccgagcttcccccgtccatgctcaggatcgatcccgactctttgcgaaataaactttatttattactattagtttgtttattgatttgtaaattatattatttgctaaaatggtattttattaaagaattactaaatcgatgttttaaaatttatgataaactaattgttgtatcaatttggtaagtttcattcgagttggaatgtttatatgaaacattgatctattaattatttatgttttggtagattaaagcattttgtatttaatatattttttcaaaaaaatatttttattttaattttaatttaatataatttaacttattttaatgttgtttaaatttttcctttatatttgttaggggtgtatttttggttttttgaaaactccaattagggggtgtatttttacaaaacttttcgccaaaaaatattatttttttccttttggcctccatttttcaaaatggtaaaa

SEQ ID NO: 41861 - DNA, 447 bp, Heterodera glycines
  unsure (1)..(447): unsure at all n locations
ccccanaanngnnngagnaccccaaacggacacangaaaaaancgannnnnnggnnngcggggcagaccccccgaaccgaggcgcccagacacagggggagaccgaagccgcccggaaaagcacccccacagccaggacagaaacccggcgcaggagagaagccccccaaaagaggcggagaaccccaaacggacacaagaaaaaagcgaagacaaacgagacggggcagaccccccgaaccgacgcgcccagaagcaaggggagaccgaagccaacgggagaagcaccccaagagcccggacaacaaggcagcgacggaaacacgcgccccacaacggcacgagaaccccaaacggacacaagaaaaaaacgaggaggaggaaggcggggcagcccccccgaaccgacgcgcccagacgcaaggggagaccgaagccancgggaaa

SEQ ID NO: 41862 - DNA, 843 bp, Heterodera glycines
tgatccaatcgaaattccgttcagcgttctgcaaattttttcgtcactttgtcagacaaaaaattgcgcatcccttgcaacaactcgagcacccatttgcttgtactctgaatttaattaaaccaattaaaaatacaaaaaaggataaaaattccaaaaacccaaattttcaccctttccttttgttcgtccgtctcctccgttggccatccgttgtttaaggcatgccaattgtcccatttgtcagctttaaatttgtataaaaatatctcagaaatgcccttaaatgacttacccccttccaaattgctgggtggctcatagccaagccaagagatccagcagatttcggcttaaatttaatatgtatttaatttactgttcttttcaaatttttttttggtaattaatttgattgtcattttctattttaattatattaatttataatgtatttaaaataccgtcatcgaaattggcagatggaacaactgtttgttgcttcagcttttccatattcggatgatcaacttaaaagaataatctattaaaaatgaattgattttattattaaattaaatttattaaatacatatttaaacaataaattctcccccttccaattcctctgactatgatgccacattttcctcccatatctgctgatcatctgtgatctgcttctgctgtcactcctctttctcaataaccattttatgccaaaagatttcaccaaaatatgccctgcaaatgatcgtatttacacaattttcattttttaaatggttaaaaatgtgtctttttgtcaagagaataatacactgattaaaataatccagaaaa

SEQ ID NO: 41863 - DNA, 935 bp, Heterodera glycines
  unsure (1)..(935): unsure at all n locations
aaaccgggacttaggtactcagttgtacgtgttcttttaagccaggtcccggtcccgnacaactctattcttcaccttttaagtttccgatgttaaattatttctttaggagtctcatattttctttgctttttccactttttaggcaaatcctaaaacaattaaattttctgaacgaaaaatgagaccattttaatttacgaataaaattaaatatacacaaaataaaaatgtacatttgttacctcaattattaattgtgtgaaaatattttaaaacttattcccattaacaatttaaatacctcaaaattgataccaactgttgccttctcttgtctggtgctatcaaacgaacttactgtatttgaaacccaaaaaaaaaaacttcttgaccaggaatggctatctcgtttttctcatttttttaccgtaaaattggtcgcaaaagttgaattctcttgtccggccctatcaaaggatcttacgatctttgaaacgcagaaaaaaaaaattcttgaccaaaaaatggctatctcttttttctcatttttttaccgcaaactgggaaccaacagttgccttctcttgtccggccctatcaaacaatcttacgatatttgaaacgcaaacaaaaacaattcttgaccaaaaagggttatctctttattctcatttttttaccgcaaaattggtaccaacagttgccttctcttgtctggccctatcaaacactcctcctatacttgaaacccaaacaaaaaatttcttgaacaaaaaatggttatctcctttttcgcatttttttaccgcaaagttggaaccaacagttgccttcgcttgtctggccctatcagacaatcgtacgatatttgaaacgcgaacaaaaaaaattttttgactcaaaattgtctatcttttttttctcattttttt

SEQ ID NO: 41864 - DNA, 1285 bp, Heterodera glycines
ttttcgaattttgccgattcctgggcagtgaatgatcgttctttcttgcgcgatccgtgaccgcgggaatttctaaaccatggctacacccctggcctcgcacccatggctttgccattggattaaggtcttagcaaggttctatcggtatattcgttcccttttagaatgtcaaaatgggattgtggtaaatcattttgaaaagcaaggagcaaaaatgatcatttagtgggcctgctgatcaatccaatcaatgatttttataatttttaaattatttccactttctgaccgtgatgatgcgagatggaaccgccgcatgtgattatctcattccgagcagcggtctgcaaaaatttgtgttaatgttcgggctgattaaagcggcgatgagattgggagtcgaagattttcaagtttatactttagactttagcatgggaaccgggtcgtacaattcaatgagtttttgaatgatctcgagacttggaaacgggccaatgactcaaaaatctaataaatttccctaaaagtccagagaagctaatgatggcaagagtcgcgagcagcgaatatgatgaatggcacagtacctcaatttgctcatacacatgcaatgggtccttttcaaggcctcggcaattgaagccaaagtaaaaataaatgcaggcgccggcatcgtacacttgggtgacactgaaagagaagaagcgaaagaaagggcgcaatttcagtaatggcgggactaattaataactgtttgctaatacaccctcttttgaatggaatcattggaaatcgagtataaaaatttatggaaaattcggcattacatccgaaaatttaatcagccatcaaataaattaatgttaactgctgaccggcacgtggccaacaccgggtatttaatgccgtgccgtcgtgcctcatgcaccagcaaagtgcgcacatttcggcacacgtccaacacgcgtgaccttattgataaaacagtgaatttaatccgcaaattataaccgttttttttaccaaggcactgatgtttcaaaggattcaccttaattatggtggtggttaagccataaacataactttgtgatcaaaaatatttgcgggacttaaacttggccacaaaatcccattcacaaatcctaccgatgactgcgtaatccatggccatgtcctaaatttattttttcttcctagccgacaatgtcaatgagatgtaagatgatggaacttacccggagatatgcgatgacaaaagtgagtcgatatccctaaa

SEQ ID NO: 41865 - DNA, 928 bp, Heterodera glycines
ttaattttaagttaatttttttactttatttataattcgaataattcttttacaaattttgctaaaattatagaatcagttttaaacaaacaaaaattccattgtgtagggggaagaggagattttatgaattcttcccgtcataattatcatcataaaatcttattttttcatttgctattttttaaaattttgatacatttcttggcatttttgtgactaaaactgtcggcacaaacaatcaaatcaattcaaatgcatgtgaatggcgctggcggaatggaaaatgaatgaatggacagatgttgattggcttttctttgtttacaatatatgtattcttttttgtttacattttgagaaggaattcctctgctgtttgccgaatttagttgatcaatttcacaataaatatttgcatatttccagaaatgaaagcattattttttagttgaatttaaaaatgcaaaatgcgtaaatgtgtattatataattgtctcatactatatcaaataggttttctcgatcacttgcaatcattgggattataatggcttgtgtttttggtcaacattttttacaaattgctttatctaaaaaaaaaaaaaaaattccagcggcaatttttagcacctccggttccttcccgtaaaaaataattaaaatgaagggcaaaaaattgatggcgaaaaaggcgaattcttccatccaaatctcaaaatcattgtcaaataagtttttcctggtcaaaatttaaaaatgttgaatctaacaaaaaatatgattaaagcactcatggataatgaaaatggtcatttctgctcactttttttacaatatgattaaagttttatgaaaagtgcccattttgatcagccaagggctgattttgaaaattacatatgggaacactggcaaaaatctcaag

SEQ ID NO: 41866 - DNA, 743 bp, Heterodera glycines
cgccctttcggtgtttgccgttgtctctccacgtcccccctaacggagaaagtggtcactctctctctctctgtgcttcattgagagtgcttcttcgatcagtgcgctgtaggtgagcgtctccagcacttcaaatacccactgatcagcccccccccctcccctcagaggtcaatgtttaccctctgccctctcgaattttcatcccctcctctcttccctacccctgccggctaaccccaaagtccactcccaccaaagcggatcggcccgaccagtgctaatttgggatgctaaagcgccctgatgagctgggccggaccattattctccctccgccgattgtttgtgaatgatgaagctctctctctcacaccgcaagggtcccttcccccccccctcccctccccccgttccaggctgatagtctgcccaaccaaataacctctcaaatttcccattaaatttaaaaaacgcgctgaaattaataacaaaatgaaaattttaaaaagaatttttaaagaatgaatgaaaggcaataaaaaaacaactgcacattatgagacatcgaaaaatgaccacaatttccttacaattagcaaagagaaaaggacacagcccaattgagaagatgggtcaaccacaagcacataatcccacaagatcatcccttgcacagcggaaaaagtcaatagcaattggatgatcgaatgagacgaccaaacaatgggaaaaaggggggg

SEQ ID NO: 41867 - DNA, 1087 bp, Heterodera glycines
  unsure (1)..(1087): unsure at all n locations
aaatgattttcgggccgtttgagtatatgtgaggtatggacggtccaaaaaaatggctatcttcttttttggcatcnntggtaatagaaatctctttggaacaatgacagtggctgtcatcagttgttatgctctaaaaatgattttcgggcggtttgagtatatgtgaggtatggacggtccaaaaaaatggctatctctttttttggcaatctggtaatagaaatctctttggaaacaatgacagtggctgtcatcagttgttatgctctaaaaatgattttcgggccgtttgagtatatgtgaggtatggacggtccaaaaaaaatggctatctctttttttggcaatctggtaatagaaatctctttggaaacaatgacagtggctgtcatcagttgttatgctctaaaaatgattttcgggccgtttgagtatatgtgaggtatggacggtccaaaaaaatggctatctctttttttggcaatctggtaatagaaatctctttggaaacaatgacagtggctgtcatcagttgttatgctctaaaaatgattttcgggccgtttgagtatatgtgaggtatggacggtccaaaaaaatggctatctctttttttggcaatctggtaatagaaatctctttggaaacaatgacagtggctgtcatcagttgttatgctctaaaaatgattttcgggccgtttgagtatatgtgaggtatggacggtccaaaaaaatggctatctctttttttggcaatctggtaatagaaatctctttggaaacaatgacagtggctgtcatcagttgttatgctctaaaaatgattttcgggccgtttgagtatatgtgaggtatggacggtccaaaaaaatggctatctctttttttggcaatctggtaatagaaatctctttggaaacaatgacagtggctgtcatcagttgttatgctctaaaaatgattttcgggccgtttgagtatatgtggggtatggacggtccaaaaaaatggctatctctttttttggcaatctggtaatagaaatctctttggaaacaatgacagtggctgtcatcagttgt

SEQ ID NO: 41868 - DNA, 1601 bp, Heterodera glycines
ccataaatctgggcgcatcggctcggggggactgccccgaaaacaaaaaaatcgattttttcaagtgtccgtttggggtactcaaacaattatggggagcaaaaatccaacgcagaattaaagtacaggctatagggaagctattcccgaaggattcggtctccccataaatctgggcgcatcggttcggggggactgccccgaaaacaaaaaaatcgattttttcaagtgtccgtttggggtactcaaacaattatggggagcaaaaatccaacgcagaattaaagtacagtctatagggaagctattcccgaaggattcggtctccccataaatctgggcgcatcggttcggggggactgccccgaaaacaaaaataaatcgattttttcaagtgtccgtttggggtactcaaacaattatggggagcaaaaatccaacgcagaattaaagtacaggctatagtgaagctattccggaaggattcggtctccccataaatctgggcgcatcggttcagtgggactgccccgaaaacccaaaaaaaaattttttggataaaaattatttaaatgaactgaccagataatatttaaaataggttatttctcttcctttcagtatccctgcaaagtttggtgcgcttctgatcagtttctgaaaaaaaagttaagcctaaactttttggcctgtttaaaaaggaattaaaaatttttaaaaaatttattcatctccctttttgatagaaaaagcatcagagtgcctaaactaacatgtaaataaaatttggtgcgtttcagaaccctttctgaaaaaatatttaagaattaattttgcaaaaaataaataaaaacgaaagactcagattttcgaaaatttttttgagccagctagctcggcgctcatttcagggtaagttagtcctttacccggggagtatccctgcaaagtttggtatgcttctgctcaattagcaaaaaatatgagtgatcaaactttcactaaaaagttaagcctaaattttttggcatatttaaaaagcaattaaaaaatttttaaaattttattcacctccattattgatagaaaaagcatcagagagccttattaacttgtaaataaaatttggtgcgtttcagaaccctttctgaaaaaatatttatgaattaattttgcaaaaaataaataaaaacgaaagactcagattttcgaaaattttttttgagccagctagctcggcgctcatttcagtgtaagttagtcctttaccggggagtatccctgcatagtttggtacgcttctgctcaattagcaaaaaatatgagtgatcgaattttcactaaaaaagttaagcctacattttttggcatattgaaaaagcaattaaaaaattttaaaatttaataagtttcctgcaccgaaggtactcactcggcctcttcgcggcctcgtggtgggccttcgcccccccccccctcccacgcccttcagagcacgacaaatatttcaacaaaaattatgaaatcatgtttcccactcccttctcccaggggtatagaaggtaaagtctttttttcccccaataaacttgtcaaacccc

SEQ ID NO: 41869 - DNA, 1245 bp, Heterodera glycines
aaacaatataaccaaaattttaggaaaaatttcttaaaaaattttttttccattttcctttttgatactaaagcttcagagtgtaaattaaagtgtaaataaaatttgggtgcgctttagagcactttctgaaaaaaaatatttatgaaacaaaaaaatcgattttttcaagtgtccgtttggggtactcaaacaattatggggagcaaaaatccaacgcagaattaaagtacaggctatagggaagctattcccgaaggattcggtctccccataaatctgggtgcgcatcggttcggggggactgccccgaaaacaaaaaaatcgattttttcaagtgtccgtttggggtactcaaacaattatggggagcaaaaatccaacgcagaattaaagtacaggctatagggaagctattcccgaaggatttggtctccccataaatctgggcgcatcggttcggggagactgccccgaaaacaaaaaaaatcgattttttcaagtgtccgtttggggtactcaaacaattatggggagcaaaaatccaacgcagaattaaagtacaggctatagggaagctattcccgaaggattcggtctccccataaatctgggcgcatcggttcggggggactgccccgaaaacaaaaaaaatcaattttttcaagtgtccgtttggggtactcaaacaattatggggagcaaaaatccaacgcagaattaaagtacaggctataggaaagctattcccgaaggattcggtctccccataaatctgggcgcatcggttcggggggactgccccgaaaacaaaaaaatcgattttttcaagtgtccgtttggggtactcaaacaattatggggagcaaaaatccaacgcagaattaaagtacaggctatagggaagctattcccgaaggattcggtcgccccataaatctgggcgcatgcttaacttgccagatcggacgggtgcgcatgattccactgttccaagcaccccaccaaaagcaaaacgatataaccaaaatataaggaaaaatttttaaaaaattttttctccattttcctttttgatactaaagcatcagagtgctaaaattaacttgtaaataaagttttgtgtgtttcagagcactttctgaaaaaatatttatgaaattaaaaaatcgatttattcaagtgtccgtttggggtactcaaacaattatggggagcaaaaatccaacgcagaattaaagtaca

SEQ ID NO: 41870 - DNA, 631 bp, Heterodera glycines
ccccccccccccctccccaacttttccctttcctccgtctcttttttgtgcccagcggcatctattctaattaggcaccggagcgacgaagcaatgtcagacgccgaaacgttgtcttgccgaggggatgagaaaagggaaaaatgggaggaaaaaaaagaggggtggagagaaaagagaagggaagaggaaaaggaagagagagggagggggagggggagagaagagagaagaagggggagagaaaagagagagaaagtggaagaggaagagagaaggagggggagagaagagagaagaagggggagagaaaagagagagaaagtggaagaggaagagagaaggagggggagagaagagagaagaagggggagagaaaagagagagaaagtgaaagaggaagagagaaggagggggagagaaaagagaaaaacgagtgagatggaagggggaggggaggcggacgaaggaatgaatagggaagagtcgcgcaggaataatacataacaataaatgccaaaactaataataaataaaattcacgagaatgaaacgggaggaattccttttcagataatatagtgccagtgtgattattttgcgggaggattgcccggggccaatggaccgc

SEQ ID NO: 41871 - DNA, 943 bp, Heterodera glycines
ttaaaatataaccatgttcaatatgccaatgaagaacatcaatttgtagcaggcattgtccattatcgtgtaaattgataccatacacggaatgtacagtagcttaattttcgttaattttattttaaattttcgagaatttcttgcattttttggttcacggtctcgagcataggaaattttcactctagagcagccctaactcctcccaaaaaaagtgacctcaaaaatgaaaaaaagtgtgattaaaatgcatccgttcacaatgtttgttctttcttcaagtgggattttgtccgcattaaatccgtcacatccatacaatttgtcaaattcgtcatgacgaaacagcaacaattccattggatgactttttttaaaattaaaaataaaattaaattaaaactatcaacaaaaatgtgagtgcaaattggtaaagcatgtacaaagcattatttgtgggatataaagcaacaattgttagttaaatcttgtcaaatggaagtccgcttgagaatatgagttgtgtgaatttgcgtgccttttgtaaactttaagtgcgcgacactaaaacgtgaaagtacatgaaaaatgatatccatcacattttgtagtaacagaaacatcatagcaattgtcgtgagaaaaatgtgtgttatatatccaacggattcgctcagttgggcccgtcaggtttgggccggcacggttgggccgacacgtttgggccgaaaatttattaagaaaaaacttaaaaattcgactttttttagcaattttcgtgcctacctttttggtaattgtctaatcgcgaagcaatagcttagaaatagcttctaaacatgttaagctttcgaatgatataaaattgttggatttggttggcaaagaaaaaagttgtagccaaaaacgtgctaaagaccaaacgtgacggcccaactga

SEQ ID NO: 41872 - DNA, 1079 bp, Heterodera glycines
tttcctttctacacaaactgatcatttcacaaattgaggccatccgtccgtgctcggacgagttttaaaaacatttcagatcagccgaaggaaagtgtttgtctctgtgcttttaagagtgatcagactttctcttttcccttccgctttgatcgatttgtcggtggcttaaacgccgcccgtccaaaaggtaattaattaattagtgaaattagccaccgaagaaaaccgccgatgtttggccaatctcggtctaatgaatgaacgaataatttattctctcttctcactattggctataaataatatttttttaaattgccaaatattataaattaaaaagagaaaacagaaattttagatagaattcaacaaaattcgaaagctaataaattaaatcaaaacaaatttaaattttttgcgaattccttaaaaatcactcaaacaaattgaataaattaaaggaagttggggaaaagaaagaaagtgcttttcagggaaataaattaagagaaagagaggaaaggagaagagcatttaaatttaaattgaaaagacattaacacataaaatttaacgatgaaatttttaaaattaagccaaaaagtgaaaaaaaatgaaaaagaaattatcaatcaaaattatgagaggtaattaattaataggtgcaaattatgtatacaggaaaatgatcaaaattgaccaaattataagtgattgatcaaaatgaaaaattaatgcaataaaaaaatgcgtgctcattcttcgcatgtttttgatcaaaaggcagctgctgatcaaatgcaaaagtgaaactttgaccattagcagctgatcaaattgagagagcagaaactcaaatttaaaagtgatttttacaaaaatattacaaataaaatctaaattttcgttttttggattttgggtggtccttccgtccgtccgttcgcttttcaaatgggcgccaaatttgcggtgttaaattgttgggaccaaagtgttattatttttcgtccgtttgtgtgccgccctctctttttgcctatcttcggcttaacaaggccaatttgccaaaggcg

SEQ ID NO: 41873 - DNA, 924 bp, Heterodera glycines
atggtaaatcaatgactaacaaatttaaatgatctgaccaattaaaaggctactagaattgctttgatatcaaatccgaatgattaattaactaaattgattgatgcaatgatgacaaaacatttgtgcgcagtgtcaatgcctgcggcgattatcatgatgccattgcgcacccaatggcattttggcgagagcatcagcaaatccaatgatgagcgcatggagtggatggaaatttgctgatagaaactctccgtttttggcattccgagcgctcgcagccgtttgagtccaatgtggcaacagaccttttctaggaatgttgtcctgttttccaactaacttgtaacctctagagtctctgtttagagtcttgacttgataaaattatgacttatgggtctcgagtttcgggaaatttgcggtctcgcaaatcgctggagagtgccataacggggccagcagcaggtgctttggtttgtgaactttcaactttttatactaattattttatatcgattttgtccagcataaatctaaaattgtcagaagcgcaatagattttacaggtgtaattgtgaaaaaatgaggacctcattttaattgtatatgtaaatttttgtttttatacattttcgacattttttttatcattttctgtgtatatttttccgaaaaatccaaacccagcagaagggactcacttgtccccgctctcagctgaacaccaccaccaccaacaacacataggtggtgtacatactctgctggaagttcacatgcaaatccaacaattgaattgcactgggttttaagaatgggtgtctctcccgtgcccccccccgcccctccacgtcctccgtcggttttgctttacctcataaaatcaattttcatcccctcatccccgaacgcactcttttt

SEQ ID NO: 41874 - DNA, 1337 bp, Heterodera glycines
tgcaaatcaatttcatttttatttgttatattgattttgcatatttgtatattaataacattttattgacagaatatttattttttaaatgttgcactttggttgctctattagctcataaaactttcagaagatttattgagtttaaaaaagttgtaacaaaaaaaaattgccataatttatagaaaactataaaaaaaatttctattttattttttgatggaataaaatattctttttagtatttctttaaaataacttttatatttctaatttcttatcctcgttcgcgtcccacggtctaatcccaatttaagaatatagcaatttattatgtgtactaattatattgaatgcaatttaaatttactataaaaataaatagctggaagagggaaatatttaaaatcaaacatcagtttttgactcaaattattgtatatatttttgctattctattctattcgctttgtaaggtgaaatactaagtttatcatctttgtttattatttagagttagttattcagcgctctaccacaaaaaccaaaaatttagcatatttagtcgagatcctagtatgaatatcttttttatatggaaatctgcaaaatttaattttaaatagcaattaaaatatatattaatcagttatcagcaataaataatttaataaaaataataccaaaataatttatttttcaaaaaataaaattcaaatttgtccaaaattttgtagcaatattaatttaaattatttaataaaataaaaacataaaaatataaaaaataatgctttaaatgcataaatagctggtttcaaaaaaatttattaaaatttaaaaacgatttaaataaaacaattataagaaatagaatccaaggttaaacgaaaaatgcaatgcgatttcggagagcatgaaaatgtcaggcatgaagaaccaaaagccataaaaaatttaaagtcaaattactattgaaatgaaagcaataatattacctaaataataaatatcattgataatagttgaaaagagaaatttaaggccaagaatagaaattagccaaaaattttaaatttatttatacaaaaatataaactcaataaaaaaatattttataaaatttttaaagcctacttttctgaggcgtaaattccgaatataggtagattttttggacacctctacgacaaatttaaggggcggtatgagcgctccccccaaatatttgaacaaaattttgttctattttagcttatgacataaaatatataaattgggcatttatatcatataaaagcaatttttattaaactttttatcagttcacgcgaaat

SEQ ID NO: 41875 - DNA, 869 bp, Heterodera glycines
  unsure (1)..(869): unsure at all n locations
acaattattaaacgactcagggattctaaagaaaaggctatatatatgttttaaagttttcgttacactggtactatttaacacggcgagtaaattttgggctctcagtccttatataaaaagatgaatgtgtgtacactatgggtacgccccagtgtccgacaaaattgctcataacgccaaatagcgcatttggcgtaaatttttgcgcgttaattcaaaatttacactggaaaatgccttttttgtattttttattttgatctgccataactcgcttcattcccaactaaactgaacaaaattggtatctaaaaaaagattttgaaaaggagaatttttttctaagcgaatgttaagtaatttgtcatctcagaaaaaagttgtgggaatttcaaacttttatcatgttataactcaagtcctaaactgctgttttcaccaaaaatgctaaaactattaatttctctattgattctaaatgttcaaagtgattttgtatccttataaccaaaattgttagcatttacgaatttgatgttttttcatgtgttagagacatgaaaatagtacgccaacacgagaggaaaaagaaatacgtttttattataaatttataacttttgatttggactatagacaaaaatgaattcactatagaaagatgcagaattcttttctctatcgctatgcaaaatttggtgtggatttaacaagtaggaaaaaagttaaacaggatgaaatgaatgttgctttttacataattanaatgaagagatagtacgccaaagtgagagaaattacaagaanaagagaaacgacgagatagtactangcttttctctgcacagtggggcgtacccatagtg

SEQ ID NO: 41876 - DNA, 1192 bp, Heterodera glycines
attactatgacaagattaaaaaattaactttacactttctatgaaactgttaaataaataagtagacaaaaaaattattacaataataataatgaagtttttttgcttacaacttaaagttaaaaaaattgtaatttaccatttcttcaaaaacctttttttaaatatcataaaaatgaaaattaaaatttaacaatattttgtatattttaaaagcaaaaataccaaatttgtaacgccaaatgtaaattcatatatttagagcactcacaaatcattccttaatcattcattatgctattatcattaggttaccctatcaatgaatttttttctatatttgcgtatttccatgttttgacgtaaaaatgtgatcttagtttatgtgttttatgtgtgcttatccattataagaattagattataaaatttttcgtgtttttatcaaaattccaaaaatttagaaaaaagcccggtcccggcgggtacccgataaaaattttgaacagggcccgggacgcccggtaaaacgagcttttttgaacgggcggccatgtcccggtaaaaaaaaattcagaaaaaagaaaaaattaataataaaaaggaaagaaaaataaaaaaactttttccgggcccggttccggccggtactttcaaaattccggtctctaattctttagaaaaaaatatacataattataatttaggaagtaaattaatgcagcaaaaaatctttcaagaaaaacattattatatcgagctaatattaattcaataatcagattttaaaattaaaaaattcagcaaaataaaaggaattaaatagaatatttcataatgcacattaaatttatgaaaataatgaatatttatgaatttattagaaaataaaaggtacaagagtaaaataaaaaatatattaaaatttataaaaatcagtgactaatgaataattttaatcacataatttaaacattctttctgcagaaactatccattctgcaaataaaatgtaatataatataatttggtagaaattccatatcaaaataaaaaattggaatatatttaatttaaaaattagttaatatttataacaaatataatatctggcgagagtaggcaccaagcagatgagagtggctgtacttaagaacaagagagacacgctgtgaaagtggcgaggtctaat

SEQ ID NO: 41877 - DNA, 1084 bp, Heterodera glycines
  unsure (1)..(1084): unsure at all n locations
aagatgcgcataaaggccttaattaaacacaagaacatattcatatattttgtgtaattctatctcggactcacttatgctcaaaataatgagtttaatgcaaaaaagatttgagtagcggatactacgaagatattttaaaattttcatctcttaattattttaatntaaaagtagttatactttttctgtctgcagctgtttgactttgaatactgcggagtaaaaataggaattttttcttttcactaatagaggacaatttttggcctttcttgattagctatcaactcgcttctattattaaagggttaaaagatgcgcataaaggccttaattaaacacaagaacatattcacatattttgtgtaattctatctcggactccctcctgctcaaaataatgagtttaatgtaaaatagatttgagtagtggatactacgaagatattttaaaattttcatctcttaattattttaatttaaaagtagttatactttttctgtctgcagctgtttgactttgaatactgcggagtaaaaataggaattttttcttttcactaattgaggacaatttttgttctttcttgattagctaataattttgaaaattactcaccaattaaaatatacttgcatttttcaaaagaggtattcataattttaaaataagcacatatttatagtgagactgttttcaactcgcttatattattaaagggttaaaagatgcgcataaaggccttaattaaacacttgaacatattcacatattttgtgtaattctatctcggactcacttatgctcaaaataatgagtttaatgcaaaatagatttgactagcggatactacgaagttattttaaaattttcatctcttaaaattattttcatttaaaagtagttatattttttctgtctgcagctgtttgactttgaatactgcggagtaaaaataggaattttttcttttcactaattgaggacaatttttgttctttcttgattagctaataattttgaaaattactcacccaattacaantatacttgcatttttcaaaagacnngtattcataa

SEQ ID NO: 41878 - DNA, 957 bp, Heterodera glycines
  unsure (1)..(957): unsure at all n locations
agtaattatcaaaatgacatgatatanncaaatattnaattaaaataaaaattaaaataagaaaataatatgaaaggagatttagattaaacaatttttttattaaatattagattgaactttagaaaatggatgatcaaagcacttaaaaattgataaaggaaatgcaaaagaaatagaaaagtaaaaaattccatgagcaaaaaatattttaatttgaaatcattaatactaattttaaaactacaataaatattatatcatcaattttataaaaagaattaccttttattaaaaaacggtctaatataaaatattacttaaataaatactattaactatttaattgaaaaccgttttcaagaaatggacgaattgtcattcaagtgcaataaacaaagggaatgcgcgtgaaatttagccacatgaaaaattaaattaataggacttaaaaacatataataaaaattgatgaagaaaataaagtacaacagtgattaaggagctagaagcaatgaaaacataataaatcataaactggtctatgttttaactttttcaaaggctataatttcccaaatttgtacactttcgtgatttaaaccggttcaaaaacaggtttaaacgctttatattttcatagggaacatgtttcgcgcatttggggcatagccagaaattatcacaaaatgatgtaccgaaatgcaaaagactgtgctttttacacctcttacaaatctcgtaatgacaggggcagtaatgacaacacttaattttatgtggacagttcattttttcaatttaattttatttttggttgctatttatagaaggggtatataaagggagtgaaaggaccatttgattggtacattgtatcaaaaattcaaaaaccgataatcgtaaatataattgctctcactaatctcggtaccggaattanactaaactctctga

SEQ ID NO: 41879 - DNA, 1011 bp, Heterodera glycines
  unsure (1)..(1011): unsure at all n locations
tattttgattatttttcttaattgcgagactgaaaagtgaaaaagcttcttactggcaagcaactgtctgatgcttgacggcgtctccggtccatcatcggcagaagaagtagcttctaattagacaattatggttatttattctactttaattagtttttttttttttaaatataattagggagctaggtttttcccattttacaagcctaataagaacatgaataataagaaattgatcaaaactcttgattttccttcttttttataggatcttacttttttaagttctaaacccattaaaatttttaaagatatttaggttttttagttcttgtatcccacccatttggcagtttttggtgccaaaaaattcgttcctcaaattttacaccgttttttttaaactgcaaaatcatagtttatgttcagtccgaaatatttttttatattcaattatttcaacttactggaagaatttttcgtcaattcttttgatctaaaacttgttgatgatgtatcatattcagaagcactattatccacttcatcatctacaaataaatatattattaaattatgttttttaatttgattatttttaattttacaaaaattgaattaattatttattactgttaagcatatcaataataggcgtggtgttgttcatgattttctgttccgttacattttctgtttcttgaccatttattttgacagatttgttttcaaagtcaatcttaaacattttaaaatttatatattatatttttattgaaacattattatttttaccaaaaatttattttcgtcgctttcattggcaaagaaaattttgtgtttactttcaaataaaacatcaaatttttttctgatttgctcattggtgaatgtttcctcaccaaatttgagttgtgttggagaatgaatttttacgaaaattntttcctttatttcattttctgcattttgcttaatttctcnngcacctaaaatatttataaattt

SEQ ID NO: 41880 - DNA, 559 bp, Heterodera glycines
  unsure (1)..(559): unsure at all n locations
aaaacctcacaaatcgagcgtttaggataaaattatcataaaaagaaaccgctgggccatgcagaccaaccgctcaaaatttccgatggcaacccattgaaattggtgccctctccacaatgtttgcttttttccctggatacgaccccctaaaaactagcggatggtgtcaatcacagtcattattaataattattattagtatccaatttgttgcgctccgccgtcccctaggccgcccacgtcggcatcgtcgtcgccgtcgtagtccaacaggtcggcatcatcgtcaaagtcgtcgacggcattgttgttattgttggcaccgccgcccatgccaatgccgtccattggcgacgggcccaagcccagcaaaaatgggtccgccgatatggaccaccggcgcacaaattggacacaatggaagaggaagaaggcgctgaagaacaggacgaagcaggcgcagaacatcagggcgtaagacagcacggggtactcgctgancaacgcgctcacaatggtcagatgggtgcgcacgcgcaaagtggcggaggaaagc

SEQ ID NO: 41881 - DNA, 706 bp, Heterodera glycines
atttcaaaattttcaaatttttttattttattttcttcaaaacggttcagaattcaataaaaaaatcactctcggggtgaaaaaaggggttttagaaatttttaggggaaaaaaaacttttccaaattaatcccctgggagaagggagtgggaaacatgatttcaaaattttcaattttttctagtctaatctactcaaaccggttcagaattcaataaaaataacattcacggtgcgaaaaatggggtatgaaacgtttattggggaaaaaaagactttacaaaataatacccctgggagaagggagtgggaaacatgatttcaaaattttcaattttttctagtctaatctactcaaaacggctcagaattcaataaaaataacattcacggtgcgaaaaatggggtttgaaaagtttattggggaaaaaagactttacaaaataatacccctgggagaagggagtgggaaacatgatttcaaaattttcaattttttatagtctaatctactcaaaccggttcagaattcaataaaaataacattcacggtgcgaaaaatggggtttgacaagtttattggggaaaaaagactttacaaaataatacccctgggagaagggagtgggaaacatgatttcaaaattttcaattttttatagtctaatctactcaaaacggttcagaattcaataaaaataacat

SEQ ID NO: 41882 - DNA, 934 bp, Heterodera glycines
cttatgaattattttgcaaaaataaatattaatgaaaagtcagatttcgaaaaattttaaaacaacaagcgttggcattttttcaggttaagttagtcctttacaatggagaaggcctgcaaaatttggagagattatatcgatgttagtgcgctaggttcgatgaaactttttaaaatataagcctaaactttttggcctgtttaaaaaggaattaaaaatttttaaaaattttattcatctcccttttgatagaaaaagcatcagagagccttatttaactttaaattaacatttggtgcgtttcagagcagtttctgaaaaaatatttatgaattaattttgctaaaaaaataaaatagtgaagctttaaaaattaataaaaaattttaaattcagaattactggagttagcatcatagcagtgcttttccttgtctttttgatgctctcgcaaaatctggttcgcttctgatcagtttataaaaaaaaagttaagcctaaaatttttcgcatatttaaaaagcaattaaaaatttttagatttttattcatctccctttttgatagtgaaagcatctgagtgcctaaaataacttgtaaataaaatttggtgcgtttcagagcagtttgtgaaaaaatatttatgaattaattttgctaaaaaaataaaatagtgaagctttaaaaattaataaaaaattttaaattcagaattactggagttagcatcatagcagtgcttttccttgtctttttgatgccctcgcaaaatctggttcgcttctgatcagtttataaaaaaaaagttaagcctaaagtttttcgctcgtttaaaaagcaattaaaaatttttagatttttattcatctccctttttgatagtgaaagcaagggagtgcctaaactaacctgtaaataaagttttgtgtgt

SEQ ID NO: 41883 - DNA, 1438 bp, Heterodera glycines
cgatttttaggtttttacatatttttttcctgagctccccgtggcctgaaacgcacgaaaaacatgtttttttgggctgttgttaagctacttttcgagttattagcacctattttctaggtttttatttttagcacctaaaaaacctaaaaaaattttaaaaaacttattttcacctattttggcattttgcccaaaatttgttaacaaaaatgcaataaaaaggaaaaacagacccctaagaatcgaccgaaaatttttttcaaaaaatatacccctaagaatcgactcgaaaattttcaaaaatatacctatgaaaaaagaaaaatttctcaaaaatcatctccaaaatttatttgtttattttcttggcgagaattttttattttgaaaattatctatctcattaatgatttggcataatatttttgctttttgaagaaaattttcgattttacaccccaaattcggaactttttggcacctattttcccatttttagcacctattttgggggttttttagaacctaaaacctacttattttggcagtttttagcacctaaaaatcgaagccctacctataacccttttgaatttaaattaacttaaaggcaaattgtatgaaaattaaacagattatgtaaaaaaagaagagcgtcggggtcggggttaaccccgaaaaatggccaaaaaagtcgggggtcggggcggggtcggggacgcaaccctaatttaaaagaccaaatcccgtaaaaaatttttttgttccaatcccaacttattctcaaattaaaatttccatgctctaatatatatatgcacataaactaaaaattgcttttaaacatgcaaattttttcagctaaaacattttacaaccaaaaaaaaaatggttcgtcttattcaaaaccaattttggcggggaacgttgacgcagccgtggggtgtcaagatgttcaagtacatttggcgcaagcacagtcgttttttggtgaaaactgttatggtcagttttcgtttttatgacccatttaatttttcaaaatttcttttttcatcccattttaaggtccaagacaatgacatcgacagctcgtttcatctactgaacaggttatacacacattgagtaaatttagctcattctctaaaaaatattgaatttttttttttgccgaaaagtttaaaaaaattagacagactcatattctcaaaatttcgggggtttttatggctaaaaccaaaaggatggatgggaaccgcccatttttttctgaaagggtctcagattcgtgaattaaccaaaaggtttccctcttcgtgttatgacttttacggtccgacattttcgcctttgtccaaaattggcttcaaaattaagttttcaatccctaaagaaagaataagatttattaattttatgctgtttaagctat

SEQ ID NO: 41884 - DNA, 896 bp, Heterodera glycines
aaaaagggggtggggggaaggcccaccacgaggccgcgaagcggccgagtgagtaccttcggtgcaggaaaattattaaggaagagagttcattatttatttgttttttgcataattaattcataaatatttttttcagaaactgctctgaaacgcaccaaattttatttgcaagttattttaggcactcagatgctttcactatcaaaaagggagatgaataaaaaatctaaaaatttttaattgctttttaaatatgcgaaaaattttaggtttaactttttttttataaactggtcagaagcgaaccagattttgcgagagcatcaaaaagacaaggaaaagcactgctatgatgctaactccagtaattctgaatttaaaattttttattaatttttaaagcttcactattttatttttttagcaaaatcaattcataaatattttttcagaaactgctctgaaacgcaccaaatgttaattaaaagttaaataaggctctctgatgctttttctatcaaaaggatgaataaaatttttaaaaatttttaattcctttttaaacaggccaaaaagtttaggcttatattttaaaaagtttcatcgaacctagcgcactaaaatcgatataatctctccaaattttgcaggccttctccattgtaaaggactaacttaacctgaaaaaatgccaacgcttgttgtttttaaaatttttcgaaattctgactttttcattacttatttattttttgcaaaattaattcataagtattttttcagaaagtgctctgaaacgcaccaaatgttaattaaaagttaaataaggctctctgatgctttttctatcaaaagggagatgaataaatattttaaaaattttttaattcctt

SEQ ID NO: 41885 - DNA, 1142 bp, Heterodera glycines
gagaatgcggttggaattcctagtactgttgagcagaaaaagagatagccaatgatccaaatttttcccaaacaaacgccccgagaaacaaattccagaacaattagtatcggcgtaattattctgagaatgcggttggaattcctattactgttgagcagaaaaagagatagccaattttccaaatttttcccaaacaaacgcgccgagaaacaaattccttagtatcggcgtaattattctgagaatgcggttggaattcctattactgttgagcagaaaaagagatagccaattttccaaatttttcccaaacaaacgcgccgagaaacaaattccagaaattagtatcggcgtaattattctgagaatgcggttggaattcctattactgttgagcagaaaaagagatagccaattttccaaatttatcccaaacaaacgcgccgagaaacaaattccagaacaattagtatcggcgtaattattctgagaatgcggttgtaatccctattactgttgagcagaaaaagagatagccaattttccaaatttttcccaaacaaacgcgccgagaaacaaattccagaacaattagtatcggcgtaattattctgagaatgcggttggaattcctattactgttgagcagaaaaagagatagccaattttccaaatttttcccaaacaaacgcgccgagaaacaaattccagaacaattagtatcggcgtaattattctgagaatgcggttggaattcctattactgttgagcagaaaaagagatagccaattttccaaatttttcccaaacaaacgcgccgagaaacaaattccagaataattagtatcggcgtaattattctgagaatgcggttgtaatccctattactgttgagcagaaaaagagatagccaattttccaaatttttcccaaacaaacgcgccgagaaacaaattccagaacaattagtatcggcgtaattattctgagaatgcggttggacttcctattactgttgagcagagaaagagatagccaattttccaaatttttcgcaaacaaacgcgacgagcaacaacattcagaacgattagtatcggcgtagttattctgagaatgcggttgtaatgcctattac

SEQ ID NO: 41886 - DNA, 1001 bp, Heterodera glycines
aagtcaagtccagaaaggaatattttaaaacgatttctgttttgttttggcattatgataccgaataactttcggaaattatggaaacaaaattggagaaattcgaataattttttgactgcaaatttttttccttttttgaattgggttcaaaaaaattttaagagaatttttgattattaatttgaagtcttgaatttatttgacaaatccaagacttaaaactgggagaagcaaggggctgtggctgggggcctaaaatttgggccacattggagaattaattctgatttctgaaaaagtcccagaaataactattttttctttccataccttcttgtagagctcgagctgctctttccaatggtcttatcccggtctcgatccgtgccgaactcacaaagttatggagtgaaatgtgaaatattgttttcaccacaaggcattttttctgaaaaccggattcaaaaatctggggtttggtataaccgttttagaaatagcgtagaaaacagcttcgatatcaagaaaccaagtcaagtccagaaaggaatattttaaaacgatttcgttttgttttggcattatgataccgaataactttcggaaattatggaaacaaaattggagaaattcgaataattttttgactgcaaatttttttccttttttgaattgggttcaaaaaaattttaagagaatttttgattattaatttgaagtcttgaatttatttgacaaatccaagacttaaaactgggagagaagcaaggggctgtggctgggggcctaaaatttgggccacattggagaattaattctgatttctgaaaaagtcccagaaataactattttttctttccataccttcttgtagagctcgagctgctctttccagtggtcttatcccggtctcgatccgtgccgaactcacaaagttatggagtgaatgtgaaatattgttttcacccacaggcattttttctgaaaacggattcaaa

SEQ ID NO: 41887 - DNA, 718 bp, Heterodera glycines
ctgctgtcggttggtgccttatgtgctgctgccattggctgctgatgcttaaatgaacccaatccgatgcttactttccccctccgtcaatcgctccccccccccccccctcaatgcttaaatgacttttgtccgccgtccttcgccttaaccatccctctccctccaccccaccaaatgctcgaaatcccatttctttaggttgagacgggggaggaggaaaactgagaatggcaaaataagtctcagtaagccgctcagaggtgctcaaagaagcagcactacttggccaaaaatgtaaaaaagcaacttctctatttttatataaaaattgtaaattaattcaattaaggaataattttaggaatcattaagcatgaaaaaaacatgtaagccccaacatttttttctatccgaaatatgtcctccaccatcccagaacataactctttttgccaatgtgagcaaagcgcccgaggggatgcaattgtgtggtgccggtgccgttgtgagtgccgcccgccgaaaagactgatgggaagggtcggtcggtcgaccgacggacagataatcaatccctcctccccttggccctgctcctcttcttgccctgggatggatctgctgctccccgtcccatcccatcagcccaaacgatgggctgtaactctcccaaaacttttttttttgtctgtgtcggtaagaacgacagcgaaga

SEQ ID NO: 41888 - DNA, 876 bp, Heterodera glycines
  unsure (1)..(876): unsure at all n locations
ttccagaatttctggaaattttcgatttttcagaaactctttaaaggtgccttctgaaaagctatncgggaaaagnaaaacataaaaaaaanccgcaangnttttctctataatataaattttattttacatttttatcacatttaaaaaaaagatacaaaaataaaagtgattttggggttcgggaccaaagggggtggacagaaaaaacaaaaaaaatatttaaattaaaaaaattagaaaaaaaaactttttttttaataataaaaagaggcatggcaagttcgaatccgggcggtgtatattatttactatgtatttttggattatgtttaatgtttaaagagtgtttgttttcttaataaaaaaataaaaatttttaatttaaattaaattgttttttttagtgaaaaatttaattaaaattaattattatttttttaattaaataatttcatattttttttgggggggggcaagttcaaatccacacggtgtacattatttttctgtgtttttgggttaaatttcattgctttttattaatttaaacgctttattttattaataacaaaaaaaaattaaatttaaatttattatttttggtgaatgttttatttaaaattaattatttattaaaattaaaaaaatttcatgttttaatttaatttaaatttcatttcaatttcaaatattctataattctatatgctttatagtttatttttaataaagaaatggagaattattttgttatattaaaaatattattaatattcaatttctcttttttttaataaaaccatttccttatttatttaattttgaactatacttcttttaaccataattgtactcttccaatcactgttttac

SEQ ID NO: 41889 - DNA, 911 bp, Heterodera glycines
tttgcagcaaaaattattcgaatttctccaattttgtttccataatttccgaaagttattcggtatcataatgcccttacaaaacgaaatcgttttaaaatattcctttctggacttgacttggtttcttgatatcgaagctgttttctacgctatttctaaaacggttataccaaaccccagatttttgaatccggttttcagaaaaaatgccttgtggtgaaaacaatatttcacatttcactccataactttgtgagttcggcacggatcgagaccgggataagaccattggaaagagcagctcgagctctacaagaacgtatggaaagaaaaaatagttatttctgggactttttcagaaatcagaattaattctccaatgtggcccaaattttaggcccccagccacagccccttgcttctcccagttttaagtcttggatttgtcaaataaattcaagacttcaaaataataatcaaaaattctcttaaaatttttttgaacccaattcaaaaaaggaaaaaaattgcagtcaaaaaattattcgaatttctccaattttgtttccataatttccgaaagttattcggtatcataatgccaaaacaaaacgaaatcgttttaaaatattcctttctggacttgacttggtttcttgatatcgaagctgttttctacgctatttctaaaacggttataccaaaccccagatttttgaatccggttttcagaaaaaatgccttgtggtgaaaacaatatttcacatttcactccataactttgtgagttcggcacggatcgagaccgggataagaccattggaaagagcagctcgagctctacaagaaggtatggaaagaaaaaatagttatttctgggactttttcagaaatcagaattaattctc

SEQ ID NO: 41890 - DNA, 718 bp, Heterodera glycines
  unsure (1)..(718): unsure at all n locations
tattaattaatttaaaattaactaatttattaaaaaaaaacagttttttttttaagattagagtcataaaaaaccaaaaaaacctaaaaattatattttttattttttggatctaattaattttttttcctaagttatctcttttggaaaaaaagtaaaaaagattaattagatcccttttcattttaatgtaataattatatttttgtaaaaaaaggttttatttaatttttataatatcttaatgttaataagaagtttttaatctttttattttttgttttagttttttggtttatctctccgttttctttctgtttcccttctttttttcgttggttgcttcgtttcttntttgtggtctttgtcccgttcccgccgcctcggctctgcgttttttccttttttcctttgggtttttgggtttttttccttttttctcggttttttgtcttttgtttgggctttgtttttttttgcgtcccctggccctccgtttcttttttcttctcctgggtttggctcctgttgttttttcttttttcgttcttgcgtggttttttttttttttttggccggcttgcgttggcgtttctcttttttttttggcgtttgttcctttgtcggggcggcctccgtttttgctttttttttttttttctgtctgtttctcttttttttttctttccccncccctcttttttttttcctttttttg

SEQ ID NO: 41891 - DNA, 751 bp, Heterodera glycines
  unsure (1)..(751): unsure at all n locations
gatgataaatcatgtatgactcatccttcgtcatcagcatcatcatcaattagtagttccccaattcctccccctcccccggctgattattatatattattattactattttctttgtcgtcatcgccggccggccgccgacgcccgggggggggggcgtctccctccgcagccgccccctcaaaaagcggcggtgagtgcgtctgatgccccaaatcagcagcagcaccacacagaaaattataatcctctccaatcgctgtgtttttcctcaaaaaatcagcacagcccctcccccccccccctctcctcaatgaattgtttatttatcttccctaagtattagggggggggggagttccatatttggccatataggcctgagattttgcgggtttccacactgttcgaaagtctcggttttggttctataggtgtgaaatctctctggctttttggtctcttaaaattaaattttgatttcaagttttttgggatgggtcaaatcagttttttgcgacgactaaaaaaatttttttttgaataagcaccgtcgggggaaaaattgagaattttgactatttattggactctcgagtaggcccatcttaccccctgttaccgaccacaattaggcgcctattttttctagaaatttctgcaaactgccaaaatcattaattaagtttttttatatttaaaaaantaataaatttttcaaccatttttcgttttttcatcgcttttagcc

SEQ ID NO: 41892 - DNA, 987 bp, Heterodera glycines
cctaaataatgggggaaaaatggaaaatatttgcccaatctattaaaaaggaaaggacagtttggaaattgtgtgcacaaaccttctgtaatgagcacgatgtatctgcaaattgcatttttgaatcgacggccccaaacaaaataaaatgggaagccaaccaactttcttttcccgtccgtccgttcccaatagtcgtaaaatttgacaatgttcggatgttggaggcccttcagcatttcggcttcctcccgaaaccgctggcgctccgctttgttcaacttttgttcctgcaattcacaccaagcgacagcaacacctgcagaaacgaatgaattgtggagtgatgtgatgccaatgtgaacaattgcatttgcctgtttcagtgtcaagaccccggtaaacagttttgaacgaaccgcgacccaattcctcatcaaatttcaaaaatcggttatctaaaggatcgatttgtggttgacctttgagccattccctcccgctaattaccaggcgatttgtcaatgggcttttcctcgtcatagtcctcgtcgtaatcctcagcggattctcgtcgtgattccgcctctttcttgacctcgtctagctctagcgatgtctgtggcttcaaagctgtcgatggtattggcacttcttcctccacttttgcatgtgcgctcgcaacaggcaaaaaaggaggcgttggttctggtgacatttcagcaacggggacggcattttcgatggactcggtcggcacaactttggcaggcaacgcagagccagcaaaggtggcaagtggcaacggcgacttggcagcttcgacagtgaatttggaacggacggagggaggagcagtgtccagcgagggatcaacgacgggggcaggaaaatgcaactgaaaaagaacaaagggagtgagacgagaacctcgataaataggcaagacaaaatgatactttttggcgagattggttttgcctgttc

SEQ ID NO: 41893 - DNA, 844 bp, Heterodera glycines
ggcgagcacatacataaaggcgagtgaacaacggcaaatggccgggggatgggctaagggaaggtaatcacccgagggaaagtcgaacaaaagcacatcgcaatgtcaaatggtcacactaattcaggaaatgaaaaggatccaacccgagggtccttaccgactgatcggctattcctacggcgcttgcgttggctttgagatggccactcaactccaacgcagcgatgggaacgaaagtgtggagaagctgattctgttggacggttcccacctttacatgcagacgtacagaaacgtgagtgaacgaagggagaagcagtttctcgtggctttgctcagaagctcaacaaatgaattcttaggtttaccgcgttgcgtttggagtcaccggcgacactttggtcaacaatccgttgttcgagtccgaaattatgtgtgccatgactttacgcttcgccaacgtcgattacaagcgtttccgcgtggaaatgctgcagttgcccagtttcaaagagcggctccagcgcgtggtggacacggtgatgggcactgggctcttccagcggtcggacacaatcgcattcgcagtggacgcaatgcgacacaaatttgtgatggcggacaagtgagtattgctgcttgttggccattcccggcattcgcgacaatttataatcacttctcaggtacaaaccgaaggagactttcaagggccacataacactcgtacgcgcggaacaaggcgcggcacgggaagaggacgtcggcaaggactacggcatcggacaagtccgtttagcgcattattccgttattattaaaaactaggggttgctccccg

SEQ ID NO: 41894 - DNA, 1126 bp, Heterodera glycines
  unsure (1)..(1126): unsure at all n locations
aataaaaaagtagctgtattaaaatttttttgataaaataatgnnttgtataattatctttatttaactgtttgttctcttttgttgaaggaataactntaattttggctntcagaaattactntagttggtttctaaaaatgacgcttatacagttttgaatctgttaaatgaattagtatcaaaaattatttcatttaaaaccgataattcataatgagaatgatagcacccgagtttctagagagaagcattagagttttctagaaatatgctggcacccaaccacaggcactaaaggaatatttttacgacggcatttcttttttcccatgaagaattggcactaataaggaatattgaatgttttttaacaccactaagcaaataataaaaaagtagctgtattaaaattattttgataaaataaattgttgtataattatctttatttaactgtttgttctcttttgtttgaaggaataactttaattttggctttcagaaattactttagttggtttctaaaaatgacgcttatacagttttgaatctgttaaatgaattagtatcaaaaattatttcatttaaaaccgataattcataatgagaatgatagcacccgagtttctagagagaagcattagagttttctagaaatatgctggcacccaaccacaggcactaaaggaatatttttacgacggcatttcttttttcccatgaagaattgacactaataaggaatattgaatgttttttaacaccactaggcaaataataaaaaagtagctgtattaaaatttttttgataaaataaattgttgtataattatctttatttaactgtttgttctcttttgtttgaaggaataactttaattttggctttcagaaattactttagttggtttctaaaaatgacgcttatacagttttgaatctgttaaatgaattagtatcaaaaattatttcatttaaaaccgataattcataatgagaatgatagcacccgagtttctagagagaagcattagagttttctagaaatatgctggcacccaaccacaggcactanaggaatatttttacgacggcatttcttttttcccatgaagaattggca

SEQ ID NO: 41895 - DNA, 1020 bp, Heterodera glycines
agtttacaatataaagataatattaaaggagcaattagtgaaaatgcatataattagaaatgatctgctggcgattgatagattgtacaaaagcgaactttgagactgaaaataagtcaaataattacatattaaggagctttagagaaaatctgccactcattcactaaaaacacataaatgagaaaatgtaatgaatacaacacgtcaattcaattaaaaatgtaaaaagattccaattgattaagcttgagtgtggcttaagcttggatgtgccccccacgttttttgtttattttttgctttgactctcctccatttgacatcaattagcacatgccaatgccaactccgtcaaatttgggtctgagcaacaacattgtgctgcttctgctggtgcagttgtgctgccgctgctccgccgtccttctccaagtcgccgctgctttcacccgtgtcgaaagtgacgctaccttcgacaacgctcggcgtcgtccctccgtcccggtcgccctcctcgctcaattggcccaattttcccgcctttaagccgcgaatgcgtcggcgtcggttggccaccaatttggcggacaacacaaaaccgatggacaacaatagcaaatactccaagacgaacgcgaacagaaacaaacgttcaatcagagcggaatacaattcggcggaacaggcgaaaagtggcgagagctgaaagggaagcgaaatgccaatgaatggggaagcaaaacgaacggcgaaaagctaagaaagccaattgaacggctgtgcatttaagtaaagccgcaaaaaatgccaaataccgacctccttatcaaacgtcgtatcccaaactcagatgcccttctgtggtacttacccgggccagctattttacaaaaaagcatcgggattggaagtcatcaaaaggaggttcttaagccagatgattccatcctctgtttttgctttttcattccagaacaaaattcccgactcaaaacttagtttcacgccagtgctggg

SEQ ID NO: 41896 - DNA, 801 bp, Heterodera glycines
ccccccaccccacccctcccacgtcaccggaggggattgatcgtttccccacacccaccgatgaattaaaaaaaggaaattttaaataatttcaactataaagccaaacaaagtctttaaaatgatcgcgctccctggaggcgtctaatttgtacaaaaatagggaacccacatagtatttgtgtcaatttccattaaaaaataattaattaaatggggtaacctgacggtttttgccaatgatcgccttcaaaaatcttggaaattaaaacattacaaaaatgttttaataaagtctgagggtccttttgataatttcgaggatggctggcgcctatttggcgtcgcccatttgattggcgcccaattttttaagtgcccatttgattgacacccaattttttaagtgccaatttgattgacacccaattttttaagtgcccatttgattggcacccaattgtaaggaagaagctggctgggcggttaaaacgcggaaagcgggggttgataagatccataaaagaaagggcggatgtgcctcggtagcttaatggtagagctgcccacggaaagggtgcatgagtgggttcgattcccacccgaggtttaacattttgcccatttcttattcaattttaagtgcccatttgattggcacccaattttaaggcccatttgattggcacccaattttttaagtgcccatttgattggcacccaattttttaagtgcccatttgattggcacccaattttaagtgcccatttgattggcttttaagtgcccatttgattggc

SEQ ID NO: 41897 - DNA, 1015 bp, Heterodera glycines
  unsure (1)..(1015): unsure at all n locations
agttcagctggatcgaatggggacctacaactcagcgcatggatcgaaatcgagacaaacaacggccaaatcgagactcaacggcttacccttcacccgggagtgccggaaaagtggggaaacatcgaccatcgcggtcatacccacctcactcccgccaacgccaatcctctcggcatacttcatctcggacggacgagccatcggcgatgggaaaccccatttcttcggatttgcactcgctcggacgaagaagcagcgcgaggcttcgacaaatgccaattggcgatcgggtcatgccaaaaatgcgcgccgaatcacgagaacggaactgttcactgccattgccgcaacctcgagattgagcgggtgctgaacaacccggaacaccgcctccctctcgacgttggacggctgcacgttcacaacaaagggccaacagttcaagcggagttccaatacaccccagtgcaggttcaaatccaactcaacgagctggagctggtcagcgaatacagcaacacgaagtgctgggtcggctcgccccagctcagcggatgttaccggtgcatttccggtgcaactttcgaagcaatgtgccggacggattacggcactgcgctcgccaaaatcaaatgcgcagatggcacaatgtttggcttacactgcggggggaatggcactacgacgactgagtccatccccttcgatcgatcggaaattttcactgagtgccaagtgaaatgcccggcggggacaacaaaatttaaacttaaaggggggcttgctttcatccccaaacagcagcaattcggctttagccagcgagatccagcgagcggtcacatcgagccgggcagcacgttcaccctgacatggncaaatttgggggatttgaccccttntcactttcttcgattgctctcgacgggacaatggtggcttatcgccgtggnnctcggaatcatcngcttgggcggcgcttttcgtcttcatcaaatttcacccccacttt

SEQ ID NO: 41898 - DNA, 937 bp, Heterodera glycines
gtgggttttccccaaaaacgcaattctattcgcggttgagcccttcaaaaggtcggtttgaaaaattctttctcagaagaatagatttttcagaaaatggctatccctttttctacacccgttgtacatgtggggtttccccaaaaacctttaactatctgcggttgagccctacaaaaggtcggtttgaaaattgctgtctcagaagaatagatattctcagaaaaatggctatctctttttttctacaccgttgtacatgtgggttttccccaaaaacgcattactatctgcggttgagccctacaaaaggtcggtttgaaaattgctgtctcagaagaatagatattctcagaaaatggctatctctttttttctacaccgttgtacatgtgggttttccccaaaaacgcattactatctgcggttgagccctacaaaaggtcggtttgaaaattgctgtctcagaagaatagatattctcagaaaaatggctatctctttttttctacaccgttgtacatgtggggtttccccaaaaacgcattactatctgcggttgagccctacaaaaggtcggtttgaaaattgctgtctcagaagaatagatattctcagaaaatggctatctctttttttctacaccgttgtacatgtggggtttccccaaaaacgcattactatctgcggttgagccctacaaaatgtcgggttgaaaattgctttctcagaagaatagatattctcagaaaaatggctatctctttttttctacaccgttgtacatgtggggtttccccaaaaacgcattactatctgcggttgagccctacaaaaggtcggtttgaaaattgctgtctcagaagaatagatattctcaaaaaatgggtatctctttttttctaccccgttggacatggggggtgtcccccaaaaa

SEQ ID NO: 41899 - DNA, 1348 bp, Heterodera glycines
atatatatatatatatatatatatatatatatatatatatatatatatatatatatatatattgtacattttttctgaaattagccttttattttttctttatattcaaaatttctttactcttttctaatacaattttttatacattaatgcactttctttgtgtttgtaagtaagtaaaaatatttgtcggaaataaacaattttgtcaaaacacaaaatgtggcaaattacggaaatttttttgttgttacgaaataaaacaaaagttttccatcagttcaaaatttcaaatttttttaaaaattagacttatttatctgatttttgaatttcaataaaacattaagattaaaaaatgtattatttcagccaattaacaaaagaaacagtcatttaaaatgaaaacaatgactaatattgtaaaacattataagaaattgaaaccaaaatatttttaatgaaaaacaaaatgccggaatatgctaaatgattaatgatcatcagccgcctattcacattcacaggtgagttgcaccgaatgttgtgaccatgacaagtgcaacaacaatcacacgcttgattattattatgcggtgatggcacaacaatttacatcgtaaaaatttaaaaaatataaaattagaaaataaaaattatttttaagttggacaaaaccggtgaagaatgaagctaactacaataaaaagaacaatttgaaatttccttattaatttttagaatttttcatatgctttttgaaaagtattatgtattatcattagtcgctaaatcaataagctcttttgctgctattttggttgaatttcatatatatttttaaattttatcaccaaattataatttagaaaaattcacaggcaacattcattagtattaaaaaaactgattttctggcagacataagatttttaaagttaacaaatttttggaatttacatgcttctttgagtgaacattaatcatttttagttaaatttttaaattaatttaaaaatgcaaggaaattttcaaataatttaaaaacattaagcaatgggctgatggggaaggggtttatgtaattgaaatttcctgttttctaaatgagtgatcaaaaatgcttttacccgctgcagtgatcagttgtgatcaggttttatgggagaacacacacgtcaattgaccggccaaacaacagcagacaacagagtggaaaacctgtgataattgcgcaatgtcaacattgagttaatgaagctaaaacaatttatgtaattttgatttttatttatttattttcaaaaatatatattaccaaaaatatagctaacaaataaaacatttt

SEQ ID NO: 41900 - DNA, 918 bp, Heterodera glycines
aagcctaaactttttggcctgtttaaaaaggaattaaaaatttttaaaaattttattcatctcccttttgatagaaaaagcatcagagagccttatttaacttttaattaacatttggtgcgtttcagagcagtttctgaaaaaatatttatgaattgattttgcaaaataataaataattaatgaaaaagtcagaatttcgaaaaattttaaaaacaacaagcgttggcattttttcaggttaagttagtcctttacaatggagaaggcctgcaaaatttggagagattatatcgattttagtgcgctaggttcgataaaactttttaaaatataagcctaaactttttggcctgtttaaaaaggaattaaaaatttttaaaaattttattcatctcccttttgatagaaaaagcatcagagagccttatttaacttttaattaacattttgggtgcgtttcagagcagtttctgaaaaaatatttatgaattgattttgctaaaaaaataaaatagtgaagctttaaaaattaataaaaaattttaaattcagaattactggagttagcatcatagcagtgcttttccttgtctttttgatgctctcgcaaaatctggttcgcttctgaccagtttataaaaaaaaagttaagcctaaaatttttcgcatatttaaaaagcaattaaaaatttttagattttttattcatctccctttttgatagtgaaagcatctgagtgcctaaaataacttgcaaataaaattcgggtgcgtttcagagcagtttctgaaaaaaatatttatgaattaattatgcaaaaaacaaataaataatgaactctcttccttaataattttcctgcaccgaaggtactcactcggccgcttcgcggcctcgtggtgggccttcccccc

SEQ ID NO: 41901 - DNA, 1011 bp, Heterodera glycines
  unsure (1)..(1011): unsure at all n locations
ttatttttctttaagaactttaaattatttttttcattgaattgcctgcgatatcatttcatccttttgcacaaatatttcaactaataacaacaaaaatatataaataaataaatttttatgtttctaaaagtttttctatgcttttattaattaattacattatttatgtattttttatttattttttgctcataattattttggttttgtataataaacgtgaattttgtgaaaaatgaatttttgacttttcgttagaaatcgggtccaagatttgtattgttcataatggatgtcaaaattagttttcccgacccttaaaacccaaaaaacaaatttatctatcaagactaattttatttatttttttgttaaaagaaagctttggacagtgtcaacaaaatttaaaaatagcctgaaagtaaaattaaagaaaatcaaatacttaatacagccattaaaaaattaattataattatagaaatttaatattttcataaataaaaataaataaaacatgaaaaatgagatattattaccgtgatgagacatttgcgccgcgccatttgcgccgcacagcaaaagtggacacttgcgccgctcagcaaagtcgacacttgcgccgcgccatttgcgccgctccatttgcgccgcgacatttacgccgcccagcaaaaatggacttttgcgccgcgctgtcaaaaatattatattcataaaaattccactattatcaataagttttactaaaactataactaattgaaaattcgaaaaaattactagtcacaaagattgacattcaattttttaaccattaaaatcttaacattgaataggttcatcaaagatatgaaaaaatgattaagaatacaaactaacaaaaaactgaaaaaaagaattttctgtagaaaccccaattatttttttgcttcgaaaaaagaatgaaattcaattcctttgggtgggattttctcaantaagttattttcatcgattttaatttaa

SEQ ID NO: 41902 - DNA, 1540 bp, Heterodera glycines
atttatatggactaaaaactttcaccaaatcaaaaaattttaacgcagaaatgctatttttaagcccctttcttcatagcatatgcgcagaaaaaatatgttaatccatataatttacaaccctattaattacggattgttggatttttaggcataaaaattgcgaaacaggcaccaaatttagattaaaaaaacccaaaaatttaaatgagaaataaaatgttgagaagcttcaaatccccaattgaaaaaaaatatttaacaagtgaaaagcgtcataaattaattgttcccagaagcaaccgaatcttgagaattccatattgtccgataaagaccaaggatctattacatattttactttcaaaattatttatttttaaagaaattatttccaactttgagtttttgataacaattttaaaaaaataaatttcctaaattttttaaacgcaagccaagtttattgtttgaatttagtcaagcaaaaacagagttaacaaatgggaataataataactagacaaaattatcgatctattttggaaatacaacaatattccatacagtataccctcgctacaaatcaaccatcactttgatcacttcctgtcaattcattcacatgaatcatttgcaatgacattgcaaatgcttcaacttgcaatgcaatttcctgcttgtccgttttgtttctgacaaggtatgcatggtaaagatcaaccatctgaatgaattggaaaattaattttaattatgtggtgattaaattaagtctaattattaactaattaaaccaattaatcaattaattacttttgctttttctggctcaagcgcaatttgagtgtcgttgtctattccatttgcttgacgagttgcaaatttgtagcgataaagcgacaaatcttcgccattatcttgacccatttgcgttaagctcggataaatcattttgtaaataggctattttgaaagaaattaatgtattggttaattaattgaatattaattgcttgtgttaataggcctattagttgtatgcactaaaatcttacacaaatcgccagtcgaatttttctaactcagtttagagttttgtccgaaggactaaggactaccgaagcctgcaaaactttaaaaattttcaaacgaataaatttttaaaaatccgcctttcctactagccagctgaacgctaactacttggtgatcaaatcttaaaaacaatttaatgcatacaaaaccaactagcttaaatcccttaaaatgtggaaatagcctaaaaatggatattattcctaattaattaataattgaattggcatcaatttcattttttaaattgtccatttacgctttctgtcgcttccaccaccaaataaattgtgcccgttttgcgttcgcttttcgtcctcagcccatgcaattttgtctttttgatttcaaagctgctcagttccgatgtttgtatctcattaaaatcgaatagaaaggcgccttcgcaaaatgccgatttttttgcttcaattgtttgcag

SEQ ID NO: 41903 - DNA, 1006 bp, Heterodera glycines
  unsure (1)..(1006): unsure at all n locations
aaggaaatcgcacaataaggaaacgtataaaaccccgagatagttgaatatnagaccagtttgaaaccaatgatatctttattaaacagcattaaacctatcagaaaagtaactttttttgccaaccaaaagggttctccataaatatgaattactctcctcgttatttataaatccattttagccgttatttttattattatttcatttttaattttttatgtttttttgaaattaaattttgtgtttttattttgaaattttaaacgcagatttccaagcacaatctttgatagctatttatttgctaatttctctgtcgaaccacttatcaccggtttctacagactttgaatccaatgaagaatctgatcccttaaataagggtaattattattttttttttgctgtgatagttgtaatattaagcaattatttgacaaaagagtgattttaggttaattatagctaagaaattatgtttaataattttggcctttggtaaaacttttccatcggtgaatttgtttgttattaaggtgtaattttcgttgttgcaaatgcttttactcgccaatttctttcatcttttctttgacacttgctgccgccatttcactgtatctcttctgttttgcgtccatttaatgcacataatctccatggaaacagaatgcattatttgttgcttgcttttagtgaattccaacagaatgtgccaaattggccaggcattttggagaaatgacataattatttcaagcaattcttgctttctgaatcggagcaactgggctcaatttagccaatgtttcggaataaatgcaatttataagcgggatcgagattttttggaaaaaccgggacctgaaaacccgagaccgggactttttctttgaaaaatttttttgaaaaaattgaaattttcaaaaaaaattcataaaaataattnctagtgaaagtttccatttttcagctccttgtttttgtgtgtgctgcttccaaa

SEQ ID NO: 41904 - DNA, 1655 bp, Heterodera glycines
  unsure (1)..(1655): unsure at all n locations
agcgatctcatcaacagatcattcattcatcagcagtgacgccgcgcaaaaatgcctatacgccttccgacctttttcaagatgttggctcagactctacaatggcccaatctacaatctcttcatccatctcacaaaattgtcgtgaccatttgcacaaatatgcatatgcgtcctcgtaagatccatgaaaaatctaagctaatcaaatatttaatggaaaaacaccgtaaaggcggcttttactttgttatatctgctatctcgcgccatcattttccaattgtttcagaagttcactggtctcttccccataaaattcctcatacaatgaaagttccaccttcgcctctaatgttttaatttgtttgaccacaatgggaaccggaagtgtcgcttcgtgaatttataaaaattagcccagtagttttctccgtaattagtcgagcctgcctaattacgaccgatacaaaggtctgatcgtaggcacagcacatcgctcacacaaccaccttccgttcttcagatcgaggcgtctctccatcagcaaaattcggtggcagaaatccgggcccatcaagaaccaaatgcgattggaacgacagatgatgcacagcactcggttcgggccgaggagggggggggggggggggggaatgggagcagaggatgggacgcggccgcgattcgcaacctcggcaatttattccgcgactactttcccgacctactttagttaagcgactcggttcagaaacaactcgcccggctgcttcagctccctcccccaattggacatgttgtcggcatggctttggacccacagaatcggcttgttttattccatcgttcgggtcgcatttgggatgagcagtgagtgggcaaaaccacaaataataatgagtgagtgctgatggtcattcccttttagttccttcgacgagaataatcggttcaaccggtcagtgacttatcagtgccaccgttaattggtaggctaattggactgacttttcctcatcagttcactcggagcaattcccaacgcgaccattgctgtcgtggacagcaaaagtgggcttctgttggagtcccatgggcagaatctcttttacatgccgcacggactgaccattgactcggagggcaatttgtggcttactgatgtgggcagtcaccaggtgcacaagttggacaagttcttccgaccgacgatgagtctcgggaagaaacttacgcccgggtgggctcattcagctgagaattcgcaatcgtcgccttttgttcagttcggatgctgaacacttctgcaaaccgactgacattgctgtgtcgaccaatggcgactttttcgttgctgatggatactgtaacagtaggataatgaaattcgaccgcaatggcaaattgataagccaatttggccaccaaaactgtgagtttgttggtcggactatgaataatcacacatttagcgggaaatcctcctaaatcgggcgaattcttcgtgccgcattccatcgcactaatcgaagacttaaaccttgtctgtgttgcggatcgtgagaatgaacgcatccaatgcttctcagttgggcttggaaggcacaactcacaaaccgaaggggcgtatgtgcccacgnggcacatttgtg

SEQ ID NO: 41905 - DNA, 1468 bp, Heterodera glycines
aggaattatttcagctttttaagagccttttgaaatagtttttaaaggtgttcaaagacttttttccgccatgattttgaccatctctcacttcgtggcccatatcacattcattctatttttgatccgggcttttttggtgttgatatgaagtcgatatatggaactaaacatatatattaataagtacataaacaattgcccataatgtttcatttatttcaatttataaaccaaatgacaaaattgcatttttgttcaaagactttttttccacccacagggggttcccttatctttttttgaggggccgaatttaaaaaatttgattccttttttgaaagattgcctttttcagtttagcatacttttgaaaatccttgaaagcattttttaattaatttttttccttctgcgtcagatccccatccagcagaaaaatgtttggggaggagcgaaaataaattttttttctctttttggctccaaaattttttggctctaatgcactttatgagtccaatcgacttttatgagtccaatcgacctttatgagtccaatcaattgacaatcccgggtttttatacaataactctttgttcatgttcgaacaaaccctattaattaatcaaatcactaatttttttagaatatccacaaaattagcaaatttttatatgtctgctaaaaaatatgcaaatttgatcatttttggacaactcgtttaacaaactgcattatgggtacgctccactgtgcagagaaaagcctagtactatctcgtcgtttctctttttctttataatttctctcactctggcgtactatctcttccttttaattatgtaaaaaacaacatttacttctctctaagaaacttttttttccgttaatagattttctttaaactttgcaaaccgatagagaaaaaaattacgaacaaaatgtaagggtttttaagagcaaaaaaaaggttaactaaaaagttatggagttattaaaatttttgcatttcttttcctctcgtgttggcgtactattttcacatctctaacacacaaaaaacatcaaattcgtaaatgctaacaattttggttataaggatacaaaatcactttggacatttagaatcaatatagaaattaatagttttagcatttttggtgaaaacagcagtttaggacttgagttataacgtgataaaaatttgaaagtatcacaacttttttctgagatgtcaaattgcttagcattcgcttataaaaagattctccttttaaaaaactttttttagataccaaatttattcagtttagttgggaatgaagcgagttatgacagatcaaaataaaaaatacaaaaaaggcattttccaatgtaaattttgaaatagcgcgcaaaaatttacgctaaatgcgctatttggcgttatgagcaattttgtctgacactcgggcgtacccatag

SEQ ID NO: 41906 - DNA, 1166 bp, Heterodera glycines
ttaccaacatcctaaacaaaagaaaaaacacattttgttcacagtgtagttatgcggaaatatgtaatttaaacctgaaccattagtcatttaaaggttggctttatttttcattatttttcgtaatacggtctatcttttctgcagtaatcaacattcgattgtttctacatgtatacaaccaccctttaaaaaggtcaagaatttaactaaacaaagtgaagatcagctcgttaaattgaatattacatactcgtatagaaagttctgaaattttcatatatgctctattttattacaaatttccttctgtctttattggatttttatcggcaaaactgatgttaaataggttttatttttattaattgcagctttttgtattagaacgcgtttaaaaatagattagaaccgggaatcttgtcaactgtaaatgccataaaatcgatttatttttcttttccacaacaaattgatcgcaattgcaacaaagttataaaatttgcaatacaagtaagaaaattttgatttttcgctaaattttactaataaatataattggcaattctcgacctatgtttagaaacatacactaattacagtgccattattttggttcccacatttaccttaattatcaacatcctcaacaaaagaaaaaacacaattttgtccacagtgtagttatgcggaaatatgtagtttaaacctgagccattagtcatttaaaggttggctttatttttcattatttttcgtaatacggtctatcttttctgcagtaatcaacattcgattgttccattttctacatgtatacaaccaccctttaaaaaggtcaagaatttaactaaacaaagtgaagatcagctcgttaaattgaatattacatactcgtatagaaagttctgaaattttcatatatgctcgattttattacaaatttccttctgtctttattggatttttatcggcaaaactgatgttaaataggttttatttttattaattgcagctttttgtattagaacgcgtttaaaaatagattagaaccgggaatcttgtcaactgtaaatgccataaaatcgatttatttttcttttccacaacaaattgatcgcaattgcaacaagttataaaatttgcaatacaagtgagaaaatttt

SEQ ID NO: 41907 - DNA, 1102 bp, Heterodera glycines
aaaataacatttaaatacgccttacactctacagcagaaccccagcaagcgtccctccccagctccccacagagcatcggtgtgaaaattcacatttaaatttatttattaaataacaacatttaaatttaaaaatatatatttaaataacaatatttaaatattaataaaaagtcttacaccctatggcccaacccccagcaagcgtccctccacccacagagtatcgacgcgaaaattcaaatttgaatttagcgccaaaaggggcgacaaaagtacaggggtcactactggtgttttctaactaaaaacactgtatatttttggaacattttttcaattaataatgtattaaatattcgcaggacaaaattgctggcgatggttattcatacacggatgacaatgtgtgcgtgttcaacaatgtggtgacaagccgtggacctggtgagagaccttgctcaacaatttgattgaatttaatttaaaaattattaatttatttgatgaatggcaaccgattttttgcagggattttttgagtttttatgtatgattaagtttttattttttttaatctaacccaagttgcataaaatttggggtccgtttagcgtatggggtagctaaagcgcgaaaattttgagtctgactatttttaatgcatttttctggaaattttccaccccttcccccaatatggctgtaaaaaagccctagaaatcatcaaattaagaatgaatttctagcatagcccccaaaaaaaaaactgacaggaacccacggattttaattgtggcgcaattgtctggcgcctaactttcaaatcagttaaaaatttaggaaaatttaatttttataatttcaattgcaggcactgcctttgaatttgcgctgcaacttgtcgaaatgttggtcagtgaggagaaagcgaaagaaataagcaattctttgcttgtccattgatcagttgctcttatcaaactagtcaagatgagatgatcaaaaagcaatggaatatattcattgaatttgtgtgatggatacaattttaccaaataaaatcccacgtttaattttatttgatgatgatttaaattaa

SEQ ID NO: 41908 - DNA, 1366 bp, Heterodera glycines
  unsure (1)..(1366): unsure at all n locations
ttttcgaaaatctgagtctttcattatttatttatttttttacaaaattaattcataagtatttttacagaaactgctctgaaacgcaccaaattttatttacatgctagtttaggcactctgatgctttttctatcaaaaagggagatgaataaaatttttaaaaatttttaattcctttttaaacaggccaaaaagtttaggcttaacttttttttcagaaacttatcagaagcgcaccaaactttgcagggatactgaaaggaagagaaataacctattttaaatattatctagtcagttcatttaaataatttattcaataaaaaatttttttttgggttttcggggcagtccccctgaaccgatgttaggcttaactttttttcagaaactgatcagaagcgcagcaaactttgcagggatactgaaaggaagagaaataacctattttaaatattatctagtcagttcatttaaataatttttattcaaaaaaatttttttttgggttttcggggcagtccccctgaaccgatgcgcccagatttatggggagaccgaatccttcgggaatagcttccctatagtctgtactttaattctgcgttggatttttgctccccataaatgtttgagtaccccaaacggacacttgaaaaaatcgatttttttgttttcggggcagtccccccgaaccgatgcgcccagatttatggggagaccgaatccttcgggaatagcttccctatagcctgtactttaattctgcgttggatttttgctccccataattgtttgagtaccccaaacggacacttgaaaaaatcgatttttttgttttcggggcagtccccccgaaccgatgcgcccagatttatggggagaccgaatccttcgggaatagcttccctatagtctgtactttaattctgcgttggatttttgctccccataattgtttgagtaccccaaacggacacttgaaaaaatcgatttttttatttcataaatattttttcagaaaatgctctgaaacgcaccaaattttatttacatgttagtttaggcactctgatgctttttctatcgaaaagggagatgaataaaatttttaaaaatttttaattcctttttaaacaggccaaaaagtttaggcttaacttttttttcagaaactgatcagaagcgccccaaactttgcagggatactngaaggaaaagaattaacctgttttatcacattagcttgtcatcagtttttataaaaaattttcaaaattctgcgtctcctattattttattttttttcaattaggggggggggggggggggggggggggggggggggggcggcacaaaaaaa

SEQ ID NO: 41909 - DNA, 1096 bp, Heterodera glycines
cttctcacaggggtattattttgtaaagtatttttttccccttagacttttcataccccatttttcgcaccgtgaatgttatttttattgaattctgaaccggtttgagtagattagactacaaaaaattgaaaatttcgaaatcatgtttcccactcccttctcccaggggtattattttgtaaagtctttttttccccaataaacttttcataccccattttcgcaccgtgaatgttatttttattgaattctgaaccggtttgagtagattagactacaaaaaatttaaaatttcgaaatcatgtttcccactcccttctcccaggggtattattttgtaaagtctttttttccccaataaactttttataccccattttcgcaccttgaatgttatttttattgaattctgaaccggtttgagtagattagagtacaaaaaattgaaaattttgaaatcatgtttcccactcccttctcccaggggtattattttgtaaaaagtctttttttccccaataaacttttcataccccatttttcgcaccgtgaatgttatttttattgaattctgaaccggtttgagtagattagactacaaaaaattgaaaatttcgaaatcatgtttcccactcccttctcccaggggtattattttgtaaagtcttttttcccccaataaacttttcataccccatttttcgcaccatgaatgttatttttattgaattctgaaccggtttgagtagattagactacaaaaaattgaaaatttcgaaatcatgtttcccactcccttctcccagggggcatgtttcccactcccttctcccaggggtattattttgtaaagtcttttttttccccataaatttttttaccccattttttcgcaccgggaatgttatttttatttgaattctgtaccgggtttgaagaaattaaaatacaaaaaaaatttaaaatttccaaatcatgttttcccccccccttttccccgggggaataattttttaaaaaaacttttttttccccaaaaaaattttctttcacccctttttttccccccggggagggtgttttttttttttga

SEQ ID NO: 41910 - DNA, 991 bp, Heterodera glycines
  unsure (1)..(991): unsure at all n locations
aaaaattgttttttttttaaatttatactttaattatttttcaagtgaaaatataataatttaaacagtttaaaaaatttctctatgtagtaaatgattgagtacttttttatntaatggacaaaaataacaaaaatttaataaaattgaattttctgaatttgttgactttaaaaaagtaccaatcttttcaaaggtgttggtaaaaacttggaattttctgagagtcctaaaaatattaatttttttttgcccttttttacactttttaaaaaaaatatttaaacaattaaatgaattatcagcattaataataataataatttggctctagtccagtttatgcgtccaatcgacttttatgcgtctaatcaattttaagcatctaattaattgcattgcattgacagtaaatctgaattccgggggcaaaaaattttccggaaactggaattccgaccccaaaaaagtaggaaatttatgaaaaaatacaaaatatactaagttttttaaatattttaataggctaaattttaaaagtcttcaccaaataaaaggtgatttcaaaaatattctcgatgtatttctattatctgcttaaaaattagaacatttttgggaaagggactgacgatttacaccttttttagggcgcgcttttccaaaaaacttttgggaaaataggatggtcggcgtgccgataggcgccgccacgaaaaatttttgtaatttttaatgcgatttgttaacagattttgtccaaaaatagcccaaatttagggattttgagcaaatttttcaagaaaattaaggattttagggtccggcggtgccgaaagtcgcagtcggaaaatttttgaaaatttcagtgcatttttttaacagaaattgtacaaaaatttctacttttttgaaaaaaaattaaaaaaatttccgaaaatttccgactttttatcaaaaatttcggaaatcggaattccgaccccaaaaa

SEQ ID NO: 41911 - DNA, 1246 bp, Heterodera glycines
  unsure (1)..(1246): unsure at all n locations
ggggatttttttttttttttttttattttgtgcccggcttgttgggagaaataagaaaaaaaaaaaaaaaaaaaaaaaaatttaaacactttttttcccccccccccctttccccggggggtattttttgaatattttttttttttccaaaaaatcttctccaacccccttttttccccccgggaaatttttttttttagaattttggaccttttgaggagaaataagattaaaaaaaataaaaaattttaaaactatttttccccccccctttccccggggggttttttttgaaaatttttttttccaaaaaactttttcaaacccctttttcccccccgggaatgttatttttattgaattctgaaccggtttgagtagattagactagaaaaaattgaaaattttgaaatcatgtttcccctcccttttcccaggggtattattttgtaaagtttttttttcccaataaacttgtcaaaccccatttttcgccccgtgaatgttatttttattgaattttgaaccgttttgagtagattagactataaaaaattgaaaattttgaaatcatgtttccccctcccttctcccaggggtattattttgtaaagttttttttccccaataaacttgtcaaaccccatttttcgcaccgtgaatgttatttttattgaattctgaaccggtttgagtagattagactagaaaaaattgaaaattttgaaatcatgtttcccactcccttctcccaggggtattattttgtaaagtcttttttccccaataaacttgtcaaaccccatttttcgcaccgtgaatgttatttttattgaattctgaaccgttttgagtagattagactagaaaaaattgaaaattttgaaatcatgtttcccactcccttctcccaggggtattattttgtaaagtcttttttccccaataaacttgtcaaaccccatttttcgcaccgtgaatgttatttttattgaattctgagccgttttgagtagattagactagaaaaaattgaaaattttgaaatcatgtttcccactcccttctcccaggggtattatattgtaaagtctttttttccccaataaacttttcataccccatttttcgcaccgtgaatgttatttttattgaattctaaaccgttttgagtagattagactagaaaaaatgaaacattgaaagatcantgtttccccactcccttctccccaggggtattatt

SEQ ID NO: 41912 - DNA, 843 bp, Heterodera glycines
gggtgcgattttgccctggaaacccggcatttgccgggttttgggggtccttgccgggtttttgccgggtttttgaagttgccgggtttttgggtttttttccgggtttcctattttcaattcatttatttgaattttattaaacattttgccaaaattaagagccaaaatagttttcgttaattgttcagatttttctcacaaaaagcctggcggaggaatatcaaattatgattataaatattcggagaaattcaaggccgattccatccaaaaaagcaacaagggaaattcaattcaatttatacgcaaaagcgtgaaccgacattaaaacaaaataaataaaataaaattggtcactgaatgagatggggcggtttcaaaagtaaaacatcaatatcataggtgtcaagaagtttagcaaactcagtagaattaagtaacctcgcctctttaggcaaactcctatagaggcgagaggtacgaataaaaaacgaatgaaaccgaacattggttgaacaataagcggtttttataatataatcgtttttcagtcctgaatatatttttgaaaaagaatcattatgctgaatatggatctttcccaaaattatatcatggaaaagttttaaatcgatttttgttctgcgttttaaaagggattcttgtttaaagagttgaagaagttcgttatacccgggtatatcatccttattattattacgtctaaaaacaatacgtaaaaatgttttttggacattttccagagcatcgatgtcttttttcatatatggattaaaaaaccggaaaaccacaatttccaaaatcggaccggacaataaa

SEQ ID NO: 41913 - DNA, 595 bp, Heterodera glycines
  unsure (1)..(595): unsure at all n locations
aaaacaaaaaaaatcgattttttcaagtgtccgtttgggtctttgagggagnnanggggagcaaaaanccaacgcagaacaaaggacaggcaacagggaagcgaccccggaaggcaacggacnccccagaaagcggggcgcagcgggccggggggaccgccccgaaaacaaaaaaancgaaaggcgcaagggcccggncgggggacacaaacaagaaaggggagcaaaaanccaacgcagaaaaaaagaacaggcgacagggaagccaaccccgaaggaagcgggcgccccagaaaacagggcgcagcggcccggggggacagccccgaaaacaaaaaaaaccgaacaaaccaagggcccgccgggggaacccaaacaagaagggggagcaaaaacccaacgcagaaacaaagaacaggcaagagggaagcaacccccgaaggaaacgggccccccaaaaaaccagggcgcaacggcccggggggacggccccgaaaacaaaaaaaaccaagttttcaacgggtccgtttgggggactctaaaaattttggggagcaaaaaaccaacgcaaaattttagtacagggtatagggaa

SEQ ID NO: 41914 - DNA, 986 bp, Heterodera glycines
  unsure (1)..(986): unsure at all n locations
aaaaagaagagggggggggggggggagcccccccccccccaaaaaaaaaaaaaaaggggggggggggggggcccccccccccccaaaaaaaaaggggggggggggggggggccccccccccacacaaaaaataattgggggggggggggccccccccaaaaaaaaaaaaaggggggggggggagacccccccctttggaaaagtggggggggagttttttccccccctttttaaaaaaggggaaaaaaagagtctccccccggaaaaaaaatttgggggggggagaacccccgttgagaaaaattgggggggggagggccccccatattaaaaattggggggggtgtttcccccataataaaaatcgagggattgggtcccccggtttaaaatttggggggatggggtccccggaattaaattttggggggttgagtccccgggatttaaatttggggggtttagttccagggattaaaattttgggggattaggtcccagtgatttaaattctggtgatttgatttccgttgattgaattttggggggttgagtcccagtgatggaatgttggtgggttgagtcccagtgattgaatgttgggtggattgagtcccagtgattgaaatgctggttgattgagtccgtttgatggaaatgtggtggggttgagtcncagtgattgaaatgttggtgggttgagtcccagtgattgaaatgttggtggattgagtcccagtaattgaaatgcagaagaattgagtcccagtgattgaatgctggtggattgagtcccgttgattgaaatgctggtgggttgagtcccagtgattgaaatgttggtgggttgagtcccagtgattgaaatgttggtggattgagtcccagtgattgaaatgctggtggattgagtcccgttgattggaatgtcggagaattgagtccccagtaattgaaatgcagaagaattgagtcccagtgatgaa

SEQ ID NO: 41915 - DNA, 847 bp, Heterodera glycines
aaaattttgaagaggctctgcggaacggattagtccttaaggttacgagatagaaaattgtcctaaaaagagatagccctttttctgagaattaattcacaatttccgcaactcttgcggtaatggaaaaaattttgaagaggctctgcggaacggattagcatcggggttacgagatagaaaattgtcctaaaaagagatagccatttttctgagaattaattcacaatttccgcaactcttgcggtaatggaaaaaattttgaagaggctctgcggaacggattagcatcggggttacgagatagaaaattgtcctaaaaagagatagccatttttctgagaattaattcacaatttccgcaactcttgcggtaatggaaaaaattttgaagaggctctgcggaacggattagcatcggggttacgagatagaaaattgtcctaaaaagagatagccatttttctgagaattaattcacaatttccgcagctcttgcggtaattgaaaaattttgaagagtctctgtggaacggattagcatcggggttacgagatagaaaattgtcctaaaaagagatagtcatttttctgagaattaattcacaatttccgcagctcttagggtaatggaaaaaattttgaagaggctctgcggaacggattagcatcggggttacgagatagaaaattgtcctaaaaagagatagccatttttctgagaattaattcacaatttccgcagctcttgcggtaattgaaaaattttgaagagtctctgtggaacggattagcatcggggttacgagatagaaaattgtcctaaaaagagatagtcatttttctg

SEQ ID NO: 41916 - DNA, 946 bp, Heterodera glycines
tagccatttttctgagaattaattcacaatttccccttctcttgcggtaatggaaaaaattttgaagaggctctgcgtaacggattagcatcggggttacgagatagaaaattgtcctaaaaagagatagccatttttctgagaattaattcacaatttccgcagctcttgcggtaatggaaaaattttgaagagtctcagtggaacggattagcatcggggttacgagatagaaaattgtcctaaaaagagatagccatttttctgagaattaattcacaatttccgcagctcttgcgggaatggaaaaaattttgaagaggctctgtggaacggattagcatcggggttacgagatagaaaattgtcctaaaaagagatagccatttttctgagaattaattcacaatttccgcagctcttacggtaatggaaaaaattttgaagaggctctccggaacggattagcatcggggttacgagatagaaaattgtcctaaaaagagatagccatttttctgagaattaattcacaatttccgcagctcttagggtaatggaaaaaattttgaagaggctctccggaacggattagcatcggggttacgagatagaaaattgtcctaaaaagagatagccatttttctgagaattaattcacaatttcctcagctcttacggtaatggaaaaaattttgaagaggctctccggaacggattagcatcggggttacgagatagaaaattgtcctaaaaagagatagccatttttctgagaattaattcacaatttccgcagctcttagggtaatggaaaaaattttgaagaggctctccggaacgattaacatcggggttacgagatagaaaaatggcctaaaaagaaatagccatttttctgaaaattattcccaatttcgcagctctaggggaaaggaaaaaattt

SEQ ID NO: 41917 - DNA, 89 bp, Heterodera glycines
ggtgggggagtatgagtatgatggtcaatatggagaaaaagaaagagtaaaaggcaattttttcaattcaaaaatgtagatgtccgcag

SEQ ID NO: 41918 - DNA, 665 bp, Heterodera glycines
cgttggatttttgctccccataattgtttgagtaccccaaacggacacttgaaaaaatcgatttttttgttttcggggcagtccccccgaaccgatgcgcccagatttatggggagaccgaatccttccggaatagcttccctatagcctttactttaattctgcgttggatttttgctccccataattgtttgagtaccccaaacggacacttgaaaaaatcgatttttttgttttcggggcagtccccctgaaccgatgcgcccagatttatggggagaccgaatctttccggaatagcttccctatagcctgtactttaattctgcgttggatttttgctccccataattgtttgagtaccccaaacggacacttgaaaaaatcgatttttttgttttcggggcagtccccccgaaccgatgcgcccagatttatggggagaccgaatccttcgggaatagcttccctatagcctgtactttaaatctgcgttggatttttgctccccataattgtttgagtaccccaaacggacacttgaaaaaatcgatttttttgttttcggggcagtccccccgaaccgatgcgcccagatttatggggagaccgaatccttccggatagcttctctatagcctgtactttaattctgcgttggattt

SEQ ID NO: 41919 - DNA, 840 bp, Heterodera glycines
  unsure (1)..(840): unsure at all n locations
ggacgaccatnaaaataggacactctttattccttcataactttttttgaaacaactaattttaattttgtttatataattaaatatcccaaagatttctctattattcagctaaattttgaaaaattttatggaatttcaagaaagttatggccaaaaatgttgagtcaaaatttttcgtacttttttggttacaactttttgtaaatctttacaaatttttaaaattacataagtagtagaggatactttgagctgtcgctaaatactaaatttcgttaatctgtctaaatttaagctaagttatgattaattatttagcaaattaaattaaaataataattaaatttaattattacaaacattcagacttttgtcacttcggctcaccacgttgattgtactgtcttatcgctttctctgccttttattcctaatttgcgttctaagatgaagattactcacgctaaatgaccctaattagtgttctccttaatgactaatcccgaagtgacccacttctttcagagcaaattccgcctctccttaaactcattttcacctcttcctctttatttattattcattcattatttttattcttttgcatttgagcaatgtattatattccctcgggcaatacttcgtttagaaataaaaattttaatcgaaaataactgaaaaatagcaatgactcattcttttatgactttttatgcaagaatttgcatttttttaattcgtaaaaattccaaattgacgtttcttaaaccaaccttccacaatgggcgttttatcttgaagctaatgggaaataaaatggaaaagtgccaaattccg

SEQ ID NO: 41920 - DNA, 705 bp, Heterodera glycines
tggttgcttacgaaaaaagatagggcaaacaattttttgtttgggttgctaaaacaaaatgccattccataaaatttaaactaatttgtaaggaagaaggcttctcgtcaagttcccctgctttcagtgaaagaaagaaaacaaattggaaaattcataataaaaattttggtgtgctcggattttttaagcgtgactggacaatccgacagtgaacaatataaaataaaaaaaataatttttaggcatgtgaacggactttttccaaaaaataaatatattcgagtcaaaacatttaactcaaacttgttaacaaatttgaaaaatacaaatagaattttagaaactaaaaagcaagagcttataattagcaaaatttaatgaggccattaatgtattaaaggccggcatcgatcatttaatagccaattcccccaagggcgtaggcataaaaattttcagtaaatttttttttttgaaatttcaagtaattttgttaacaaaagtgcattaaaatactcaaaaattttcccggcggcgcctatcggcaccgccggacccccattttaccatattttgaaaaatggagaccaaaatggcaaaaatagtaattttttggcgaaaaacggcgaaaaattttgtaaggtacatcccataattcgggatttcaaaaaacgaaaaatacaccacctaaaaatcgactga

SEQ ID NO: 41921 - DNA, 498 bp, Heterodera glycines
  unsure (1)..(498): unsure at all n locations
tggaaaacagctgagaaagagagggaggagagagaccgttaagaaaagaaggagagngaangggnaaagaaaaggggacctttaagacagacggaagagagggagtgagtgagaaagaagaaaagtggagaggaagggggagaacggaggaaaaacggaccactaatcgatccggcgcaattttgtcccactctctgcctcctcannnncncncncnagncncanncncncacanncncncncggncncncnccgnnngngngngngngncngngcngngccannnnacacnnnaaaancccgnccgacaacgacannanngggggangcgggggcnnnnnaccacncanncccncnnnggcggcncatcggngacgncacaaaagagaggggggaaaagggagagagagagagaggcgagagagggngnaggaganngagagagacgagagagggagagagagaaagcgaggagaaggggagggggcgggggagaag

SEQ ID NO: 41922 - DNA, 988 bp, Heterodera glycines
tacaggcggacagggccctcagcccaaaccggtccatctggcagcggtgggtcaacaaagaggtgcgcctactttggcaccacagtatggaagaggtcagggaagacgtggcccggacaatcaatggatgcactacggcggaaacccgaaacgacagaagggtggcagacgctgaactcatttcacatgaagtcctgcgggtctcacttctcttcctttcaccatcgctacggtatgtctaagtagttcataattcttttaacttaattaattagttaggtaatttacattttaccctttcattaaatattttattttctttcattttttctgcactcaagttttttttttctcatgtcacccctccttaacttccggcgttcgcactgtttacgctgtgatacaatcagtagggacactttcccaccatattacggtattaatggatttccgctatttttttttctcaaaacaatttttattacactatttcccataacagaattattgtaacactggcacgccagccacgcccattgtcggggccttttaatctaagcactgcacattcattcattcattcttccattcatttgatttactgttttccactttagatactcttgcacaatcccactgctaattctcatctcacatttcctcttattatgttttctttctcaggtgggggtccacctaatcaaagcgctgcggcgtcaagcaatgcacagacagaccctgaggggctctccaatgatttgcctgagttatcagttgttgataaactgatgtttgctggaaagattctaagcacaccagcacgtttgtctgatgtggacaagctccacacggacttagttcggactgaggatggtgtcaatcgtatgacacgtcaccttaacaggaagataaatcaaaccaatagggatttgactgaacttaaggatgatactcaaactctcataaactcagtaaatactctcgcaaa

SEQ ID NO: 41923 - DNA, 947 bp, Heterodera glycines
cagattgtggatttaatttaggcataatcaaattttttctttgttgctaagggatattcaaacgaaaaatatttgacaaaaaatggaaaaatatgcaaaaaatctgaaaatatgtagtaaaattgcaaaaatgcaaaaaatctgaaaatatgtagtaaaattgcaaaaatgcaaaaaatctgaaaatatgtagtatttgcatatttttgacatccctgtcaatcagtctccatttagtgctaataaatattttttccaccgggaaattagcatctttgagttccgaggatggcaatgtagaggtagggaataggccaaaaatgtctgagatttaagacacatcccatcccttacatgaaaaattccattcaaatttttttcattaatgtttggttttctgtaagctttgtcatagtttaagatcggttttaacagctctttatccacctgaatattttaggcattcgcatttttttttgaatttttacttttccgaagatttttgcaaaaatatttaattgctaatctgatttttatgattaatgtaagtaaatcttaatgtttttcatcataaaatatggaaatgggatgctaaaaaatggacaaaaataattttgtttctttgtaataacggtaaaaaattgacaaaataaatataaaaaaaggttaatctatttcttcgaaattaatgtaagtaaatcctactgcttgtcgtcataaagcattggaaatgagctggcaaaaaaatgacaaaaataattttacgtcattgtaataaagatattgtgtatattaatatgaaatagatttttacagcctaaatccacccatcccatcattctttcattcatttattttattaaaaatgaaaatgcatttcttttttacgaatcgaattttggttttcatttattattattttattttttcaatttcaaaggaagcct

SEQ ID NO: 41924 - DNA, 1094 bp, Heterodera glycines
  unsure (1)..(1094): unsure at all n locations
atccataaaaactcattttttcatagcccagcgtgtttaaagcaaacccgaaactgataggaaatttaaattgatcataatagaagtttaatttttatttgtcccatgcattttctgggaaatcttttcgcgaaaagttgaaaaatttcaaaacggcagacaacagatgcatttcaaacaattcaacaatataatataaaatttaggcaaaaatttttgttccttcctctttggaaatggtcttaaattttgcttgtaaatattcagataacaagttttttttactgaaaattttttacacactacaggatgaaacgcaataaataatgtttgtagacaaaagaaattggcgaaaaaaattgcctcaacaatcagtggtgaaactgaaagaaaaaaacttccccaaaaaatcggagcttttccgacggcatcagctgcatttccaacagttcaacagtataaataaatattaggcaaatgaaaaatttttttccttcctctttagaaactgtctaaaaatttttgttgttaatattcagaaaacgtgttttttttactgacaatttttttcaagagaaggatatgaacaatcacttataaggctcatgcttggagataaaggaatcggaaaaaaaaattatctcaacaatcagtcgtgaaacagttcaataattcggaagcagtgccatattgggaaaagatgcacaagtagagtaggctcgaaataaaggcaactgccgaagattaacaaaaattcaaatttattggccccgttctgctttgacaggccatatctcgccagggagtggcggtagaccctttgttgatacatttgaaaatgtagagcgcgtctagctcattcgaataacatcaaactggtttgtttttgtcacgaaacaacccgctgatggccacgtcgaagaaaagtcccaaaatttgacatccataaaactccattttttcataggccagcgtgttaaagcaaacccgaaactgataggaaatttaaattgatcataatagaagttnaattttatttgtcccatgcattttctgggaaatcttttcgcgaaaagttgaaaattttcaaaacg

SEQ ID NO: 41925 - DNA, 1615 bp, Heterodera glycines
atatatctaaaagtattgtttaaggtgcggtatgtgcccctaaggtcactcgatggtattacgactctacacaacggtacattgttgcagaaaaagcatgaataaaattcttttacttatggatttgcaaaatgcagcttatactatcaccgtttcgagatttcgaataagtgtgtaaacttggggacccgtgcccggttttttgaattgtcgggtttttattgggtttgcctgaattattattttcacttaatagacataagtttgatataaaaatccataaaattgacaattgttggtgactcatcagaaataggaacaaaatttacaatttggttccggcatcgcctatcggcaccgccgatcctctcgtgttttttgtttgttaaaacatacagtaaaaaataaataattgtaaaaaaagtaacgtatataaatgctgaattaaaattatttctcctagaaaaggcagaataggtaaaatcacacaaattcaatcttatactataaacttttattccaatttttgagttttcacgatagaaaccctgtcttctttacaaaaaagcaaatagtgtatttttatgccaatcatttttcttttatttcttggcaaatttgcggtccaaattcattgttgaattttggccttaataattatttttcttttaaaaaaagaataaaaacgtatgctttattaagcacttgccagacattttcattcaatgggtgtgacggcaattccaacaattttgctacacaacaggactgcaaggattactgtcgagttgagaggtagattttaccatcatttaagagaagaaaatttttatcccggcgaaaaaatgtttcactgtcgagcgggataattaaattagttaacgaaaaacgaaatcaaaagtcttacttatggccaagacctcgaaaaatccactttcggaccgcaaatgtcgggacacttaattttttgatttttttttgcatttaaattaattagataatgtgttaaaaaattctttaaaaaacattatttccttttcagctgtccggacggtggcgaagttggcaaaaaaaaaattgaaaaaatacattattaaaattttaaaaaaaaccaggtttggaaagagcccaacggcgctgtgcgcccatgcacaacaaatcggcaatgcccttccacacactactgtacccctgttactgtattttcgggcaccgtataccaaacaaaatcactgtgttgtccatccaaaaattttgtttgctcacaaccaaaggttaaggaaaataactttttttactggaattcttacaaaaattttaggaccaaggtgttagatgtagcagtacccgaatcacacgacattttttcaatgctgacacaaaaacttgtcaaccatttgagtataacggatgcgagggtaaaaagcacacaattcaataattatttttaacgtgaaatttaatcgattaaaaaattaattaataattaaagaaaaaaaaggtaatcggaataattttgccacacaaaagtcgtgccaaaattactgcttgagtgaagcttgctctccgggtactgttgtggccagagactcagacaggtggattcgggaaccat

SEQ ID NO: 41926 - DNA, 976 bp, Heterodera glycines
  unsure (1)..(976): unsure at all n locations
gacaacatttgccatgcaaggcggacagccaccagcaatgaacatggaccagcattacgagcatctcggcgttccaaccggcttccaacgagcacaatccgccgatcacgtaattcagcaaatgtcagaccacgtcgacaacattgatcgatcgttgcttgccccgtggcagaaatttgacgcggtgaacactttcgtgctgccgtcgattgccttccatctcaaaaacggggaagtgcgcaaagccccactgaatgcgctggacaaaaagatcgtccgtgtggcaaagcggtggctgaatctcccacagcgtgccggaatagagccgctctacctgagcaatgccatgggaggcctcgcactgacaccactcaataccctcgccgacctcagccaacttgttcatggcctgcggctcctcacttcccgcgacttggccgcaacaacaatggacctcctgtgcaccgtcgttgccaagcgtctgcgccgggcaccacgacagcacgaattggccagatacctcaacggttcgatggacggcgacatgaacaacgagtcgacggacatctcttcgacctggacaaggctcagaatggcaacgaggcgactacgaacaaaaattggcgtcgaatggtcggtcaacgacggctcaatgcaactgctcctgaacgggtgccaaatccaaccaaaatcagccgaattctgcctgcgctcagccatccgtgacttctaccaccgccgattgctgtccaagccagaccaagggaagacacacagtgtgacaagcgttagtgctgcctcaaatcactttctagcccacggcaacttcacccggttcgccgactggcgtttcatccaccgcgcccgcctcgactgtgtcccactcaatggcacgcgacggttcggccaaccgaacaaacaacatgcagacgctgtggttntgcaacgaaacgctcccgcacgtgctctgccactg

SEQ ID NO: 41927 - DNA, 1031 bp, Heterodera glycines
cttctccaaagatcggcggataggccccgagggttcgcgctttgtctccatttgcttttcggcagaaattgtgtcaaaaactaacgacggtgtttctaaattcagcgtggaaaggcctttggcagcccgactcctggcctgaagtcattagttatcagtaattacacaaattgtgttcaaaaacctcgttaagtcgctttatattctccatgtgcaactgagtgaatgcgctcgtctcctcgggtttgagcaccgtttctcggaaacgttcgctgccacttggccctttgaccgttgtgttttggacggggaaaccgagttccttcagtcgttcctggatcttcattctggcctcgtagatcagctccttgcttttcactttttctgccagcgaatcctgagaagaacgccttggaattgacgccgacatttttcaggtggaaggaaaatgaatgtcgttttcctgatctgggaaaaaatgagttatttgttttttatggaaattccaactccgaaaccattgaccccctacaaacttggccaccattcagaatttagaccatgattaatggatgttttttgacaaacaaattaaattaaaataaaacatactcagacaagtgtcaaacgccaagtcagatttatttaattcaaaaagtcataaaactcgctttgtctctaaataaaccagggattggattgttctgatttctcagaaacgttctgatttggagggtcgaaacctgagactgattttggtgttcagattttttttaaatattcttaattttgaaacttatggcataatgtcagttgatattatctaaaaattttagtttgatgcaaaagttggttatttttcgacagaatcttacgagtatgtgtttttaaaaccaaacgggaattttgtagacacgtggacaagcagtttatttatcgagtattaatgttgttaggcacagtaatacaatatgtacaatcagagcagcaaatatccgagcatgacaagcaaatcatatatacatggcgat

SEQ ID NO: 41928 - DNA, 979 bp, Heterodera glycines
ctcgagcgtgagagggagggcggtgcgcaatcgccatttaatttctcagagaatttttaaatttatcttatatccaagaaaaatgactatctcttcttttgataaattttatacgttacaaatgctctcgagcatgataggaagtgcggtgcgcaatcgccatttaatttcacagagaatttttaaatttatcttatatccaagaaaaatgactatctcttattttgagaaattttatacgttacaaaagcgctcgagcgtgagagggagggcggtgcgcaatcgccatttaatttctcagagaatttttaaatttatcttatatccaagaaattgactatctcttattttgagaaattttatacgttacaaaagcgctcgagcatgagaggaggggcggtgcgcaatcgccatttaatttcacagagaatttttaaatttatcttatatccaagaaaaatgactatctcttattttgagaaattttatacgttacaaaagcgctcgagcatgagaggaagggcggtgcgcaatcgccatttaatttctcagagaatttttaaatttatcttatatccaagaaaaatgactatctcttattttgagaaattttatacgttacaaaagcgctcgagcgtgagagggagggcggtgcgcaatcgccatttaatttcacagagaatttttaaatttatcttatatccaagaaaaatgactatctcttattttgagaaattttatacgttacaaatgctctcgagcatgataggaagtgcggtgcgcaatcgccatttaatttcacagagaatttttaaatttatcttatatccaagaaaaatgactatctcttcttttgagaaatttatacgttacaaaagcgctcgagcgtgagagggagggcggtgcgcaatcgccatttatttctcagagaaattttaatttatcttatatccaagaaaaatgactatctcttattttg

SEQ ID NO: 41929 - DNA, 989 bp, Heterodera glycines
tatatagggttataagttgtatgcactaaaaaatgcaaaatatgcgcataaaatatgcactaaaaatcacccaaatatgccctaaaaaccccgaaaaatgcccaaatatgcactaaaatatgccttgaaaattactcaaaatggcttttaacccttaaaaaatgccaaaattgtgtaaaaatacagaatttaaaaacatcaaaagaatggctaatgagtgtttttagacaattgcaaaacattttaattttaaaactttatatagaaatttagaattttttaaaatttttattaggtatatgccaaaataatattgcattttttgtatgaacaaatttttttaaaaaattctcacaataagtttaaaaattttcggtttttaagggtgtattttttaaaaattcccaaaaagtcgatccttagggtgtatttttcgcttatttcgcatgttttttgggggtgtgtttttgaactaaattttccggcacaattattagtagggctcgaaattatatggactaaaaaacgtgaaatatggacataaaatatggactaaaaatgcccgaaatatggactaaaaagttcaaaaatagccaaatatagaccaaaatatggactaaaaactgccaaaatatatgttttaaaccctcaaaaatttcaaaaaggtttatatattcaatatttgcttaaataaatttaaaaagtacaataaacaaccaaaaaatggatttaaacttaaaaatgcatatttttattgtcgtccattgtataaaaaatatttccaagtttgccaaaatttcgaaaaaaattttaatttaaaaaaaaagaaaaggtcgcaaaaaaatggcgaaaaatatttattaaaaatggcaaaatgacctacgaaaactcaaatttttcgtttttttgggggggggaacttttaaaaattttcaaaaaactatctttagggggggattttttcgttttttgcatttttcttgtgaaaa

SEQ ID NO: 41930 - DNA, 1069 bp, Heterodera glycines
agaaagcctattcgtaaaatacaaattcaaaaatgtcagttgtaagtcacctcggcccctccgcccaattgtccgcctccactcgccccgtgcccaattcgcccctcgtccccgtcccgaaactccaaatctctccgttcaaagagtccaaaatgattaggtggtcccttccggcactgatctggtaatgaaatttttcactttttatttgttaaaaaacatcacacaaacttttcctattcgaaatggcaattcgaatcgtttcacttccttcggatttttcccgaggcgcgaatcgcaaattcttaaatatattttctttgttttgttggttaaatgtgcttttacctctccaaaacggcgcaattttcgaaattcgttgccaaaaaagcgccaaaagcagtgcaaaccaaaaaacgattggattttgtggaggaagcggcagaaaaatgctgaaactatggatacacgattaagcgaatgccaaaaactcacttcgaatttgtcaattcccttccgtcccctgagggcgtcccaatggtcaaattgatggcttagggcaacggacggaggagggaattcagaatggaccaattggacttccacaggaagccattcccggccaaggggaggaggaccatccgccgaactttgcgactcaattcggaagagagtttaaaaagggacggtcggtgagtcatctgccgaacaccccaaaaaactcatctcagtacgcaattcgaacgagtaaagtgcgtaactgcccactaagaaaaacacaaagcattcattggcagcgatgacgactctctgaaaaagcgaagggacccatagaatcggcacaagtcgccctctctcttctcactttgtcatcgccattcgtaggcaatttgaactgtgttgttttcaatgacagattgtcctcaatttgtacactttcgccgtccgcttcaacacgtacaaaaccaaaccaaacgggcacacaaatggtacaattgacagcgattttagatgggccaaccgaatccttcacatccattcccgactgacaagaaaaaactgatcgaca

SEQ ID NO: 41931 - DNA, 1400 bp, Heterodera glycines
  unsure (1)..(1400): unsure at all n locations
gggtactcaaacaattattaaaaattttagatttttattcatctccctttttgatagtgaaagcatctgagtgcctaaaatactttgtaaataaaatntggtgcgttncagagcagtttgtgaaaaaatatttatgaattaattttgctaaaaaaataaaatagtgaagctntaaaaattaataaaaaattttaaattcagaattactggagttagcatcatagcagtgcttttccttgtctttttgatgctctcgcaaaatctggtccgcttctgatcagtttataaaaaaaaagttaagcctaaaatctttcgcaaatttaaaaagcaattaaaaatttttagattttttattcatctccctttttgatagtgaaagcatctgagtgcctaaaataacttgcaaataaaatttggtgcgtttcagagcagtttctgaaaaaaatatttatgaattaattatgcaaaaaacaaataaataatgaactctcttccttaataattttcctgcaccgaaggtactcactcggccgccgcccttcagagcacgacaaatatttcaacaaaaatttttaaaaattgactagagcaatcgaacgctaacggacgacctaatggaaaaaaatccccgaaggagagaatttaattaaatccattccttcgggggaccgtgccgggtgccgcggggtaagcagtgctggttcgtttcatcacggcaccgaaccttttggctagtcagcaatcgttgcttaacttgccagatcggacgggtgcgcatgattccactgttccaagcaccccaccaaaagcaaaacgatataaccaaaatataaggaaaaattttttctccatcttcctttttgatactaaagcatcagagtgctaaaattaagttgtaaataaaattttggtgcactttagagcactttctgaaaaaaatatttatgaaacaaaaaaatcgattttttcaagtgtccgtttggggtactcaaacatttatggggagcaaaaatccaacgcagaattaaagtacaggctatagggaagctattcccgagggattcggtctccccataaatctgggcgcatcggttcggggggaatgccccgaaaacaaaaaatcgattttttcaagtgtccgtttggggtactcaaacaattatggggagcaaaaatccaacgcagaattaaagtacaggctatagggaagctattcccgaaggattcggtctccccataaatctgggcgcatcggttcggggggactgccccgaaaacaaaaaaatcgattttttcaagtgtccgtttggggtactcaaacaattatggggagcaaaaatccaaagcagaattaaagtacaggctatagggaagctattcccgaaaggatcggcctcccc

SEQ ID NO: 41932 - DNA, 870 bp, Heterodera glycines
ccttgtggtgacagcaatagttcgcttttctctccataactttgtgagtttggcgcggatcgtgaccttcattagaccattggaaagagcagctcgagctctacaagaaggtatggaaagataaaaatagttatttctgggactttttcagaaatcagaattaattctccaatgtggcccaaattttaggcccccagccacagccctttgcttctcccagttttaagtcttggatttgtcaaataaattcaagacttcaaattaataatcaaaaattctcttaaaatttttttgaacccaattcaaaaaaggaaaaaaatttgcagtcaaaaaattattcgaatttctccaattttgtttccataatttccgaaagttattcggtatcataatgccaaaacaaaacgaaatcgttttaaaatattcctttctggacttgacttggtttcttgatatcgaagctgttttctacgctatttctaaaacggttataccaaaccccagatttttgaatccggttttcagaaaaaatgccttgtggtgaaaacaatatttcacatttcactccataactttgtgagttcggcacggatcgagaccgggataagaccattggaaagagcagcttgagctctacaagaaggtatggaaagaaaaaatagttatttctgggactttttcagaaatcagaattaattctccaatgtggcccaaattttaggcccccagccacagccccttgcttctcccagttttaagtcttggatttgtcaaataaattcaagacttaaaattaataatcaaaaattctcttaaaatttttttgaactaaaggcaaaaaaggaaaaaaatttgcagtcaaaaaattat

SEQ ID NO: 41933 - DNA, 965 bp, Heterodera glycines
  unsure (1)..(965): unsure at all n locations
tctanngagtcatggaaatttacataactcctcattcacggtcttgcacattacaaaaatttaaattattgtcttcccgcacccacctttttgcatttatggcactgaagtggcggcggcggtaccaacggttgcccatcattttgcgcatttccaatcgcaactgcagcaacaagaccagaattgttgttgttgttgttggtcctgcaatttggaagtttgcaaataccataaaagccatgtcccgacacttgcggcccgaacacttttggggccccaactaaaattgggcattttgctgtccgaaaatggggtccgacttttgcggaaccacagttttggtggcttttttttgatccgttagaaatagcaaaaaataaatgaaaatgcactttgccgtcgcctctgacaaattcaaaggatgagtggcggcggtggacaacgacgacgacaaatgttgatgatgaaaagcaacggaagaaatgtttcctggtgattttgaaggtctaaaaaagtaaatttgaaaaaaaaagttccaatgaattatctgcctagcatcaccaatttgtggcaaaatttgttaaaaaatgccgaaaatttcaaaatttttttcaatttgaatcctggcggcatccccaatcaacaacaagcacaacaaatacctcttccgcttcggtgccgccacttttttgcgatgatgactgcttctgttgatattgttgacattgacgatgatggcatttgctttgtgccgatgatggtgatggttagcggcacattttgcctccggaagaaacggtgcaacggcggcggtgacagccgacgacggcgccggtgcggtggtggccatcatcattaagccatcacccccagcagcagcagggcaaccatggatgccgtcgtcaacatggctggcggtgttgatggtcagcagcaacaacattgacgatgacgcattggctgct

SEQ ID NO: 41934 - DNA, 1025 bp, Heterodera glycines
ggaatgccatcccttccatggactcaaaatgtcatgggacgcgtaaagtgttgttgggacgcgtaaaatgtgatgggacgcgtaaagggttgttgggactcgtaaaatgccatgggacgcgtaaaaccgactagaaccagtttttcttcgttttggtttcagattttgttcaaacggcgcccaacatttgtccgccaattttggcagcaaattgccgatctgtgcgctttactttgtcgcaggtgcgaacactttgctgattcagtgcaatgactcctccacaaatgctcagcattttgtacggtgtcaaatcacttctgatcagctcactgtcacccatttgaacaatgaaaggcatttgaagcggatcacttgctgtgagatggttggcctcgccgatgggcagtccgcccttctgattggtattccatggatatttaaatatttgaaaaggaaaagtgttttgaattaaggcacaataatcggcaacatttatgcacttttggtgcgcaacatggaacttactgaacatgttgtttttctcgacaccgctctcaaagagtaattaacacttaattagcatttactgcctattaattatataatttatttgcccttggatgttccaatttaagcatttccgagttcgattctcagcaaaagcaagtgaacggagtgaatgttcactcggaagaccaatcgaagctttacattctcttcaacaattcatttgttgttttttacgacattacttccgacgaggttttgcagacgttcaaatcggagacgccaattacggtaacaaacggcaatgagcacttgaagcctttaactttgttaagtttatgtcgacgatttcctcactcacaaaattgctctgttctcatgccgatggcgcttattcatttctcggtgtttcagagaaagggtttgaaattgagcgcaaaaggccattcggaacgaaaaaatgcacaaaaattaccaaaataatttcttcgaaatcaccaaagtctgctctctctttt

SEQ ID NO: 41935 - DNA, 1545 bp, Heterodera glycines
tatagccctaattattagtatagaaattaaatattaaccgttactttatccgtttagtatttattttttaaatatggctattaaattttgtattatttaattaaaaatccctctcactttgacttgctctggcgtaatgcccaccaacttggccacttctgaacgcgtagaaaagtcaatgaattttgtcttctcaaataggcgttccaaaaggtccaattgagcggccgaaaagtgttgtttttgttgttgttcgtcatcctttagcattttataaattaattaaaattattagttttaaaaaattattgttaattacgaaaattttttagaatcataaaaaataaaatttacattttaaacataaacattaaaaaaaaagaatttttaagaaacaatcatttcaaaaaatatttagaattgaaaccagctgatttttagacttacaattagctgtaaatagctttaaatgatacaaaatttgtaaggattcgattatttaaaaaaaaagaagttaaaagtgccaaatttcgtcaattttcgagtttttaaccggttcaaaaaccggttttttggcattccacaacccgagttccattctttcgtgcttaaactcatcgaaccgaatcgattaagagatatcatataacacttttcttcaatggcgttcactattgtttatcctacctcgtcttcttcttcttgttcatcagcctcagattggccaatatcgctgaattttaaagtgaaaatttttaatcttttttggatgtaatatctgatcatttaccaagagattgcttctttttcttttagtccacatttgtaacgccgattttggaaccaaatctataaaaattggggacaaatggccgtttcggcgacaaatgttttcatttttcatgtaaacaaatcatgtaaataatcttgcattcatccagagaatgcttatcaagctttatatctcgaaaagggaaaaaaattgcacagaaaaataaattagggcgaaaaaatgaactttttatggctttttaggacgaaacacgccataattcaaagtttttttcgctgaaaagactaacccattgcaattaattattaattaatgaccgcgttcttaattgcataatcaaagttttccatgttttccatattttaatagtttaaattaaataattatttgtatatttctcactcttatttgcgcctctttgaggttaatttccttggccaatttttctcgttgagaagcagccaaataattgttagcctgatattcttgatccaatcgctctatttgttcaggtagaaattgacgtcgctttttttcggggcattgtttctttacaattaatttacagttttaatgacgcaattttttattttctatttttttattggccaatttcccaaagaccaatttattattctttcgcattttggccaaataagctgacacaaaaggtttgcttactaaacattccttggcaccaaatgtcttgggaggagatcggtcgttgacatggaaaattttttttaaatcta

SEQ ID NO: 41936 - DNA, 1007 bp, Heterodera glycines
taaaaaaaaatgtgaaatggaaaaatgaatttggcataaaacgcagcaaaagtaatgcctttaaatttttaatatttttttataattaattttattaatataaaaataacgatacgattttcaaaaggttgtaactgttgagttgaggttgagaaccgaacgaaaatcactttgttaccgaagaaaaaagtcattaaacgaatattcaaaaaagtaattgttaaaaaatgatcagttttgtataccttattaagggtccacaagttttcaaattaattgcctttctaataaagctttcagcacttgaaaagtgtctgcccaatttggcattccaaaagggaacaattggcatttatgctcaatggcacaatttgtgatattcaacgcattggaaggcccactgccaaatatatccggaaaccgattaagagcgagtcgaccgtaggtttttttaaatttttcttttttttcttttttacttttttttctaatagatttttttttgatatttttttatcgttttttttcttttaattatttttttttttattaatcttttttttctatttttttgaattttctatttttttaatcattttttactttattttttttgtttttctaatttaatttttttttatttttattttaagaagaatttatttttttgttttataaggttaaaataaaaaaattagcttattttattttttttagaatttttttattgcttattaaaggatcagctagtgaaattttcaagtaaatgtttattatatttcgaattatttttattttaagtttaaaagatttttcatttattagagtttttattttattatcagaatttttgtttttcattcaaagggaaaaaatttaaatatttttttttttagttttctaaactaaattttcctattaaataaaaaagtataatgagaaaaggtaataaataaccgaagctcttcttaaaagtaaaagagaattaaaaaaaggtaaaccaaaag

SEQ ID NO: 41937 - DNA, 1057 bp, Heterodera glycines
agcaaaaatggcgtagtttgaacgacacttctctaggtctttaggtgttttgagtcagaagtttcgcttttcaaaaaaagctagttgggatcgtacgttttcggcaaaagagtgcaccatagcaaaaatggcggagtttgaacgacacttctctagggtttgaggtgttttgagtcagaagtttcgcttttcaaaaagctcgttaggatcgtacgttttcggcaaaagagcgcaccatagcaaaaatggcggagtttgaacgacacttctctagggtttgaggtgttttgagtcaaaagtttcgcttttcaaaaagctcgttgggatcgtcctttttcggcaaaatagtgcaccacagcaaaaatggcggaggttgaacgacacttctctagggtttgaggtgttttgagtcagaagtttcgcttttcaaaaagctcgttaggatcgtacgttttcggcaaaagagcgcaccatagcaaaaatggcgtagtttgaacgacacttctctagggtttgaggtgttttgagtcagaagtttcgcttttcaaaaagctcgttaggatcgtacgttttcggcaaaagagcgcaccatagcaaaaatggcgtagtttgaacgacacttctctagggtttgaggtgttttgagtcagaagtttcgcttttcaaaaagctcgttaggatcgtacgttttcggcaaaagagcgcaccatagcaaaaatggcgtagtttgaacgacacttctctagggtttgaggtgttttgagtcagaagtttcgcttttcaaaaagctcgttgggatcgtactttttcggcaaaatagtgcaccatagcaaaaatggcggaggttgaacgacacttctctagggtttgaggtgttttgagtcagaagtttcgcttttcaaaaagctcgttaggatcgtcctttttcggcaaaatagtgcaccacagcaaaaatggcggaggttgaacgacacttctctagggtttgaggtgttttgagtcaaaagtttcgcttttcaaaagctcgttgggatcgtcctttttcggcaaaatagtg

SEQ ID NO: 41938 - DNA, 1689 bp, Heterodera glycines
tgagttgttacacactccttagcggattccgacttccatggccaccgtcctgctgtctatatcaaccaacaccttttatggggtctaatgagcgggcactttggcaccttaactccacgtttggttcatcccacatcgccagttctgcttaccaaaaatggcccacttggagctcaaacattcaacgcctgggttcagagtcaagcaaccctggcttcatacccatttagagtttgagaataggttaaggacatttcgtccccaagtcctctaatcattcgctttaccgagtataactgcttaacgagctccagctatcctgggggaaacttcggagggaaccagctactagatggttcgattagtctttcgcccctatacccaagtcagacgatcgatttgcacgtcagaatcgcttcggacttccaccagagtttcctctggcttcatcctgctcaggaatagttcaccatctttcgggtctcagcgcatacgctctgtctccgccccatcgcatgcgatcgagacgggactatgttgcgccccaacaccgcagtgccagggatcacacatcagctccgtaagaagccttcactttcattgcgcctttgggttttgaacacccaatgacttgcgcatacgctaaactccttggtccgtgtttcaagacgggtcgaacagatgaccggcttttacaccgagaacgtacaactgagagcccgagctggaccgaactggttgctggtacgtgtcgcacgcgaccgccaccgacccccagctcgagtcaacacggacccgaaaccattgcacaattcacccagagtaaacagcactcccccgatccgggtaccagaccccgaaaggctggcctcaagaccgagctcacgcagctactccgagcatctcagcgcactccgcctgcaaatgccccattcgccactgaacagaaggacagcaaaccccagtctggaggctagcaggccaacgtacagcaacaaacgggtgaatgcagaccagatacgccagctctgtccgtttccacctcatcggtttcacgtcctctttaactctctcttcaaagtgctttgcaactttccctcacggtacttgttcgctatcggactcgtggccgtatttagtcttagatgaagtttaccacctgatttgggctgcgatcccaaacaacccgactccaagacacgtaaagatgggtaggcaccgccagttggacaggtcttgcaccttctctggagccccggtcaagggaaacttgaacaagcgggccaacccaagctcacggtctatacgctacacctcgcaaccccagaggagctgcgattcagcgctggactcttcccagttcactcgccgttactacgggaatcctcgttagtttcttttcctccgcttactgatatgcttaagttcagcgggtgttcacgtctgagttcaggtcgaaaaatcaaagcaggaatgccagtaatccaggcactccgccacagcatgcaaagcattggtgcgcttgagttacggtccgtaaaacgcgaattagaaccacaagttcgcgccagcacaccaaaaccccacagccgagctgagcaagtaacgtaagaacacgtacaagtacatgatcccacgaagcaacgcacaagcagtgcattttatggtaacgaccctgaaacaggcgtg

SEQ ID NO: 41939 - DNA, 509 bp, Heterodera glycines
gcattaacaaagaaaaatactccaattcatcattgcctatatataaaatgtcaaccaagcaattagtaaatttaattttttttaatgaattgtaatttaatttttattaatgatttttgagactaaaaattttggagacttatcctctgtttcccggggtttgagaccaagaaaatccaagatttgttttttctgtggtccctcgcttgtgggcctttcaccaaccacattaattcattttactaagttaattactttaattttaatagcactccattttgcagaatcaacagtgttgtaccggacaactgctcggccaaatttaataagaactggaaaatgtgcgcttagggactcggtcgtttcggcgccgccgtttcggcgccagcccttgtttttggactataacttttttctttgacaaccaaatctaataatcttggtatcattctacagcccttcataagccctattacacctacgaaaaaccaaaaaaaaaatttgacctg

SEQ ID NO: 41940 - DNA, 98 bp, Heterodera glycines
gcacgtgccggcggctactcgccgccgaaaggcgtcgtgggagaaggggcggggagggccacggctcccgccgcggcctgggtcgctgaatcccggac

SEQ ID NO: 41941 - DNA, 776 bp, Heterodera glycines
  unsure (1)..(776): unsure at all n locations
taatcgagagcagggacggggcaaagctcggcttagcactcgaaggcgaagcccaacttttacttggaggcgaagctcgaagcccaaaaaaccgaaatttttgaagccgaagtttcgccggtccctgatcgagagtcgagaacgaagacagcgaaagaccccgagacgcgagatcgaaagcccaaaaaccccgggaaatttctctacttgataacagaccgcaaacagcccatacagatgattaggcgttagattggtagctatttgctgttctcattgtgggagcgcaaatgagcgaccagtgacttttaaagactttcgttgggaaaatgggtcgggtagtgaggttatctcttctcatccgttgtccatctcagaagtgattgtccgtccgttctcgaaactgtgtcaatttgtcacctgctggtgttccgaatgttcagtcatcgatcactgatcaaaccaatcgctgtgatcaatcgccagacttttctcccccccccccccgcttttgccgacccttacatttccttcaataatttttcttttttaatcccccccccctctgtctcgtctcctttttagtcagtacattcattctcgactttgtttgtttgttcagcttggtccactcacttcgctcggatggccaatgaacaaatgccaaatgaaagaacaaacaaaaacattttccttctgagggaacgatgaacggaccattcccttcttggccatcatttgctgttgtcaaaatgngttttgtttgtcnaatgatt

SEQ ID NO: 41942 - DNA, 1026 bp, Heterodera glycines
  unsure (1)..(1026): unsure at all n locations
tgagctggccaatgcttgtgccaacttcccaatttccctttgccaatgtgtttttggcatttaaccacgcgcgccattttgaagaaaaggtaaaaaattattgtcatcagcagagatgagattttttggaaataaaaaattgcctaagggtagccaaatacagaggaaaaacctcatccccgatgactctttaggttagagccctaaattgtatgttttcatttttcatggtttaaaatgattttgcactgtctcaaaatttaatggtttaaatttttgagtgcttaaattcatttttaaaaaattttcatccatattttgggatttttaccatattataaaccatttttcgggtattttttatatataaacatttactctaatgaacatttacatataattaattataaatatgtgcatttccgttaattcgtaggaatttgctctccgttgcttggatcacatcgatcagaatgcgtactcattgctcaaatccgatgcttttcttaaaattggcacaaattacctctgtgaaattctggcccgtgatcagcttcaggctgaagaaatcacaatttggaatgcggtaaattaaacatttggtgattttggcactatttcgaatttttgccaaactataggctcttcgctgggcggacgaacaatgccgtcaaatgggcaaggagtgttcggcggagaatcgtcgtgccatgcttggaccggcacttttccaaattcgttttccgttgatccaattggaagaatttccaagaaacattggtaattaattaaaatttatcatcacatataaatattttcattttatattaattggaacagacaggtcggcactgcgttttattaaagaaaaattctttggcatttttcacaatgtctttttacaaacccaaaactgaccaatcctttcaaagttttccggctgcanccgttgatctcaaaaatctcataatttaaacaatttatcgcggctaatcactgatcgatatcattgtagcataaatgcca

SEQ ID NO: 41943 - DNA, 668 bp, Heterodera glycines
caaaaatccaacgcagaattaaagtacagggctatagaggaagctattccggaaggattcggtctccccataaatctgggcgcatcggttcggggggactgccccgaaaacaaaaaaatcgattttttcaagtgtccgtttggggtactcaaacaattatggggagcaaaaatccaacgcagaattaaagtacaggctatagggaagctattcccgaaggattcggtctccccataaatctgggcgcatcggttcggggggactgccccgaaaacaaaaaaatcgattttttcaagtgtccgtttggggtactcaaacaattatggggagcaaaaatccaacgcagaattaaagtacagactatagggaagctattccggaaggattcggtctccccataaatctgggcgcatcggttcggggggactgccccgaaaacaaaaaaatcgattttttcaagtgtccgtttggggtactcaaacatttatggggagcaaaaatccaacgcagaattaaagtacaggctatagggaagctattcccgaaggattcggtctccccataaatctgggcgcatcggttcagggggactgccccgaaaacccaaaaaaatcgattttttcaagtgtccgtttggggtactcaaacatttatggggagcaaaaatc

SEQ ID NO: 41944 - DNA, 664 bp, Heterodera glycines
agcccaaaattttttagagaaagggacgtttgtttctttttaaatatcaaaacggattcagtcggccaaaacccatcgaacaatttgaaaccgaaactcgaaattttgcttcggaatggccaatttggcacaattccttggcattcggtggctttgctcactttatgaaattgctttcgctttgcttttcctccgtttgctcttccatttggtcaatgaattggtccaaaatgtccaaaaaagtgccgtctccgctgtatccgtcggcactttttctcaattcgactcgtctctcaatttcgttatcaaagaatttgaacagttccttcagtgtccattcgttttcgttgtatttttttgaaaagtatggcaaatggcgaagcctaaactttggcacttttttgatttgattttcccccttttttgccatggccgcgcttcgatcatttggctgatcagtgagatgaaatattcttgctccacgtcaagcgcatctttcagaaaagtgaatgttttgtagcggtccttaaatgtgttcaatttccttcttttttgtctcgaaattttggtaattactccgtaaaatgagaatccgaagagcattcggttgatcaccgaccccgtcatcagatcgaccttccgatcgaccgaaaggtcactgttc

SEQ ID NO: 41945 - DNA, 480 bp, Heterodera glycines
atttctcaatttctaaagcgattgtccctccgttgcctttgggcttgttccagtcggaaatccgagtttgagtggggaatttgagcaggctgaacccgggcacacaacggatattcgggtggcaatggaattggtaaacggcgacaaattcatcgattgtcaaaatgtcagaaacaactgcaaaataaaaataacaaaaactttttaattccattttgaatttatacataattaaataaaattatttaattactttttttttggtgaatttaagcaaattagtacaaatgaggaatttttgtaaatattgtaagaaatttctgaatttctttccgccgtctctctcacattgaaaacatttttaaattattataaagccaaaatagtgacgttacttttttagttacgaaaaatccaaatgacgttaaaatgaggaatattcgggctaaaaatttattttcgtgggttttcattgaatga

SEQ ID NO: 41946 - DNA, 1012 bp, Heterodera glycines
ctaccactctgccatgagaccacttgccagaaaaaggataatactccactatatgctgcaaggagatgacgtcaccactgcgaggggtactgtagttcggtgaaaaatcgcaataaatatgaagcaggcaagcggactcgaactttcgctctgccaccaacccaacacactaccactctgccaagagaccacatgccagaaaaagaataattgtcaactatatgctgcaaagatgatgacgtcaccacagcgagggatactgtagtctgatgaaaattcgcaataaattagccgcaggcttgtggactcgaacttttggtctgccaccagcccaacacactaccactctgccataagaccacttgccagaaaaaggataatactccactatatactgcaaagatgatgacgtcatcactgcgaggagtactgtagtccagtggaaaatcgcaataaattctaccgaggcaagcggactcgaactttggtctgccagcagcccaacacactaccactctgccatgagaccacttgccagaaaaaggataattctccactatatgctgcaaggtgatgacgtcaccactgcgaggggtactgtagtctttcgataaactttgaaaatacgcaaaacaagacaaaacgccataatatatatatatatatatatatacataacgccataatttattgaaacgaaaacctttcgcgttaaattcgaatttaaaaaattggcgggaaaagtggcgtcgtttttgtttctatcctcactcctacccttttttcaaaatcattcttatcttctttcattatttataacatgaatattttctgtttctgtcttttacaatgctgtttagccaaaccaaatatgaatttcaacaatttgactacgcctattgatgaacacacaatgattgagagcctgtctttggatgaaccatcaaacgagctactatctgttgaggttaacctttattaatattataaaatagaaataatatttagaaaa

SEQ ID NO: 41947 - DNA, 691 bp, Heterodera glycines
cattgtccaattcatcaattatcgcggcccttcaaaaacgtggctgcgagggacaattgtgtcaggaaaaggtgtagtttggcgaatttagtcgccacaattgcatgccgttgtaacccgtcatgcaaaccaaatccagaaattcgatcccattccatacaaggaaaatttgggcattgacaatcaggcacaaggcgaacaacaacaaccggagacaccaaaccgatcacctcgcagagttcggttcgctgacgaacagaacgaaccgctcgaacagatacagccgattgagccgagacggtccacgcgccaaagaaaagccccacaacagttggacatggaagtgaccaaaaccaaatatgattatgtcaaacaggggaagacaaattaaagggggagatgttgggatgttgtcagccattattattttctctcgctctcttccctttagtcatttctctcttatttttccacactctctctctcttgcctgaggcgcataaatagcgaccgttcccttccctttttgtccgtctcccagtcatttccaaattcagtccgtatttgccattcatctttctctgtctattttattattatgtttattcgcttctgacttattttattgtgttcaataaatattggtgtttgtgttctcccaaccaaagaacacaacaaatgctaaaatatg

SEQ ID NO: 41948 - DNA, 699 bp, Heterodera glycines
ccggtggcgcctatccggcacacgccggacctacattttccactatttttacaagttttttgccttaaaacggccaaaatttggtcatttttagtgaaaaagtccagttgttacccagccagggaaaaaaaattattggataaatttgcaaaaaaaaaaaaaaaggtcttcggaccggacccctccctttccccccccccccgaaaatttttcctggctacgggcttgccatctgttaacagtggaaaatagaaatgagagctttatacttaaattactttaacatttgtgtttttcccattcactgagccatgcgaaatcatcaattaaaggtcaaattaattgataaattaatttttctctttttattaattttccctcaaattcattcctcctttttaacaatttttttcctcaattttttgttgtttttagctttgtgtcgaagcccaatgtcgcaatgcgtcggatgtgcttcaaatggggagcaaatgccaacccgaagactgcaacggcaaaggcatttgcaacaacatgggcaattgtcactgcgttgcgggatacggggtaaatgagaatgataatcaaccaatcatttgatttatttaatttaattgagtgcttaattgatgtctgagtgtttaattgacgttccctaaactctttagggcatcgcctgcgattttgccgggccctggc

SEQ ID NO: 41949 - DNA, 905 bp, Heterodera glycines
tcacttatttttggggtttctcctttcatttagcaataatttttcttttttttcattttttctttcattattcttttcctactcattccgaattgtttcttccattcatcaattattctgcgactaattccaatttttttgctaatttcggcataattttggtgccattcttttctcgaatattttcttcctttttgcttatactcatttttcattgctataaattgttgaacaatttcaattttttgttcatccgtttttgatttgttaaatttataaaggccgaatatttttatccatttataaatatattggcgatttgtgcccaattttttcgctatttttccctcaattttattcctttcttttgctgaatattttttctctttttgtttaattttttcttttattttgttgaatttgtgaataatttctctctttcgctgttcatttctttttttcttccaaattttcttcttctttttcttcccatttttctccaaatatttcttcaaatgttttttgttccattaaaatattttatgaaaagatctggataaagttaaattccaattctcctgatcacttaaactcagaaattgtttaattgaaatttaattagtttttttatatttgtttctgttggtatctatggatatatccggatacgggtggatattgacaaaacgagcaatcagtagagagaaattaaatattatttataatataatttaataattacatcaataatttacttaacaaatgaagaatttattataaaaaagaaaattcatttttaagaaaatttaaattatttcttttatatttaggtcagtctgaatttaattgcaattattgaatttttaaaaaatgaaaatttatggaaataaaaacaaaatttgtca

SEQ ID NO: 41950 - DNA, 974 bp, Heterodera glycines
catgaccgtgaattaacacgtgaatcccgaccgtgtattaacacgtaaatcatgcccgggaattaacatttgaatcattaccgtaaattaacacataaatgatgattttgaattaacacgtaaatcatgactgtgaattgtcacgtgaattaacccctaaattgacacgtgaataatgacttaagttaaagttacatgaccgtaaattaacacgtaaatcatgaccgtgaattggaacgtgaatcatgactgtgtattaacacgtaaatcatgcccgtgaagtaacacgtaaatcatgaccgtgtattaacacgtaaatcatacccgtgaatttacaagtaaatcatgaccctgaattgacacgtgatttaacccgtaaattgacatgcgaataatgagctgaattgacacgtgctttaagccgtaaattgacacgtgataatgactgtaaattaaacgtacatgaccgtgaattaaacgtgaatcccgaccgtgtattaacacgtaaatcatgcccgggaattaacatttgaatcattaccgtaaattaacacataaatcatgattttgaattaacacgtaaatcatgactgtgaattgtcacgtgaattaacccctaaattgacacgtgaataatgactgtaagttaaacttacatgaccgtaaattaacacgtaaatcatgaccgtgaattgacacgtgatttaacccgtaaattgtcacgtgatttaacccgtgaattgacacgtgatttaacccgtaaattgacatgtgaataatgagctgaattgacacgtgctttaagccgtaaattgacacgtgaataatgactgtaaattaaacgtacatgaccgtgaattaaacgtgaatcccgaccgtgtattaacacgtaaatcatgcccgggaattaacatttgaatcattaccgtaaattaacacataaatcatgattttgaattaacacgtaaatcatg

SEQ ID NO: 41951 - DNA, 1137 bp, Heterodera glycines
  unsure (1)..(1137): unsure at all n locations
ttttataaataggtacctaaataggcataaaaaagtgatccttccaaacntttagaaaaaaattcatccaggtttcattgcctttttatcgatctaaatttatttttcgtaattttctttgtatttttcgccatgttcttccctgtgcttcgctntttgcctctntnngtcnnngntgctcncgcnnngngtcgcntnnnctctttcccccncgctttcngntggtttnnccngtcnctncctgcnntgttgtctgcttcnnccnnngttttgctcgcncttgncttgttttttcnntcncttggcncggcgcgtgggctctttctcttnnttggccttcggcccgctcggtctttcggggnnncgcgttttctngcgcgtcgtttttcccgtgcctgttncggttncgncttcctttccnccntcntgcgggggtcnncccntctcttccntngcncgttccgagtcgtcgccgtggcttttctgccnncgnccgcgctggtcntttgttcnnttctgcncggtgncgcttcttggcgattcttctgctgctgctgctgctgcacggctcatcagttgaagtagctgtctcctcctccgccgcctccagcgcccggtgccgcgttgcgcttgcccgtctcccagtcgtaggggaattcctggacgccggcgttgctgaggctgctgcgcaatgtcgcgatgatccagtcgtagtcgggcttgtcggtgtacttcatgtcgtcctgcaaaatttaatttgttagtttattaattttggaaaaaacgaacgaacgaactcacgatgtatttgaggacctggccgaactcgttcgggcatccggagagcaagtcggcgattgcctggcgtcgaacggcttccggttgtttcttctggcgtttgatcttttgcctcgccctatctgtaaaaaagaaaccatggaaatcaaaattctgattattcccctcccccccattcgctcacccgcttttcttttccccccacgattgggccccaatgggaggtgcgccttttcagagctccactcatgcagtagaacccccgatttcaatgtcgtccttgtcggttgtattcggcgtcccaaatgagcgctgatcgcagcgtaaacgggagcttcc

SEQ ID NO: 41952 - DNA, 1354 bp, Heterodera glycines
  unsure (1)..(1354): unsure at all n locations
cgagttacgaaaaatttttgagcctcgtaatgacatctcttatacccaatctctctactttacttgctacttgcgagatgcgaatttggctgttgttctcccggcaaccgccctcttcgtcctttnggcaattgaggcacccttgtggacagtatttggcgtactgtttgtcgcaacagtaataacaactgcagcgtgttgaagcaatgacacaatttttgttttggtctttaacgatatcgaactcgcagaccacacagtttcggccgaaaatgttgcaatgtgggccgggaagatcgatggcacagctaaacaagatttatgctgccagtgggtcggcctttttttgcacaaaatttaattattcgacatttaggggcccgacatttcggaaactgacagtcggggctataggttctcggcatggaagtggggcagttccgtctgagccaagtttagagcatcataactgttttctttgttgaccaaatccaacaacactggtatcattcgaaagcgcctaacaaactctattggcttcccaaaaatcacaaagatataccaagtcttgggacaattacgatgttagttactcccctggataaattatttttaaaattaaaaatattacgttaagctaactatgtcatgacagcatcctggtacataacctataacattagtgcatggagaagcctgaaaaaaagaagattactatggaataattaataaataattggcttacttgtgggacaaaattggcgagaaaaataactccgatggacagaaaatttgtgaaaaatgccatcttgacaaaataattaaaatatattttaattaccagtaaatatttgaaataagaattctgtgattttataaaatttgtagttatgtgctcagtttttgcagctaaccaaattaaaaaattcaaaataaaaatgctttttttaagaattttaattaaaaaagaaaatttttagattttaataaaaaaattatggcgaacggggctaaaccaactaattgcattttgcttatttctttaccacatttatacaaatggacgtgtggatcagaataattaatttaatgctttttaaaatgaagcggaaatattaaaatatttttggtttttatttataaaaattaataatttattcaagactaagcatccgaaaaaatgttttgatgatgaagaaaaactgctattagaaagcaataaaagaacaaattaattcagagcagaaaaaagaaaaagggatatgaaataaataaagaccggacttttaggcacgaaaatttctcaaataggcacctaaaataggcacgaaaaatgtgaaaaaaatgttcaaaa

SEQ ID NO: 41953 - DNA, 1009 bp, Heterodera glycines
aaatttttccattaccgcaagagctgcggaatttgtgaataattctcagaaaaatggctatctctttttaggacattttctatctcgtaaccccgatgctaatccgttccgcagagcctcttcaaaattttttccattaccgcaagagctgcggaaattgtgaattaattctcagaaaaatggctatctctttttaggacaattttctatctcgtaaccccgatgctaatccgttccgcagagcctcttcaaaattttttccattaccgcaagagctgcggaaattgtgaattaattctcagaaaaatggctatctctttttaggacaatattctatctcgtaaccccgatgctaatccgttccgcagagcctcttcaaaattttttccattaccgcaagagctgcggaaattgtgaattaattctcagaaaaatggccatctctttttaggacaattttctatctcgtaaccccgatgctaatacgttccgcagagcctcttcaaaattttttccattaccgcaagagctgcggaaattgtgaattaattctcagaaaaatggctatctctttttaggacaatattctatctcgtaaccccgatgctaatccgttccgcagagcctcttcaaaattttttccattaccgcaagagctgcggaaattgtgaattaattctcagaaaaatggctatctctttttaggacaattttctatctcgtaaccccgatgctaatccgttccgcagagcctcttcaaaattttttccattaccgcaagagctgcggaaattgtgaattaattctcagaaaaatggctatctctttttaggacaatattctatctcgtaaccccgatgctaatccgttccgcagagcctcttcaaaattttttccattaccgcaagagctgcggaaattgtgaattaattctcagaaaaatggctatctctttttaggacaatattctatctcgtaccccgatgctatcccgttcgcagagcctctt

SEQ ID NO: 41954 - DNA, 899 bp, Heterodera glycines
agaggagaagaaggtaaattttcgaactttcacaaggtctaccagggaaaattgaaaccggaaattgttgacgctaatcaacttggtccttctgcaccactgataatgtttaatatttagactgtaatgagatgatttttaataaatccaagagaatttcggagtttcgactccttaggctacaaaaatgaaatgaatcagtgttgcagaagaactcagttgataaggtcaataatctccactttactattttcgctcgactaatttgtgaaattgttcacaatttcagctactcattctaaaaatataaatggtatcagtgttggggaaggaccgaatttataaaaagctcaacaaattcacatctacaatttctgttaatttctacaattatttttagaggagaagaaggtaaattttcgaactttcacaagggtgatcgagaaaattgaaaccggaaattgttgacgctaatcaactcggtccttctgcaccactgataatgttaaaagcaaaaaaaaataatataaaaaaaaattaaataaaaaaagaaactctttacttaaaagttttaaaccatgttcacaatttcagctcctcattctaaaaatataaatggtatcagtgttggggaaggaccgaatttataaaaagctcaacaaattcacatctacaatttctgttaatttctacaattatttttagaggagaagaaggtaaattttcgaactttcacaagggtgatcgggaaaattgaaaccgaaaattgttgacgctaatcaactcggtccttctgcgccactgataatgtttaatatttagactgtaatgagatgatttttaataagtccaagagaatttcggagtttcgactccttaggctacaaaaatgaaatgaa

SEQ ID NO: 41955 - DNA, 1428 bp, Heterodera glycines
  unsure (1)..(1428): unsure at all n locations
ttataaataattttaatccaatttataattttaaaaaccttacagaattncaaattttgtaaatttaanaaatattttgcctttaattgaaaaaattaaaggtaataataaaaataaaatattttaatataaattaaaaagnaaaattaangattaagaaanaatgtagttantttatgttaanatatnaatgtggagtgntttggtagaatggtgnanatgaagatattatttatagattttaagaatatgatgnaaatnnttaattgnaaaaatagnnnaatatatgaagatnattaataagataaaaatttngttaattatattgattttattaaaaaaattgaaattnttttgtaattnaaaatgtttaataataattagtgtatttatttgtattgtttatatttaattatttaccattaccaataaataaactattgtattagaaaaattaaaaaattaatcctttaaaattatgaaaactttgttacaataaagcataaacaactgaaaattttaaataaatatcaaatattgttcgtcattctcttgtgcaatcattaaaaaaattttttactatatttactttcacttaattatctatatattagagatcggtattttccaaaacactttcttttctgcgttcaaacattaattaaaaagttttattggataaatatttaacaatttattgttttataattattggcaataaataataatttctcgatattgactaaataaaaataactaattttcttttattgattaattagcaatataacacattcgtaaaaaaaaggatttccaagaaacaaaggaattatagataatgttagaatgaaacctgtttgattgaaattagaatttaaagttcaaaaaataattattaaatattaatctttaaaaaacaatagcaagacaaaaaatatttcaaatagttttataatgttacattattgcttcaaaattattttttacaaaaagaaaaacgataaaaatcttaacaaataaacttgattaaatttggacaatattttattgttaaaaacataaaagttgtattgatttcatactttttttgagaaactatcaatgatttaaaaatgcattgatttaaatgaatgaattaattaaatttgattgaataaaatgaatatgaaaaaatagctattataatatcacctaatataatgcatattttcaagtatcgacactttcgaacatctgtgcaagttgagaaatttacaacaataatttaatcaattcaattaaatgattttagattaagtaattcaacttaaattaattataaagaaaaatttaaataaaaaatatttgcacaataatatgccagtagatactttcacttatatttaattacaaacaaattaacctttaataaaatttattattcaaaaa

SEQ ID NO: 41956 - DNA, 1082 bp, Heterodera glycines
  unsure (1)..(1082): unsure at all n locations
ttttntgagttaaaaataaaaatttccaaaattanttctatcatatagaaagttacaatagcaaaatattttatgtaaaatgccagcacttttgtcattttcactgttcattttgccaattttaatatgtgaggggggggggggggaggcggttcggtgggaagacgaaaattcggatgacaatttaaacaatatcttttttggtttgactctaacttaattaataatcatcacatttgccatggcataatattggaagaacaaaacggcaccgccgaaacattgtggcgaatttgattttttaaaaaataaatcgcccgggtggtcattgacgacgaatcgagagcagagaaaacggcactttcgcaatttccaaatcaaagtgttatgttacaacttacaattagcttaattagttaatctcctgatcaaatattattattttttttatttaaataacttacacatttttgtcttccctctgatgaaagaatgttgaattttttagctttttaggttaacaactagaaaagagtttctaataataatagcttaacaaccaccaataaaatgtttttcttttttgtgaccatagggagctttggaaaaaatagggaaaacccaaaaatatcgtcactaatcataaaaaacatcatctctctccaaacaacaattatttctgcgccagcatttctttttcaatattaattcaataaaatataatgtgagtgtatttgaatggtataacaaaacaagaaaaattaaatatcctaattaggaaattaaaaataataaattaaatacgcaggcatttggaaatgataatatcaagaaagaaaccaatatgaatatgaaaaaataataattaaaatcaatatattttggttggcacttccgcttggcattcatttaaaaccaaaaaagatcggcattcgctgttttcaaataaataaattattattaatcctcaagcccgcagcatgatccgctaatttgaaatttccgggtcttattccttattatataccaggggactaggtcgttttagcttttttatcttgtcgaccaaatctaacgatctt

SEQ ID NO: 41957 - DNA, 733 bp, Heterodera glycines
ttcactggggactcagtgtgtaccacactcagattgcttctgttcggtttattactctgatttttgaccaagctcattaagttctctcgaatattaccaaatatgtctgggtttgaccctcttaaaaggttaggaggacccaattttgtccattttttcgtgatttaaaccggtttaaacgctttgccgcgccgtttttttttatggtttaggcattttcagcacctaagaaacctataaaattgtttttatgcaatttagagtctgtgacctatgatggatatttaccgaaccgctaaatgataaaaaaatgttctcgaggaggtgctagaaaaaaatttaaataaaaaaacgttttaaccatttaaataaccgagtttgacattaaaacagggcttcgatttatctgatttatcagaaatgttctgatttggagggttcaagtctgaaaatcataaaaaggttctgatttatcagaaatattctgatttagggtgctgaccaaattttgttctgatttcttaaacattcttaattttgaaattgtatgataatgtttttattttttctagaaatattaaaatttgacacaaattttggcgcacgacagactgcttcctccgccccgcgtctcgccccactaagtgctcctcctttttgcgttgttcataattttactcgttggacggttcagtcccaaaggtattaggccctttcagtccagaatcaataa

SEQ ID NO: 41958 - DNA, 928 bp, Heterodera glycines
ttatcattttttaatctcctttcttcttccttcactctctcgtgctctctcgaacaatttttaaattagggttacaaaatataaaaatttgatgagacttttttccaattggattcttttctatatctttcgttttgttttataacgaaaattcacggggcaatttacatctcagcctccgccgaaggttaattgcaaaacgggcagaattttcccccgttttttcgatttttctttttagatgaatttagataaggggcatagcctttataaaaaataaatgccgctttttaattatggcaaaacattcaattattctttttaccaaaaacaatgaatcccaaaataattccaaatgaacttttgtttgaaataatcgcctttatccgctttaaccgcaaatgggcaaagtgccgagtttgtttttcatttgatcaatttttgatccgacggcaagctgattggctgaaattaatattcacagtggtcagacacatattttctcttttccacaaataaatacatgaatttactctgtttttctccctcgtcccccaccaaaattggctcttttaaaagaggacgatccaatgcatactgtatttgatggattactgtcgcaaaaatattgtttctaattaaattatttaaaataaatactcaaaatacttttcaggttaagaactgcaaatcgttggtcagaagtttggtgaatcgcatcaaacagattccagtgaattatgaggtccacatggatggtgtgccacaaagtgcggcacgtcatcatgctgaattgacgtacattggtaagtaaattttgataattatattaaaattatatataatttttacacccaaataaaaagttcggtcactttagggctgtcacgactcatcaaccgacttccaagtttgcctgctgtgcgcg

SEQ ID NO: 41959 - DNA, 774 bp, Heterodera glycines
tttctcggttcccgattcccgagtcgagaaatttctcttgtttttggggtctcggttctcgtatcaacatatacccatctattcctcaaggtctgttattcacgaatcgaaggaatttttggataaaaaagaaattggcaaaagttatgggtcctcaaggacgcctaaagtgcaaaagagctctagttttaagcgatgctaaaaacgaaaaatccaactcgtactgcgatttgagataaatttctgtttttgcacagtacagttgggaaaactagtacgaattgggtttagtccgctaaaaacccaccaaaaataggttcaaaaaatcttagtttaaaaattattgctattaagttcaaagagtctgttagcattcccatgaaataagagagcattttccacttaaacaaaatataaatgccagggaaatatgcaagaacaacaaatccacatacatatattatacatatgaacattatcacaacattagtgggacaaatacaattatcagcacgacaaatgatgattatcaatccttttttcatttattgtccatcagttttcacttcgcatttcaaaatccaatccgtgtccaagacaaatgtgccgccggctgtcaccaaatgccaaaatgctcaaggcacacgtccaatagaccttccacctccaccacgcctgtgggaagacatttgacgaaggaatcgcctctcgcgcgcattatttgacatcacacaggagcaaatgatgaaaatcggaacacagcagatgacacaa

SEQ ID NO: 41960 - DNA, 893 bp, Heterodera glycines
ggatgagcgagtgcccaatggctggcattagtgcgcgaccgctcgcagccgcagcgccggcgcggccaacgcggcgcgccgcccgccactaattaccaactctgaaaattgaagggcatttaccgaagaattaagaaaatccattaatttgtaaaatcaaaaaatttgctaataaaattgcaattgtgaacggatcaatagaaaataatgggaatttttttgaatgtaaagtcctttttcccattctttggaagaacttttgctgtgattcattctttcattctctcccccggggggacggacaaacggcggagaatgaatggcgaaaaatgggaaatgaatgccaaatgcattttaatgggaccaatggcaaaaaaggaggacagaaagggagaggtgccatttaagccaggaaaaatgactttcaattaccaatttattcaaaattttgatatttaatttaacccttttctgacccagaaatagtgcacgaaaaagggagtagtagacgacgagagtaaatcctccatcggatatccccattaatatttggtaaatcactagccgaaattgaccaattttggattttgatgcggtttttggctcaaaaattggaagccttaaattttgatatgaatggtgtaatagaaataaatgactttttttaattgaaagccctttttccattccttggcgagtggggaggcgagcaccggaacatggagaacattggctggtatttttctgttttaggggcccgatttgaattttaaaaaaatcaacaaagggtttggtatagaattgcaaaaaatatattcatttccattgtataaattaacgatcgatggcattccaagaaatttattgttagctcaaattctggcatttatacc

SEQ ID NO: 41961 - DNA, 705 bp, Heterodera glycines
  unsure (1)..(705): unsure at all n locations
aattccttgaaaacattaaaattctttaaaatttaccataatcaaaggcacaaagaatgggaagctcgaaaagacagcagcagctctgaccaaattaaagaaagaagaaacaaaggatggaaagaaaaaaaggaatatcattaattatttgtcgattaagaatggaaaatagatgtgaattttattttataaaaatttctttagttgttaatttaaaaaaatcataatcacaaatgaaattttccaataaattgcgggatcccgccgtgcgggattgcgggattttggaaatttcgaaaaaaatttaaaactaaataaaaaatttcaaaataaatatacctaaaatggcgacacataaaattttaattaaaaactaattgaatgaataaacgatggaagcagaatttgttattttaaagatcaaaaaaaaaacatatttttgaaccttttgttcaactgttttttgcgataaatagaaattggtttaactgtaaaacacaccctttggatttcatttgtcattatggtacattagccaaccgtatacccattanaataatgtgcatgaaaaacgagacctttatcttttttagtcgcttctagcatgaaatttttgttgctttttttatgcgtgaattcattaatttttctacaaaatttcaatgaatcgcaaaggtggttctaaatggggaaaatattttttta

SEQ ID NO: 41962 - DNA, 626 bp, Heterodera glycines
accgacgggtggaaatcaccgggccaaccgaccgcaaaatggtgatcaacgcgatgaacagcggcgccagggtgttcatggccgactttgaggtggtgattggttgttgttaattgcttttgtttcgacagtatggtgggggagttggggcttactgtatcatggagggctattgagtgggtgggcgcattggctcccggacaatccgacagtggacaatcggacagaggtggacaatcggacagtgaggacaatccgacagagatggacaatcggacagtaaattacactaaaagatattaaaatgccgtcgccgaaggggaccgattgtgccgtatcaagaaaaaaggaaaataggcaaataaattgagtttttgtaataaccctaaaatcaaacgatatgaatgtgcgattaatactgtaagggtgtggaaagtcattcaacagccaatttcgttttctttgtacaccattaagcacttttgtcaaagaaatgtaagaaagtaggcattggaattttattgatcaaaatttcacctctaatttacaagacggcattcgtgtgcgaggaatggcaagaaaaagcgcttttatttcaataaagatgtagccgtaccttcaaaatg

SEQ ID NO: 41963 - DNA, 1632 bp, Heterodera glycines
aaaaattagtgaagaaaattggagtcaaagggaaaaaataaaaaataataataaatatattctttaaaagtaacactgcccaagtgtgcaaatggcctaatggttagtctccttgactttcccttcttctttcccctggttcaatccctctacagaattagattattttcattttttttttgtatactcgtgggtttcctataaagaaaatatgattcctcatagttttttttaaattgatacatattttatcattttttaaatgaaaatcctaccaattgaacttaataatcgcaaaaaccaacctttttttgttgaaaatctgttaacaaatcgcattaaaaattacaaaaattcccccccggcggcgcctatcgcaccgccggaccccttctttcccaaaagttttttgaaaaagcgctccgaaaaaaagtgatgtgaaaatcaaatctgaatttctattaatattcgatgatttagtccaaaaatgattaattgtttgaaataattgaagaaaatttgtttgaaaattttcattaatttaatttattataaaaaaccaaataattttgtattattttcacttgatataaattaaaatttgaattttttttttaatttttaaaatttttttgaatttttaaaatttcccggttggtcccggttcacggtttttcttgcggtcccggtcccggtccccaaaaaaaatcgaggtcccggtcccggcttctcaggtcccggcaagtcccggtcccggttttggcaaaaattcccggtcccgtggcactctagtgtaaaccttttgaaaaagtgtctgtctgtcggcggttcaaatttaaattaacctaattaaattcatttgcaacaatagaaattttcatttgatgaatcactctcgctaattcaaatataatattttttaattatttgaaattgatttttcatcgcaaaaaaataaaaaatttattttttgcttaattcttttctatttgatttttgcattcaaatatataattttttcagctagccgctttacaccaatcaccacacctcaatgtacacgccgactgagcacgcccactgcacatcgaagcgccactgggttccgctttgcacgtccgtgtgccggagggagcgcaacagttggatgtaggcggatgagaagcggtaacgggtcggatttggcttcgaattgttgtgcaacgacgaggatgaggatgatgaagtgctggtagtggttgtggtggttgagtgatcagcagatttttctgtacaatttaaaaattaataagtatgcagccatcccagttttcaaatagcttacgtacttgtcgaaggttctgagcacgactcgcgcaaatggagataaccgtcaggccgaagccattgaagagcattggcaacaaattgtaccgcttcctgatcagccaagtacatcaacaaccaattagtgaaaaccaaatcaacactagcaaaaaaatgaaatgagaattgaaattgaaaatcatttaatgtaaaaaatcatttaatgtaatacgtgtgtatcaatctcaaaattattattattatgtcaaaaatagatttcgagaaaaagtgatcaggtcctagtaaactagaaattaaattaaatgt

SEQ ID NO: 41964 - DNA, 1409 bp, Heterodera glycines
  unsure (1)..(1409): unsure at all n locations
tttagcaaatgtcttgtaaattttaatgagagtttaaatgtatttttatttttgagttaattttatgttttattttatttaaattaatccaaaaaataataaatttatgtacaacagtgaattgttctttttaattgaataaatctttatgttttttaattacattttgaattataacttcgaataaaagtgattgttttttttaatttaattttctcatgatattgaaagtgagataatttaattaaattttttgataatgtagataattatgattgattatttataaatataaaaatcgtatatttaccattcctttaatagtgcctatcttatgactctctaaagataggataaaacgattgtgtagcattattccctaatctgttttggacattttgaataaattttggtcattttttggttgcaattgaaaaaagttacaacaaaaataagtgatgcaagacatatttgtcaccctgtaattttttatcaacaaacaaatgaaagtctgcgatcacatttttgagaaaaattttcaattctttaattttaatagcgctccattgtcaattgcaattaatttggtgatttaatttaaattctaaattattcattaatttcattttcagcaattattttatcaattgattcaatttagtgagtgttatctctactcttggttattgttttttataattttatttaaggttctcgatcatcttcgattcatttttactaattaaaaaaatattaaattttattatttataataattttatttaatattaaattgatattgatattgatttccaataaaatgaactaatatttaattttataaacggtaatatttttgaatttagcttaaacaatttgaattttaatatttattatttaaaagatgatatattaatgctgtccttttttcctcatcgcttttccagctattttttccttagttgttttattgaaatatgaattttaatattctttatgaatttttttaaataagtttcatataataattttagttaattcatttatttgttatcatttgattttaaattaatgctacaataatttctatttttaatttgaaaccgattaatttcatatatggtatgtatggcttctctttttatttcatggtctccatactcatcttcatcttcatttcagaagttagcctttgtttattcaagtttctgaaataattgggctcttatttctgccgaaagtattattattatttttgctanattaaatgagtatttaagtgaatattttttacaaattttanagtggacccgattatattttcaattattgattncagaattgaattattttagcanaattatttaatattttattanttaagcgctttaatatttttcanaaattct

SEQ ID NO: 41965 - DNA, 817 bp, Heterodera glycines
agtgttacggtagagtgggggggggggggggaagtgcgtttccaattagctaattacagtttaatttgtcccgaaagaagcatctgaaaaataataaattagagctcgacctgctggacctggatccaggcctgggtttttccttgacccaggtccagaccatttttagatggacctggattttactgaattgttgtccttaaaactaggcccaagtcaaatatgaaaaaaaatcgggtccaggttcaggttgggcacgaaaaacctgaatttccttgctaatattttagaataaaaatgataatacatagataatattttctaaatattgcgattttatgggtttatttgctcaacaattttaaattcttttgttgtattgatgaatcattaattgactttttaaaatataaatcagaattggaccaagcaaaacaaagaaaacaaagaaacgtccaattttaacaattaattttcaaaacatttaatttttggaaattattatttcttattttttatttaaggatccaagagattcgagaagagtggcactgaaggtgttctgtttttgagtcgacgaaccccccaaaaatatataaatttggcttttaagaaaatgccaaatgtcttccaaaatttggccagctgtaaaagagtgtttcgcgagttgcacatggtgtgttagcaataagttaaaatgccaaaatattttaaagtattgaaaaaagtaataaaatattttagaaaaattttaatttttatttatgaaagttaatgataaaaagaaatatttgaataaaaatgatattttttgtga

SEQ ID NO: 41966 - DNA, 1311 bp, Heterodera glycines
  unsure (1)..(1311): unsure at all n locations
agcatttgccacgttcagtgatcagttactacttctaccattattcatcaccagccatccttcttcctttactatcattagtgaaacgattaaaaatggattaaaaagaaagattggcgaaatntatgaaaaattgaacatttcttgttcgcccaaacctgcttcgttcacatggatgatttaatgaaaataaatataagttgtaaaaagatggaatgcagcaccattccttacaataaagaaaatcatttatcgaaaaaataaattttcgcacatcatataactcatacaatataaaaaatttaataaatcctattcaattaaagaaattttttagtaatgtggaaataaaagaaactaaaaaacgagtgaaaatagttgcttaaaattaaaaatattgcattaaataaatttaaggaatgattattaataaaaaaaatcaaattgaataaattttctaaaaataattttttaataaaacaaccgtcatcaatttacttgcgtaatttaaccaggcagatgaaaaaaaacaaaacaaaaaaaacaaaataaaaaacggtattgaagaaattacaaatatttacctagatatattataaaatttacaaagaaagttgatcttttcggcctctgttaaattctaattaaattactaaaccaaagtaatataaacaaaaatataattaaataatatattcaaaagatattgaactaaataaataaataacaaaacattacttaacattaattattgtggcccaagcgcctgacaacaacacaattatttcccgacgaggaacaagataaaaatctattaatttttatagaaattatttacgatgacctaaaacttcataaaaaaaacaagcaagataaagaggatgattaatattaggcataaacaaacaaaacaaaaatgtcaaatatttgataaggcaaaaattgagtaaaaattttagtatgaaaaataaatttaatttaattgtatgatttttgtgaattgaatagaaaattaataaatgtaagatattttatgttacttttttggaaaatgaacaatataaagaaattattctttaaagtaagaaaaaacaattctctttaaagtatatatctataattaaatcataaatataattcttattatcagaaatcaaaaatatgctattataaaacaaaaaggaaaatgaggaaactacaatctttaagcgctctaaatttttttttctcgatgatgattatgaacataaaagaatcattcattagttaaaaatcattaattttatttatgtgaataaatatacttttaat

SEQ ID NO: 41967 - DNA, 812 bp, Heterodera glycines
gttctgtccgagttgagtgagcaagtgcagtcgccccccccccaggggatggatccattactttgcccccccccaataacctccaatctccccccccccaattactgctgctgttgtttatttgtccacaattcgtcgcccccattgcccccccccccctccccaaccctcccgcgctctttctcaattgtcgacagtccatcaaaattcagcagcaacagcacacaattgagaagtcgggggaatacgcggcgcacaaatttatgtgctgccaatgaatccgataaacaccaatttgcatatttattataaattttttttttttggattttttcgattcaatgttttcttatattatagtccattgatttaattaaggtcagagttttatgcatttttatttgatatgacaaacaaattgaatttattgggaaatattacatttttgaaagctctttcggtgaggataagctgatcaaacaagccatattaagtgcaaaggatttgaaattattacatagagaaggaatcttgggaggaattcgatccaaaatcctttgggagagtccccacaattcaattagctgtgcaaagagaacgaaaagcatttcatcgaacggacgatagggtcggtagtggggcaattaagcttggataattaatagttccggtcttgaagattgtactatatgtattctctactactttccaatgttgtcccttaaaaaagaatgcaatttcttaaaatactataatcctttcataaaataatgaaatttggcgccttgtcatttggcatattgtttttcccg

SEQ ID NO: 41968 - DNA, 823 bp, Heterodera glycines
ttttttgcaaaattaattcataagtattttttcagaaagtgctctgaaacacacaaaactttatttacaggttaattaaggctctctgatgttttttctatcaaaagggagatgaataaatattttaaaaatttttaattcctttttaaacaggccaaaaagtttaggcttatattttaaaaagtttcatcgaacctagcgcactaaaatcgatataatctctccaattttgcaggccttctccattgtaaaggactaacttaacctgaaaaaatgccaacgcttgttgtttttaaaatttttcgaaattctgactttttcattaattatttattattttgcaaaattaattcataaatattttttagaacgtgctctgaaacgcaccaaatgttaattaaaagttaaataaggctctctgatgctttcactatcaaaaagggagatgaataaaaaatctaaaaatttttaattgctttttaaatttgcgaaaaattttaggcttaactttttttttataaactgatcagaagcgaaccagattttgcgagggcatcaaaaagacaaggaaaagcactgctatgatgctaactccagtaattctgaatttaaaattttttattaatttttaaagcttcactattttatttttttagcaaaattaattcataaatattttttcacaaactgctctgaaacgcaccaaattttatttacaagttattttaggcactcagatgctttcactatcaaaaagggagatgaataaaaaatctaaaaatattgaattgctttttaaatatgcgaaaaattttaggcttaa

SEQ ID NO: 41969 - DNA, 985 bp, Heterodera glycines
  unsure (1)..(985): unsure at all n locations
aaatgtaattttttttacatgaaagcatttggatggcttgctgttnacagtggnctagtcnttcnttgcaagaagcagcacaactttgtttgggcccacngacccnccanaccattcgaatagcaatcgattgggctgactagactccatatttgcaggaatagcaatggcaggtctatcttaaaggcctgacgagttatgtttcgacaaacatcctgtacaccataaatcgattagcaaatttagtcgaactatataaatttttcaaaaaatgattcatcttttttatggttagcgcatatgtctctagctttatagaaacggtcccagaatctgcgaggaactacttttttgagaatttctatagattattattttgcatgaatccttcgcttaaattcccatttatcttataaagtcagattaaattaattaccccgatttgttttagaattggtccaaacacgcttgctaatagcttttcttttcgaaaagagaggcgaggaaaaataaaggttgcatccaaatgtaatttttttttacattgaagcatttggatggcttgctgtttacagttggctaagtcttctttgcaagaagcagcacaacttttgtttgggccaacgaccccaaaccattcgaatagcaatcgattgggctgactagactccatatttgcaggaatagcaatggcaggtctatcttaaaggcctgacgagttatgtttcgacaaacatcctgtacaccataaatcgattagcaaatttagtcgaactatataaatttttcaaaaaatgattcatcttttttatggttagcgcatatgtctctagctttatagaaacggtcccagaatctgcgaggaactactttttagagaatttctatagattattattctgcatgaatccttcgcttaaattcccatttatcttataaagtcagattaaattaattactccgatttgnttttagaattggtcca

SEQ ID NO: 41970 - DNA, 1240 bp, Heterodera glycines
  unsure (1)..(1240): unsure at all n locations
ttattataacccanngctttggaataaataaaggaattttctttttcgtgttgaacgcgcctttgggttcctataagcaggaagccttcagatttagccagaattgttcattcagcagcgaataattttgcatgttttttcgttttttattttgtagcctaagacaaaaggaatagattagtcgttaattttaaaataactgcaaactacgatgtctattgacaatattccttatactttccgagtcggccatatttatggatatcattgttgcagctaacttttatctctgatgtcctcataaataaattagagatccatattgacaaaaaattatcttataaatgattgtcacggatggaagtaaacagttgagtcataataacaatggctgagttcctgtaaaaatacaaaatataattaaatttattataacccagctttggaataaataaaggaattttgtgcttcgtgttgaacgggcctttgggttcctataagcaggaagccttcagatttagccagaattgttcagcagcgaataattttgcatgttttttcgttttttattttgtagcctaagacaaaaggaatagattagtcgttaattttaaaataactgcaaactacgatgtctattgacaatattccttatactttccgattcggccatatttatggatatcattgttgcagctaacttttatctctgatgtcctcataaataaattagagatccatattgacaaaaaattatcttataaatgattgtcacggatggaaataaacagttgagtcataataacaatggctgagttcctctaaaaatacaaaatataaataaatttattttaanctatctaattataatacncatattatttcattccttcttaanaaaaacacatttatatacacatactatccacaaaaaatcacacacaccaactcaaacaacnaaacatctctcaatatatacttcacanaaaaaaacatctctcattttnacatactatttctttatctctattaatacataaacctaatatcaaatctctttttacacaaaacaatctcttttattttacttaaaattttaaacaaaatttcaaaccatcatatacctatttntatcttncactttcactaacaacccttccataaggtcctactatattcttcnaatcccgtattcttagcagacataggataaatcattgaatttaaaattttctttaaa

SEQ ID NO: 41971 - DNA, 635 bp, Heterodera glycines
tattcagtctagttcctcgattttgttcataagcattgtgtctacttaggcccgtcctcaaaattttttttttttgctccgggtcaaaatttttttgtccagtgtaagtgagctaatttttcgcgctgtagaattccccccccccccccccgcttctttcccactttgacttttttagatttaaactcagaaaattttttatgaattttttgaaattttacggggtgcttacaatttttcgccccaattttccaatctgcgcaaaaaaattaattatgtaattaaaaagagtgttttctgaatactaataaaataatggaataatacacaaattatcgaaaaaatttatttttatttatttttctttttttttattatgatgaatgactatttttttaactaaaaagtttcggggtaaacccaactcatccaaacccaactcatccatagcacgatacgagtcgtcgccgtggcatttaatgccacgactaagaacgtacaaccaaaaaatactacgactaagaccgtacaaccaaaaaatgccacggtcaagaccacataagcagaaaatgcaggggcgtatctagaaacatttttcgggggggggggacccgacccgaagacctttttttttt

SEQ ID NO: 41972 - DNA, 868 bp, Heterodera glycines
aaacagatcctgtggggattttgcttagcctgtggtcttaatcagtgtaaaatgaactggaccaagagaccgtaaaaatatttttttttcaaaatatcacctgaaatcctggattttaaaattccgggatctaattaaaaagagaaatccgatgagcccttttttgctcttacaaattagtcacaaaagtatcgttagcccgacattgggctttggggcagggggggggtgtcctttctgaatttttttttcgtcggttttacatgggtacgactctaagttggaaaatcgaacctcccgcattattttgtaagaaaatgcaaataaatacaataaattgaggagagaatggaaatgagaggaacgaagaagaaaaaacaacaaaacaatgatgggaatttgaagggggaagaatgggaaattggggacaaattgagaaaaatgtaacacaaaacataatcaaattttggtgttccctgtggctgatggttcaacaattcaacaggttttgctttgggtgggtgcggaggacagacgaaaagaaatggggcggaaaatgaaaaaaatagttaaatttattttgtttaatttgttttttaaatgggacgactggcttttgcttatttatcattttcgaactttagatcgttaaaatatcgaatgttttggtattttggtcatttgtttcggtagagaatctcgaatttgtcttttcaattcgagactcaatacaataccgcgacatttggcattgtcatcatccgaatgcgatttatcaatttttgaataaaaagtaaataaaagaagccataaaacaattttcatttttcttaaataaaacaaattcgtaattacgttcctttataga

SEQ ID NO: 41973 - DNA, 992 bp, Heterodera glycines
cgcactaaatcgatataatctctccaattttgccgtttttctccattgtaaaggactaacttaacctgaaaaaatgccaacgcttgttgtttttaaaatttttcgaaattctgactttttcattacttatttattttttgcaaaattaattcataagtattttttcagaaagtgctctgaaacgcaccaaatgttaattaaaagttaaataaggctctctgatgctttttctatcaaaagggagatgaataaatattttaaaaatttttaattcctttttaaacaggccaaaaagtttaggcttatattttaaaaagtttcatcgaacctagcgcactaaaatcgatataatctctccaaattttgcaggccttctccattgtaaaggactaacttaacctgaaaaaatgccaacgcttgttgtttttaaaatttttcgaaattctgactttttcattaattatttattattttgcaaaattaattcataaatattttttagaacgtgctctgaaacgcaccaaatgttaattaaaagttaaataaggctctctgatgctttcactatcaaaaagggagatgaataaaaaatctaaaaatttttaattgctttttaaatttgcgaaagattttaggcttatattttaaaaagtttcatcgaacctagcgcactaaaatcgatataatctctccaaatttttgcaggccttctccattgtaaaggactaacttaacctgaaaaaatgccaacgcttgttgtttttaaaatttttcgaaattctgactttttctttaattatttattattttgaaaaattaatttcataaatatttttttaaaaggtgctttgaaacgcaccaaaatgttaattaaaagttaaataagggctttctgatgcttttcactaacaaaacggaaaagaataaaaaatctgaaacatttagttggttttttaaaatttgcaaaaatttataggttaaatttttttttt

SEQ ID NO: 41974 - DNA, 165 bp, Heterodera glycines
cgtttgtccgtaaagcaatcgctgccaccgcaacagttcgatgtgaatgggaatttggtcactgctgatcggccaacagcagaagaagaaacaaataatgaagcaagcggctttatcacagaaaatccgttaaatttaaattaaaattttatttatttatttttt

SEQ ID NO: 41975 - DNA, 787 bp, Heterodera glycines
tggaatgaattttaggagactgaggggaaaagcgagtttgccttggactaacttgtgggttagggttgaaaaatttgggtttggcaggggtatgaatcttggtaacagattcaatttgttctcgtctgcgcaaaagggacctgaggtagtccttgagtttgtcgggagtccaatcgtcgtcctcttccttgagtttgaataattcgtccagtacgaagcgaggaagtcgctcttcaatttccatttgaaatgacgtcggattaaaggagtgtccttgctggtccatttgcacacaaatgcattccaattgctcagttagggaacgaaggtcgggacaaaaattatcgcccccacggacccgagggaggttacggagggaattatgtaaagaacgcgcaacgtcctcgggattgtcataactttttcggagtaagtcaagagcggtggggtaagaagcatccgaaacgggaagaggactaattagggttaggggggaaccagtcaagcattgtttaagataagtaaatttaattgagtcagaaattgagaggtcatggacaccggctttaaaagtgttccaaaatgattggaaagcggtacaatcacctgaaaattttgggagttcagttttgggcagatggattagttggttgttagtatttgggactgaattggttggttgttggggcttggaaagtcccaactccaatttgcgtttgtcgttccgaagggctttggcgaattggcgcaattcttgtaagcagttatgatagggagtattagcaac

SEQ ID NO: 41976 - DNA, 894 bp, Heterodera glycines
aaattgcattaaaatacttttaagccttgagctaagttttgatttattatttatcaaataaaattcaaataaataaattttaaatattacgattattcatacttatgtcacttcggcttatcacgtaaaaaaaagatatggccagaaaaatatgcctcagactgaatggacccatttcatcaggctcaactgagtttagaatgcaagaaaaacatttttatgcatgcttttgttcaacaacaaatacagcaacaacaattcgcacagaattcagtcttatgatcacttacagcggcaaaatcggttcagaattggaaaaagcatagcgacattcgtggaaaaagaatatcatcaaatacaaagtcgcagatgaaaaagatatgattagaatcagtgctgcaaacatatggttaggcatatatggcacacataaggcaattctcaaaagaaagcacagtatgaaaaatataatagctctacaagggtgctatgacgttagtcaaaaaccatcataatgggcgttagtcaaaaaaccatcaaatgaaaatattttttgatataactttgttcaaaagcatccaaatttttaattcttgatatcattcgataggcctaagggttttctattagctacaaaattccaaaaagtttcgttaagtatcaagaaagttatgactaaaaatgttcaaaaaaacttggctttttgagcttctcaggtcataactttttttaaacttaaagaattttttaaaaattttgcaggataatagaaaacacttagggctatcgaaaaatatctatattataaaatttgatccattttagacgaaattatgaataattttctgtcaacaattattcatttgatggtttttgactaacgtcccagcacct

SEQ ID NO: 41977 - DNA, 898 bp, Heterodera glycines
aggaccttatcgaatttccggtctgtctcgctttggcagcacattccagggtggtcgcggacccatttttgcacactttaaccatccgacacgaggatggaaacacttacgaagttaatttgttggaagagcaggcaggagatcctgaagccgcagcctacattgcgtttgtcagagatggggaatttccagctgatttggatgagaaagaaaaagagttatttgctgcaggcactgccaattacaaattgatttcgggaattctttattttgaggacaagggactacctccgaggatctatgtcccaatttcattacgtggactcatttttgaatcatttcgctcgtctcttttgagtggtggtcatttgaattacaggaaaacaattgccaaatgcaaaaaatatttttggcccaaaatgtactctaacgttttaacttgggtcaaattgtgtgtcacctgccaattgcgtcacaatccaacacccgcgtaccgggaagagatgctcatggtgccagccaacacactttttgccaaagttgggctggacttggccggcccctttccaatcactcaaaaagggaataaacacattttaaatatcgtttgttggttcaccaaatacgtgatttctgtcccagtccccgacacaaaagcacaaacaattgcccacgcttttcttaccaattgttacttaaaatacggtggttgtgttgaattaatcaccgataatgcctctgcctttgcttccgaatttttcagggaattttgctccatgctttacatcgacaaaaagtatgcctgtcctcattggagtcaaggcaatgcgtcaactgaacgcacttttcggacaccttggaggagtctggccaaatacatttcgaagactcagcccga

SEQ ID NO: 41978 - DNA, 865 bp, Heterodera glycines
gccggatgcaaaatcctctctgccgaaatggcttcttggccgaaaaccgcgcacaacgattgatctcctgatgccgcctcttccacagccaacggaaagagacgcaaaaatggaaaaacatttcaatcgccggtttgggactcgaccgcaacaatttgtgtcaaataagccaatttgggctagacaccgactctcgcagaactggagtgcaggaaccatctgtgaatgcaccggagtcatttacaaggtcaaatttcccgacggttcgacaaatcgcttccatgcgaaccaattgcgaaaccgggaaaacacggcaaatggacacgaaccattgaatgttttaaatgaggcattccatctgccgatcaccgcgccgaacgttggaaatgtagggcaggaccttgagccaaggcctgaaccgatcaacgatgagctccaggacgagatcgaacccgaacaggcccgtcgaagcccgacaccgccgcaacaacaagtgccgcgccggagtggacggaaccgccgagcccctgatcggtactcgcccggatgagccaatcaaaaggggaggtgttcgggtgatgaccccgagagagacatttaaattattttatttaagttatttccctctctctgtctcccgcactatttctctcattttattgtgtctgcactccctttgtaaggtcagacacatctttcctcccccatattgtgacccccgctcatttccatcgttcattctgtcttcttgttaatttcccacatttttctccgattgtcctccgccccaaatattaatttatttgtttccaataaataattgattatttcttggactgtttaagctcggttaggtaagaccgaa

SEQ ID NO: 41979 - DNA, 1041 bp, Heterodera glycines
  unsure (1)..(1041): unsure at all n locations
aaacgagaaatgtcattgacgttaacggcaagcgcgtcgaatgctacggcataatttctcttccagtcgctcgaagagactgcgagcctattaacattcaattccatataacggacgctcccattggattaccaattctcctcggaacaaatgctttgggcccccttggtttcaaaattcttgattccaaacatggcgagcttatcgaatttgagcttgctagtgaaaaatctgattctgttcgcttaattcacactataatgctcgagccatattctacaaagttggtcgaactttctgtttcgaagtcctttgatcagaaaaatgttttaattgcgtcatccggcgtaataaacgatgtgaaagttgaatcatcagtggacagagtgagaaatggcaaagtgttcgcttcgattacaaatttttcgctaaattcgataattttgaaagagaatgaaagggttgccgtagtggaaactgtcgatgaaattgctaatgccgaagactgcttaaccaattcatggctatttgataactttcaacaaaaaatcgactcggaatgcagaaatactaatttctcagaatggaccccaaggatcggtgcccttgacagtgataaagcaaagacacttgaaaaagtgttactggaatctaaggatatttttgtttttaatgacaataaattgacccaaacggaaatgataaagcatcacattgacacaggagaagcgagtcctgtcaaaaagcgactgttccttacgcttaccgagaaaaagtggctacaatgatccaagattatttgggccggggaataattcgtccttcgctttcaccttggtctagtccgattgttattgtaccaaaaaagtatgggtcgttaagattctgtgtcgattacagaggttngaaatgcaattaccagaaagattgctttccattttgcaaatatgagcgaacactgctaatgcatgggggtcggaaatttttctccacttggactttatttctagttattggcagattaaaatggacgatgagtca

SEQ ID NO: 41980 - DNA, 1070 bp, Heterodera glycines
aaaaaattgctcaaattgatcatggacagtcaaaaatataacatgaacattttaagcgtgttttgaataaatttgtaaaaaatgaggctttttgatccaaaattcggtttttttttgcatgccaaatgaggcttttgaaaattttaatctggcagccttggtcatatagcacccatgctatgtatagacagacgtttggcaaaagttgactttttagaattgttccgaggaagcgaatccatgtgatattattaaagaaggatttccaaaaaagtgctgcagaccaagaaccaaaaaaactacggtaggtatacgatattagtatacaaaatgtatatgcgttttacgagtgtagttttttagaataattctacagaaagggatccacatgacattactgaagaaagaaatgcaaaaaagcgctgtagtcaaaagataaaagaaatttttgaaagcgagacaactcagccgcagccagacaatttgcgctacccaattaacgagtatattagtactaatgagtttgcgcatgaagatattatactcgagctgccaattagtggtatgttaattagttttattacattttgaagacagtttttgtttcagaattcacaatggaatacatcagggaatatggtttggttcgaccgctgttgttcaaagaacaaccagagaatttgggaatgaggtcttaattagatttttggaaaaaaaaacaataactaataattactcattaagaatgccgaatccaaatgagtttagcgttcgggatgttcaaggtgcttctcattttttgtttctgtatttattagagccctgacgggatcggttcctgccgcgattttctcggattccgacccaacttttggaaaaatagcgggataaagatctcgagaaaatcgggaatttggatcaaagtctcgtgattcaataccgacaaatctgatatttcaatcccggtattattccgaactgattacattcccaaatcccgattttttgataaaagggcaccatctaaatatcgacaaatttggcttagacttttttgtttgggacttaaa

SEQ ID NO: 41981 - DNA, 124 bp, Heterodera glycines
tccgccgacgatgacgatacgttccgaggtggctggcgtcgagttgggcatcatggctcccagtatagaggcgcgggcccccggacgggcaagcctgcgccggggttcagtgcatcacgaagcg

SEQ ID NO: 41982 - DNA, 887 bp, Heterodera glycines
  unsure (1)..(887): unsure at all n locations
aaactcactcggcagtgcttgcgtacctttaaatttttgtgctgctgctactgttgctgccgtgccgctgttcaacgttgctgccaaattttgctgccgccggcatttccacggaggatgatgccgttgtgccagcctctgaacttgttgagcatcgtcgttgatgatgaggatggatgttgaaccaattgttattgtggtgatgataattatgatgttgccgttgcaacaaaagtgccggctgaagctgttcatgatgggcggcataggacgatgatgatggcaccagagcagtagcatttgccgaagtacaattgttgaagaatggaggagagcctggtttatatttatcagagcaattaatgatgatgctcgagagttagtcttgacattcagatcctaaactaatttgtcccaagaaaactaagaactgatccaagacgaagaattggtcccaagactctaagaattggtccaaagactctaataactgatccaagacgaagaattggtcccaagactctaagaattggtcccaagactctaagaatttgtccaaagactctaagaattggtccaaagactctaagaattggtcccaagactctaagaattggtcccaagactctaagaattggtccaaagactctaagaattggtcccaagactctaagaattggtcccaagactctaagaattggtccaaagactctaagaattggtcccaagactctaagaattggtccaaagactctaagaattggtcccaagactctaagaattggtccaaagactctaagaattggtcncaagactctaagaattggtccncagactagagtctcatacttgaccccaaaaaaaaactcgagactttccttggaccg

SEQ ID NO: 41983 - DNA, 1575 bp, Heterodera glycines
ctttgcgcagtacaaagacagcggcccaattcgtttgaaggactgctaccatggaggacgtgtgggtccacaacgactacactacgaggtgccggaggggtggcggatgaaatattacgacgttcgttcactctacccccacacgaatgctgtgacagcataccccgtgggtcacccaacacgagtgaacatcattggtgaggcagagcaggcggttgactggcgacgcgccgaccaggtgccggtccgaggcattctaaaagtgttcgttgtgccgccccatcacgttgatgtgcctgtactgcccgtgaaatttgatcagcggcttcttttcccgctgtgccgtacgtgcgctctgcaacatccgcatggagccgtcaatgaggactacgagtgcacgcatcgcgaggatgatgagcgggggtgggtgtccactgtgacgtcaatcgagttggaggaggcgcttcgcaacgggtaccggtgtacggcctactatcgctccgtcgagtgggacgatacgcggtggagcgaccgcgtttttcgaggctacgttgcagaattcatggccatgaaaacacatgccagcggcttcccggatgaaattggcacaaccgaggaagatcagcagcaattcatagaggaatgtgaggacaaattcggaatccgaatcgagcgggaaaagatggtgcacaacaaggccaagcggaccatcgcaaaactgtgcaacaactccctgtgggggcgcttctctttgcgcaatgggttgtccaaaatgattgtgaccgactcgcccgcggaactgcgcgctctgcttgacaacccagcggtggaggtcagctccgttgaccagctcaccgacgaatgcgttctggtcacctatgcggccggaaacgaatgggttgaggaacacgagtgctcaaacattgtgctctctctttggacaacatcagtcgcgcgcctccacttgttgcggctaatgcagacggttgtgcgcgcaccaaactcggtgctcatctacaccgacacggacagtgtgtgtttcgctaatcgtgaggcggacgggtgccctctggagacgggacctcacctaggcgacctttcggatgaatggccggaccatgaactcgtggaatttgtttccggcgggtgcaaacagtacgccctgcggatgcggcaccaccaaagcggggaggagaaaacagtgctcaaagtacggggcataacactgagcgccgatgcctgtcagcttctccactttgacacattcaagaggagtgtcctacactacgcaatgtgcccaatgtgccattcaaatgatgatgatgatgatgatgatgatgatgatgatgatgatgatgatgatgatgatgatgatgatgatgatgatgatgatgatgatgatgacgaagacatttgttcaattttgattgagtaccccaattttctgaggccccaacattaaggacggggctgttatttctgttaagctgtcgaaacgctatcgtcctatttgaaactaaagggggttgggggggatgaaatgctattgtacatgattttggtttttttaaagga

SEQ ID NO: 41984 - DNA, 979 bp, Heterodera glycines
  unsure (1)..(979): unsure at all n locations
ttaaaaactttactttagnaaacaaatatanaattatgccatctcggagacatggatgagcaataagttagataattcgtttatagtccaaaattttccttacacaattgtacgtaatgatagaaanaaccaaaaagatggaggcgtagcctttatcatttctaatcagataccttttgaaattatcaaaataccaaaacacaaaaattctgaaataatttgcatagatattctttctccgttttccgaccaaaaatttcgcttaattttgtttataggccagtaacacaagaaaaatatgaagactttttagaacttttagaagtattatcacttttaattgaacaatcaaacaattgtcttctttttggcgattttaactttcctagtctaaaatggcattttgatgtctccaaaaatctgaccgaaaaatctttagaaaaaattttatcattctttcatggttttagccttcatcaattagttatctcaccgacaagaggggaaaattttcttgatcttctatttacaaataataaacaattaatatcaaatgtgcttgttggccctccctttaacattgtgatcataacagtatttcatgtgaaattaagctaaaaatttctaagaaaattctaaaaaaggtttcgattttcgtagagctaattaatttcacgcaatattttcgtaaattcattcgtttccccataaatttcatacatttttccccataaagttttcttcatcccttttctttttccactaatgttaaaattcaaaactattctgcatttattaatggtacggaaaatagcatttattttgatcagaatttttgaagaaaaaacactgaagaaaagttcaacctcgaaattacattgttatttgaaaattttaaaattattattaatattcaataaaaaaaattaaatttaaatatttttattgacactgagactattttcggttcgacctagca

SEQ ID NO: 41985 - DNA, 1414 bp, Heterodera glycines
gtctctcaggaatacatatggggcgcacattccatctttgcctgataaagatgacgacacgcccattgcaaaaatgcatcgcgaaatccgcgaaacaatgcatatgcaactgcacagatgcagtgacagttggtgtggtcctagcgacccaatttacgggcggtgcaagaaggggttcccagccccttactcaaaatgtacgattttgcgcccggacaggcccgcgatgtatttccggccttcaccatctgatggtggtgcccaattagaggtaaacggcttaatatacgacaactcacatgtcgtgccgtataatccttatattctgctgcgttaccgagtacaccataatgtactgtttgcatatggtaacaaagcaaatattaaatatgcactcaagtacccattcaaagggccaggacattgttatgtcgagtgcaaagaagagtccggcaataaaattggaattgatgagccggctcaatatgccaagatgaacttccgtggtgcaacggaagcatatgccattgttcattcaatgccatttgcccgtctttcgcatcatgttgtcaaattggcaattcatttgccaaaccaacagcccattgtatatagggcattccagctggtgagcaaagctcaacaaatccagcaaggcgaactgccagaaacgcagtgttcagcctattggaaacaatggcaaaatgagtggaagaatgatccaaagtttaaggacattcttttcgaaaaagtccctgagcggttccgatgggcaaaggacaaatgggtcctgtacaaaaggcagcaaattaaaaggccacctatcggccgaattgttcctgtacccccatcggacccggaaaggttcgcgctctattcacttatgcgtcactttcctggagacccagaccatcttaagatggttaatgggttgctttgtacctcattcactgaggctgcaataatgcatggtcttcttgaagacaacaaaatttgggacaaaactctggcggaggcagctctgtcgcgctggccagatcagatgagatggctttttgtgagcatcctggtctatggccagccgagtaatgccatagaattgtggaacaagtacaaagaccaaatgtacaatccgcaaggcattattactccggcacagcataaagtagcagagcttgaagccctagccgacattgattggcggctgcacagctgctttaacttaagctgtgtgcattttagcctgccagacccgccaacttcaattgccaaaaatacttgacgcggcaattgaagagttttttcttggcgatgatgatttgaatttgcctccagggcaccaaatcctcgtccacagccaaatacccctcccccacttaacaccgaccaacaaaaaggcctttgaagctgtttt

SEQ ID NO: 41986 - DNA, 1039 bp, Heterodera glycines
  unsure (1)..(1039): unsure at all n locations
ttttctatctcgtacccccgatgttaatcgttccggagagctcnttcaaaattttttccataccctaagagctgcagaaatgtgaattaattctcagaaaaatggctatctctttttaggacaattttctatctcgtaaccccgatgctaatccgttccggagagcctcttcaaaattttttccattaccctaagagctgcggaaattgtgaattaattctcagaaaaatggctatctctttttaggacaattttctatctcgtaaccccgatgctaatccgttccggagagcctcttcaaaattttttccattaccctaagagctgcggaaattgtgaattaattctcagaaaaatggctatctctttttaggacaattttctatctcgtaaccccgatgctaatccgttccggagagcctcttcaaaattttttccattaccgtaagagctgcggaaattgtgaattaattctcagaaaaatggttatctctttttaggacaattttctatctcgtaaccccgatgctaatccgttccggagagcctcttcaaaattttttccattaccctaagagctgcagaaattgtgaattaattctcagaaaaatggctatctctttttaggacaattttctatctcgtaaccccgatgctaatccgttccggagagcctcttcaaaattttttccattaccctaagagctgcggaaattgtgaattaattctcagaaaaatggctatctctttttaggacaattttctatctcgtaaccccgatgctaatccgttccggagagcctcttcaaaattttttccattaccctaagagctgcagaaattgtgaattaattctcagaaaaatggctatctctttttaggacaattttctatctcgtaaccccgatgctaatccgttccggagagcctcttcaaaattttttccattaccctaagagctgcggaaattgtgaattaattctcagaaaaatggttatctctttataggacaattttctatctcgtaaccccgantgct

SEQ ID NO: 41987 - DNA, 1235 bp, Heterodera glycines
ttttttctccgagggacaactgagtcccagcggctcgaaaactgactttgccgtcagtctcagtgttacgaaattttttgcttttgctttcagagcttagcggaccccaaaagcgaaatgccttaactatggcctacaactttgccagcaaaaaatttttgatcagatcaaaggcctgacctgtaggttaggcaacgtaagaatcactttttttggacacttcagtaccaggcgaatagctcgtaagggtttgctcggagcagggggtcgccagcggacttattgtagagctcaatgagctcgatttttccaaattttaaaatttcgaaaattttcaaaatttttcgagttaggcctaaaattcggtttttcggtttttgaattttatgattttttaacgatttttccagggaaaacgaagaccacttccaaaacatcgttttttgagctctatcgattagtgatgtttttagaaaattttcgattttttccaggaaatagaaaaattttttggcctaagcgggacatttgagtcccgggcccataactcgtcgggggttggttttagcgaaaaattgcctaagagcaaaattgtagagctttttaagctctatcgaacggtgggatatatgcccggaaaatttcaaaaattttcgagctaggccacctagaaattttcggaaatttttttttggttgaaaatgggggtgaaaatttttttcctgggttattttgaggtgctgagcacgaatatgatgtttgttttacgtttcagaatttttggaattttttaaaaattctttattttttggcaattttttggccctcgggattttggcctaatatttgaaaattcatatctggcctaaggtttgaccaattttgattaaataaagcattaaaaatggagaaaaatcaggagaattttatgggttttatttagattctctatcatgaatctaaaaaaagttattccggaagttctggaaaaattcgaattttcagaaaaaaattctgaactcggttctgaaagatgtattggaaaagtaaaataatacaaaaatccgcaattttttgctctattttataaattttattttagctttttatcacttttttgaaaaaagttatagaaataaaagtgattttgggaatcgggaccaaaggggtgagtgtaggatttttgagtgaaaaaattttttcatcaaagaccttcaaaaaacatgtctttaggg

SEQ ID NO: 41988 - DNA, 1292 bp, Heterodera glycines
  unsure (1)..(1292): unsure at all n locations
cgggagccatcattgacttcgaggcgggctggcggtctgtctcaaaggatgggccggtcggacatttttcacgtcgaattcggcttagaccgctggggaccttgtgccaatgccgaagcggtcccagcacaatcagaaggaaattgtccaagtaagacttaatcatttgttaattaaatgttaattgggatttcttgcactgccgcgaacccaaattcgcgcattggttatggaaaattattttatgagaaaacgcaggaaaacaaaaaaagaaggcagggatggtcacaggacttcgcccggggtgggtgtcccgtgccgcccggacgaccacttattttggttgcaccccccccccnccctgaaactcaaaaaagtaaacaattttcagcaaattttttgcaatttttttaacaaattgaattaaaattctcaaataagtttccgggcggcgcctaacggcaccgctgtacccccatttaccatatttttgaaaaatggagaccaaaatggcaaaaatagtaattttctggcgaaaaacggctaaaaaatttgtaaaagcttatcaccctctgaaccgctgcttcagcttcgctaataattgatttgtaatcgtaaagttagtctttttttaacttaccactcccaatcatctgctgataaagcaaataaaaattatgggaaaactcaaaatagaaacgtcattttgtatcgatgtttcaatgtttacggaaatattacccaccaatcaatcatcaatatcaaaaaaaaaagacaatttcatttaaatgttcctctccaattttttctgaatattaattaatttaattatccttaattgatttgaattttcttcggtttttctttcggtgaatatttgataaattttaaattttattagttttggcgtaatgccatttcaaaataaaaagaagacgccgcttccttttttgtctcgctacggcatagcaattggaatgtggtggatttgcttttattttatgtgtgttttatgtgccttttttgtttgtcgagccttttccgtttgccctattggttttcttccgttgcatgagaatggcactggaggagagaaatggcagcataaatttttgagtgacagcatcatcaagttttgtggatgatgccagcattttttaaacagacgaaaagctaaatttccgaatgaattattttttctaaaaatattttttatttttcacaaaaaaaccgaataaattctctaattaaaaacgttaaattttagtggcgccaaaatttgaaaatttata

SEQ ID NO: 41989 - DNA, 836 bp, Heterodera glycines
  unsure (1)..(836): unsure at all n locations
aaatcacgccgctagaaatttttaaaaatttctagcggcgtgatttcggccggcgtgattttggggtgcacccatggtttaacttgtttttagttaagtttaggccgtttcaatttcagaaaaatggattcgcatagattttatttgattcactttggtggggggctttaagaattttcgacagcaaaggacattttgataaacaagatttttccggcggtgagaccaaaaagtacgaaaagcaacaaaaaaaagtggtcgtccgggcgggacgggacacccaccccgggcgaaatcctgtgaccatccctgccttctttttttgttttcctgcttttctcataaaataattttccataaccaatgttcaattttgggtttgcggcagttcaagaaatcccaattaatatttaattaacaaatgattaagttttacttggacaatttccttctgtttgtgcacgtctcccttcggcattggcacaaattcgtcagcgtctaagtcgaattcgttggcgaaaatgtccgaccggcccatccttttgacagtccccgagcccgcctcgatgtaaatgatgtctcccggtgtcactttttgcttcagcagtgagtcgtaaatggtcggatccaaacgtaattcgcgcgacccttttgtcgttttcagaacgcaattaacatgcgaaatcgtcttcccaaagcctccgatcggatggtcggcctccaccggcgccaaatcgaccacttcgccctcaacacttccttcacttctttgatgcgtacacctaagaggngacgggggagggtaaacaaaatcgtcttcaaaccagggtttttcc

SEQ ID NO: 41990 - DNA, 946 bp, Heterodera glycines
ttcggtattattccgtaaattcctttaaaatgtttttcgttggtcttccattttattttggcaaatttcccaaccctccccctcccgctatcccccacatttccttttccttccgcttcacaaacatcgggcggcgctgctcgtccgtccatgtgatctccgccgctgtcctctcctcgcccatttcgtcccgtccatttttatcaaaatcatgaaacgatccactgattattttcatttattccccactcaccgccatcccatgaatccccccaatttcgcctcttcaatcacattttcacttcccctccccccactgttttccacacaattttccacactctgtgggcactgcgccaaaagccaattattccatcagagcgccgccaccaccgccgccaccgcgctcatcgggcggtcggcgcggccaccgttttaccaccaccaccaccaacagcagtaagcagcagcagcacatcgtcgcgtcgtcgtcatttcccatttcgccacacatgccacccgtcgacccatccccaaattttattattttacgctaaatgtggccacaaaacctggggaggggaaggggagaccccgcggggacgggagacccctggggccagcggagagcacaaaaacaccgcggcgggtgggcggatgagtacgaaacgaagatggacgggcactactgctatggtgatgagtgtgtttgtgtgatgtgctaatccagtttaattattttgccacccaaaaatgcgagggtctgccgcttttgatgtttgctgctgccggtgaaaaaactcattagagtcaaaaacccaattaattaattcattaattaattgatcacccatcccaatcagctgttgtgtgaatgaaagcctttcgacccccccccccccatttactcagttagcccccatcctcaaaaagcaaccccaattag

SEQ ID NO: 41991 - DNA, 1254 bp, Heterodera glycines
ttttccgccacctcctggcaaaaattgggtgtacccttctgtcgaaaacatccacggaatggattttcatgcttaagaataggggcagttattccgaaggcatcaaaacccaaactcttcccaatcggtccagtaaaagcgctcctccgctccattcactgtcagcccaaagggatactcaagcggggcgtaaatctgaaaatgccttttcttcggttggctttcgccatttatctccgttcttttgaaacggtcagaaattgtggcaaaattttaattccgatgccaaaatgggggagggggtcatacatagcttatgagtgatgattgattgattgactgaccactcttcgccccgttccgtccagcccaatgcatgacaattgctgaatgcccgcgtcaacccaacaaagccatctccgctgctgcagcagaaccattccgttgggcaagtgcacgtcgtccgaaatgaaaactgaaaagtccgtcgttgtccaacgattgtttgggagtgtctctccgaaccgactttcatttgcacttccatccaacgaaactctgccaattttgggcccttctcgggaccaatcggagtaatacaaatgccgactttccaagtcgattaccaatgccctgttggaattcaaatcaaatgccaacgaatggggggaggggagagaatgaatgcctcggattgttcagtccctccgtcagcaaagccttctgaaagcgtccgtcgatgctcaacactcccaattcgtttttgatgctgtccacatagtaaatgttgcgcgaaggccaatcaatggcaatccctgcgcaaatttctcttttatgtgaaaataaacacggcaaaaaccctcggggcttcggagcacttcggaaaagttggaactgagcccagtgccattgagaaaagcagaacgaatggaatgtccggaaatatcactccaaaagaaacgttctgaatttgttccgtgagaaaagggaaaagcggacaaatggtcacccgaatgacaatcgaattcgatgtccaccacaatttgatggggtaaaacaaccaactgcacagaaaagcaaaggatgacggatagaaatgccatttcagctgcccgacctgcttgccgttcacgttgggttccgcgttccgctgaatgatggccatcccccgcccgattagcaaactttcggtgccgtcccctcgcgcgtttggtgccattgctaaagggcagcgatttgttgggcttttgctgc

SEQ ID NO: 41992 - DNA, 839 bp, Heterodera glycines
taagttaaagaaatgcttaatttaaaaataaaaaaatcaattattcactttgtgcaatggcttaaatatattttaaatttaatccctccttttgtctacccgctttttctccttaattaaatgaccactttttggtttcattttcaacatgtgaaaaccaaaaacatccattctcactttttggctctgattacttttttatcgtttagtttaaggtgagcgagagattttgtacgcatttgtagccacttttgcctttaattattaaaaattaatctcttcggcggctgtaccccaatttaattaattatatattctaatttttgtcctcctcacttttatcgaaacgaatgcctcctcttcttcaataaatatgctgaaatttagaatagcacgtattgccccggaagctctcacacggctacaataattgcttactttaataatcttagtctggtgagtgaacgaggcggaaaaaaagttcgaacttggttttggacattttaaatcgcataaaaagccttaaatgtgttttaggaggtgattttattcacgaaataaaatttcattttcccaagtccatattttaaataagcatttcttattttcaaatccttttcacaacaaattaattccccggcttccattcagcaccatcgtattttttcttagtgttcgtaagactcaaaacccctttcaaagcccgcgaatgggcagccaaagcccgcgaatggtcagccagaggcccgcgaatgagcagtcagagaccgcgaatggcccgccaaaagcccgcgaatggacagccaaagcccgcgactggacagccagagcctgcgaat

SEQ ID NO: 41993 - DNA, 1190 bp, Heterodera glycines
  unsure (1)..(1190): unsure at all n locations
tacctcaccggtgggacttctctgctccggggactggctgaacgtttagaacatgagcttgtccaactcgcgccggcttcagttctcgttcaggtgcaaattttttttttaaattaagcttttatcgttgttgtatcatttaattaaattgctcaatgaaagtgatttattgttttttttcctttaattattttttttattaatctttttttatttctttgaattttttattttttttaataattttttacttttatttttttattttctaatttaattttttatgattgattttttttttgttgatttttatttatttatttttttgtagtaagttaatgacatttctgcgatttttctttaataaaaaacaaaaaaaaaaattgctaaatcgatgttacaaattatttaatcgaaataatttggcacatttgaaatgcatgatcccataatttaagtgtaatttattgtataattaataaatctttgctttataggtgcttagcagtccatggcgtcgccactccatctttttgggcagtcacgcaattgcagcgagcgaagaatttgaaaaatgctgtgtaaatgggatgaatttggcggaatatttaagcaggattgacggagaatgaatgaatgaatgagctgctgatgaaccatatgaaacaaatttttggggtttttaactttttttttcatttttaaatgcaaataaattaattatttggaaatgttcaacctttttataaacaaatttaaataaatcaaatttcttgtctaatttttatttaatataggaatacatgcttttattggtgttgggtcgttactacaaaactacccaaaatgggcattactcaaaaaagcacaaatggaaattttgacaaaacgcttaatccttatggcataagtagccaaataaattaatcattgattgctatgatctaattttttatagtacaaagttttaaaaatggtatgttttaattaattaacttattttgggctttcccgcacccatttaagtggtgcaaccctttgatgttgccacccagggatatgttccagcacgtgccaggtgatttcgacaatgatagatctcgacagnggattgatttcgacattgtggactcgacaaagagtgatttcgacagcaccgataaatttttaaaaacacgagtgtataaaaa

SEQ ID NO: 41994 - DNA, 1709 bp, Heterodera glycines
  unsure (1)..(1709): unsure at all n locations
cgcctggggcggcggctgagggtcctcattaaaagggcccaacngggaganncnggacccaaaaagagcccttgagaaacccgaannnnngnnccgnaaannnnngnagagcncgaaaggcncnanncaaggggcccactcnggncccaaaccanncaaaccncanaaagnnannaagcaaaaagngaaaannagnnnnngaannnaggggngnnnncaaaaaaccgcgannnncngaaaannnncggcnngncgccaannagnncacacggaccannnngnagagaancaanagggcttncgaagggnaccggngncaaacggancggnnagaaanncgctngctgccaaanngngcaagcnnnngcccaggcnnnnnnangggggnaaccgngannnnnnaannannnnnnaanngcnnaaaannnnagaannnanaannnannnnnannngnnncccacnnannngggncngnnnnnannnannnaaannnannnnaannaannnaactggnnnnaaannannnnaaannnnnnnnannnnnnnnaccaannnnccannnaannannnnanncngcnnnncnaacacannncaaannaanncngancatncnggatcacaacagaaaatattatcagaatagttctggtgcgtaccagaattagcagaagtatttggtgcgtaccagaattgtcagaaatatttggtgtgtaccagaattagcagaagtatttggtgcgtaccagaattgtcagaaatatttggtgtgtaccagaattattctgacgcgttccggatttaccagaatcattctggtgtgtaccagaattattctgacgcgttccggatttatcagaattattctggtgtgtaccagaattaagcacaccagaataattctgacttgttccggaattatcagaattattctgaagcacaccagaataattctgacgcgttccggaatttacagaatgtagaaaaatgcgtagaattttataatatttaaaaaaattgtctttaaaatttccggacttattctggtttggactactaatttttcaaaaactttacaattcataattaccgaaattaacaattttacagaatggatattggattaaatgggctttgaaaattttttattgtgttaatttaggttcttagcacgaataagatggttgcttttctttcttataatttttagtttttttaaaaaatctttaatatttttcaattttttggcctcaggatttgggactaatatttgaaaagtcacaactcaattgaaaattattcaaatgaaaaattaatgtaaataaatattttacttaaacatgcaatccacattctgataaattcacacaatggaccaaaggctgccaaaactgtaaaaaaaataattaattttaaatctgatgaaaaaatctggaaatttttacagtaagcatagtcggctccagattcacgaataactgaaaaatcatttttcggtgtacattatttataaaatgccaagacatttttctcacgttccaagctcggcataactctaaattccaatcgattggagacggcggttgtgccaacgaatatgtacaaattttgccaaagcattggcacactgtgcattcaaagcgaaacaatctggatggggaggnggtaattaagtttgctttgatattaaaaatgcaaatatttatttgc

SEQ ID NO: 41995 - DNA, 946 bp, Heterodera glycines
aatcattacaattgtacaatatttatggaggaatttctttaaaaacccttattttctttgatcttgtttcaaatcaagcacatatgttttacctgtttttttcgttttaaattaaattttaagttcttagcatgattcccggtttggattgtttaaaaaaccaaaaacatgacatagcatccccattaattatgcatgaaaatgagggataaattttaggttttaactattttttttgctcaattgttttgaagaaaggagctcaaaaaacgcatttctgcgttaaaattttttcatttggacgtcactagaaatcactattttggcgacttcgtcactaaaatagttaaaaatcactattttggcgttttgtcactgttttttcactatttcgacattttttggaaaattctttaacaaaaatgcaataaaaccaaaaaatacacccctaagaatcgacctaaaaaaattcaaaaaaatacacccctaagaatcgacaaaaaaaatttcaaaaagcgctcctaagaaatgaaaaaaaatttctcaaaaaggtattttcgtggtcactattcgtcactatttcggactttttgacactattttggcatttttactcactattttagttaactatttcgggatttttcttcactaaaattcacgtccctaatcattacaattgtacaatatttatcgaggaatttatttctttaaaaaaccttaatttctttgatcttgtttcaaatcaagcacatatgttttacctgtttttttcgctttaaattttaagtgcttagcatgattcccggtttggattgtttaaaaaaccaaaaaacatgacatagcatccccattaattatgcatgaaaatgagggataaagaaagcaataaaaatttttcaaaatgaagagaagaaaccaaatgcaaaagggaccaaataaattc

SEQ ID NO: 41996 - DNA, 983 bp, Heterodera glycines
tgtaaaaaacttgtgtaaggaattattttttgaagtgagtaaaacaccctattagtgctttgctgtgccgagaaccggcaggcaatggatggctttcaatctgcaagaaattagattggcaatatgtggttgtaaaaaacttttgggtatggaattattttttgaagtgagtcaaacaccctattagtgctttgctgtgccgagaaccggcaggcaatggatggctttaaatctgcaagaaattaaattggcaataagtggttgtaaaaaacttttgggtaaggaattattttttgaagtgagtcaaacaccctattagtgctttgctgtgccgagaaccggcaggcaatggatggctttcaatctgcaagaaattagattggcaatatgtggttgtaaaaaacttttgggtatggaattattttttgaagtgagtcaaacaccctattagtgctttgctgtgccgagaaccggcaggcaatggatggctttcaatctgcaagaaattagattggcaatatgtggttgtaaaaaacttttgggtatggaattattttttgaagtgagtcaaacaccctattagtgctttgctgtgccgagaaccggcaggcaatggatggctttaaatctgcaagaaattaaattggcaataagtggttgtaaaaaactgttgggtaatgaattattttttgaagtgagtcaaacaccctattagtgctttgctgtgccgagaaccggcaggcaatggatggctttcaatctgcaagaaattatattggcaataagtggttgtaaaaaacttttgggtaatgaattattttttgaagtgagtcaaacaccctattagtgctttgctgtgccgaaaacccgcaggccatggatggctttaaatctgcaagaattagattggcattaatggttgtaaaaacttttgtgtaaggaatattttttgaagtgaatcaacaccctattatttgcttgct

SEQ ID NO: 41997 - DNA, 874 bp, Heterodera glycines
ctaaaaggaactgaagtcatgggacactcttttggtcattaatgagttgagtgacgttttttcatttacttttttggccttttaactgccaagaagcctctagttttgtgtccacctatttattttaaattcccttacatttcgctgtttttagaattttctaaaaattggattttccgcggcgatgggattcaaccgggctacgaaacaaccaaaatttcaacagtaataatactaacaataaaaactttggtacttctgtgttttggggtcgcacgtcaaaaattaaaaaatcaacaaaaatgcgcacaaattcacagagtacgaacagcattagtttgggtacaaaatgcaaaattattgctaaaatctggtcaagtggatcagtttggggatataattgagtgaatttgcacgtttttgttgatttttaaaaatttttgtatgcgaccccaaaacaagaaagtaccaaatgttttggtgcttcggaggatgggccatcgtccgtctaatacagacaggagccaatggaaaagctcggaaattcaataagtagataaaaggaagtccaaaataaatgtatccaattcatcaaattaaatcagtttaattgtcaccgtctttattcatcgaaaaaagtaaaataataacaaacaatcaaaaacgacaaagggagaggagaaccgttataagctattgcatcactgtgttatgagtggggcgggcgtgtgccgttcacctaagaaggacaaatgggtggcaaatggcactggtgtgggatggggggggggacgtagcccaattgatgcctcattttcaaaaataaaatattcagaaaaatttaattcgaattatttatgctacgtcccgacct

SEQ ID NO: 41998 - DNA, 711 bp, Heterodera glycines
agcattaaaattttcttttattgaattatagaaattttctttccgttttcaatgtacaagagaaatttttgaaaaaaaagtttcgatctcgagaaatgtcttgggttttgggtcacgagtctcggggtcaagtctcgggaattttcggtctcgagcatcactgctaattactcgcggtccaccactcactaatagccccggagcaattaagatgtttgttctgaacacgttgccgaaggcgtcgtcgactacagcagaggagtccagctcctcctcctctcccattccggcacaaccgtccatcttggtgttgtgcaaacgtgctttgcactgtgtgacgcatgggggcaatccgcgcttcacaattcgattccaaacagtcgcactttgtctgacagttctcagccattgtaataatgtcaaaaaatggttattttattggcactgtgccaagataatgcgcaccaagataaattaattataaattctgtgccagtgtttggcacggtgccaaggaaatgggtacctggtgccaatgtttggcaccgtgccacgaaaatgggtacaaagtgccaatgtttggcaccgtgccaacaaaatgggcaccaagacaaattaatcaaattttgttccgaaaatgtctttccagggaaggacgcgcacattccattgtgcatagggaccgcgacaaaaacggtgcttttctactcg

SEQ ID NO: 41999 - DNA, 903 bp, Heterodera glycines
tcataatcctcacaatcagccaatgctgtggaagtggtggtggtgacgattcgaagaaaaagaaaaaggcaagtttttgaccaccgccccccccccccccataattagcggctctattgcagttcacacggccctaaaaaaataaataatttggcaattttaatggaccataactttccctataaacaactaattaaaacattcttggtatcattcgatagtccaaagagtcctctattatcctgcaaaattaaaaaaaaaaaatttatttcattgcaaagaagttatggccagaaagcttcaaaaaactgtttttctaacatttttgacaacttttttgaaacaaaacaaatttttttgaaattttgcagactaatagaggtctcattgggctatcaaatgataccaagaatgttgaaaactgcaatagtagagcccaattagcagacgacataacaaccaatttacaactgatcactttttcagaaaaagaccgaagcgccgccgctttcgccacccaaatcgacgcaaggaaaagcggaagagcctccgtcagatgttttttcttcaggtgggaaatggattgagaggagaaattgcgtcatttgttgtgtggtgcccccgaaatttccaattttttcagacaacaacatggactatggaacattgaaggattttgaccccaaccgatttggagcaccgccactgaaaacgcagcaaaacatggaaaagaatggtgaaaacgaacatgaacaatttcggggatgagaaaattgtgatcactgatcagtcatttattttgcaaattttttagcaccgccgctcaaagtgccagagaaacgtgccaccgcaaaaaaaggcaggataaaaatggatcaattggaaatttgaatatttttaatt

SEQ ID NO: 42000 - DNA, 971 bp, Heterodera glycines
tgactaattggaagttataaaaagccaaatcaccgcactctatttgtcgatgcattggtaatgatacgtatgaccacatcttagagctgaaacatcgtttaagtcaaagcttaaagtgcaaatgctacaccgtccgagattcataataagaaaattattttagttaatgctgataaatttagttttgtgtttttgtatatgaactaatggaaaagggtaaaagcaaaggaagggaaaacgaattcagctgattaggcacatcataaataggcaattacatatatgcgttaatctaataattaattgttaaaaaaaataaataattttaatgaataaaaaaattaggtaatttaaaaaatttaaataaaaattattcgccaaagatcactttgacaaaagtcattttacaaattttaattaaatttaaaaaagcacttcgcttatttatgtttttacctgtattaatggatgtccatgacgaggaagttgaaattattgggactaggtcaaatgagaggcaaatggaccgggctcatcgacaagaacaacagcaggaaaaattttactcccaacaacaaatgtctgaggaaagtgaagaagcattgttttgcatttctaagcatgacgttaaagaaataagccaagtggtcaaagcaatggcattccgagacgtgagaagcaatggcaaaaccatggcagaaaacattccgttttagcattgcacattaaatgtaagcaatgagggcattcgcttggcagttgacgaccaacacaatcagcaaggcagtgcctacttcagatccgagcacttccaagacttcaactttcgtacccaaacatgcagcattaaaataccgatgaggcctcttatggtaaatttatcaaaaatgtacacttttggattcttggcaaatttgaacattataggaagcactgaatatgttttcccgtacgatgacaatggtgcaaat

SEQ ID NO: 42001 - DNA, 756 bp, Heterodera glycines
tgttgttagaaattttaaatgagtgtattccaataaagcgtttaaccaagaatgatttgactcctaaatacccacaacatttattagcatccatcaaagaaaaggctaaattattcaggcaagctaaaacttccaaaaaagcactatacgatagcatttctttacatataaaaatacaaacaaataaataccatagccaaattgagaaaaaggctatttcaaagggaagaaattcaatttataaatatatacaaaattcaatgtcaatccctttgaaatacctaatctaatttatgaaaataaatgctatcataacagtgctgagaaatctgaattatttgccaccttatttgccaattcatttaataatagtgaaaccgactcaagcaatccatgcttgggtaatattatagaaattgatcaatgctttataccggatataaattttaacatcatcgagacccaaaatcttctgaaaaaacttccgaataaaaatggcacttctcccgacaatattagctataaaattttaaaaatttgccattcgtccctgtcaactgttattactgacttgtttaggatctcattagacactggttcacttccagacatctggaaagaatcaattgtttttccgctttttaaaaagggtgacaaaaataatcccgaaaactataggccaatttcattaacctgctcactttgcagggtaatggaaagaattttaagcaaaaatatttacaattttctattaaa

SEQ ID NO: 42002 - DNA, 865 bp, Heterodera glycines
agaaaaatggctatctctttttaggacaattttctatctcgtaaccccgatgctaatccgttccggagagcctcttcaaaattttttccattaccgtaagagctgcggaaattgtgaattaattctcagaaaaatggctatctctttttaggacaattttctatctcgtaaccccgatgctaatccgttccggagagcctcttcaaaattttttccattaccgtaagagctgcggaaattgtgaattaattctcagaaaaatggctatctctttttaggacaattttctatctcgtaaccccgatgctaatccgttccggagagcctcttcaaaattttttccattaccctaagagctgcggaaattgtgaattaattctcagaaaaatggctatctctttttaggacaattttctatctcgtaaccccgatgctaatccgttccggagagcctcttcaaaattttttccattaccctaagagctgcggaaattgtgaattaattctcagaaaaatggctatctctttttaggacaattttctatctcgtaaccccgatgctaatccgttccggagagcctcttcaaaattttttccattaccgtaagagctgcggaaattgtgaattaattctcagaaaaatggctctctttttaggacaattttctatctcgtaaccccgatgctaatccgttccggagagcctcttcaaaattttttccattaccctaagagctgcggaaattgtgaattaattctcagaaaaatggctatctctttttaggacaattttctatctcgtaaccccgatgctaatccgttccggagagcctcttcaaaattttttccattaccctaagagctg

SEQ ID NO: 42003 - DNA, 1244 bp, Heterodera glycines
tttatttttatttccaatcttttacaacaaatatatttttataaaattcatttcataatttttttcatttccttcagtttcattcatttttcgtcctttctttccttttctccgctttgttcagtgaattggccatcgccaaaattcgaagaaatgccatccgcagcatcaaaaaaagtgccaaaattgccaaaaatatcgcaccaatggagaacagaatggcatcgattgaataataagcaacccatcccaattcagcatcggttggcaagttaagctcgttcagatgcggaaattccgctgcaaattccacccaacgcaccaattgctcttttgcaccgaagggcgacaaagcgattttctttcggatgagtttggcattggcacgaaaagaggcatcgtggagaacctaagaaaccaattaacattctgttaaaattttaaaactgattattggagattaatgattcttcatcggaattcgaaatgccattcccaattcgttgagaaaattctgattgtccaaaacaaaaaaaagctttagtaaaataaatcctcctaaaaataattaattttctatgcatttgaagtgcttttcatttttgctttctcattcattttgtttggttgtgaaaagtgatcgaatgatccgatcaatcgatggtccacctttgctcacccgactgagcgctgttcccagcactttgcccgttttgtctgtgatcagctggcgaatgtcaacgtggactgccatccctcggtgctttgccaacacggcgttgtaaagctgatcagcgaacagcggaatggccacaattggcacaccgatttttgctgcttcggccagactgttttggccgcaatgagtgacaaaagcgcgcaattttggatgccctcaaaattcgacaaaatttaaggagtgcaataaaagaatggcacacttaaaatggcattttgcggcacccattcgaaagtgtgaacatttggtgttgctttgatcagttccgactcattttctgccgattctccgtccaatttccaaatgaactcaaaatcggggaattggctgaatgtgcggagaagcatccgtcgcaacgattcgcccaaagtgcgcgtgttggctacggtgccgaatgagaagagtacggtaccggaccgcgaattgtccaaaattgagcgaaactcctttaaaaaatgcgtttttcattaagtttcttttatcaatgttaattgtttatcaacct

SEQ ID NO: 42004 - DNA, 1273 bp, Heterodera glycines
  unsure (1)..(1273): unsure at all n locations
tttctcaaaatttatcccaaaatttatttattttttctattgacaaaatttttaatttaaaatgtcaatattatctaagaaaatattaatatatttaaattttcgtttacaaagagatatgtagaaccaaaattttccctctttgtttgcttttttccactaaaaaatcgttaataaaaatttttatttacctattttggtacctattttggaatttttgtacctatttaatacctattttgagatttttttttacctatttaagtacctattctgggatttttcttacctaaaaatcgcatccttaatcattatcatttatttatgcaaaaaaagaaaaaagtccacaaaagggagtaatccacttactctgcggacgtgtcatagattaaatcgtcctcgagtaatatggattaaaaattaaacaaaaaaagaaatcacaacaaaattaaatataagaatgaggtcaatgattaataaaaccaaatcactatataaaatatataatatctttaattaaagagataattcacttttccggtcattttatacgttaaggagtttaattttagttttaaattgatttaaagaatttattttaatgatttctttatccagctgattccacaattttgtagccctccccgcaaagggaataaattttttgcctaatttatattttgtgttaaacctataaaaggggacattaaagcgttcagaaggtttgaaaatttttaatatatctagatctgttcggccataaacaattttatgcgccatgaacagatcaaatagctttcgccttttctcaagtgttggtagttgcaggtattctaatcgattttggtatggaattggcggaaggctgcatttaaaaaacacccgtttggtgaaatatttttgacacttttcgatttttttaatatttttttgaagagacggattccaaacctccggagcgtattccaataaaggcctaatataagttttatataacgtaatccaaatcttagatgatttggatttaattattcggaacaaggaacgcatacgtaaatacgcattccttgttatttggttaatatgatcggaaaattgtaatttgttatcaatgtttactcctaaatccctaattgtatccacagcatttattgtattcccatcaaatttataagtttcttttgggttttttgaacccnaaataaagtacaaaagttttttgaattgaaacttttatttgcctatttatttgccccattcgaantaaattatg

SEQ ID NO: 42005 - DNA, 786 bp, Heterodera glycines
cgaatggataccaagaatgttgaatttggttggcaaagaaaaaagttatagtccaaaaactccgccccacgcgaaaacggcctggcccggaaaaacaaaaacccactgaattagagccacctttgaaaaaaccccttgaaaaaaagagcgcctctgggggcactaatccaataaatatggtaaatcgtgattcattttttacaacaaaatttgagttggcgaacgcgtataaaaaagggaaaaatcaatgggaggaaggattatcccttcccccctaggacgttctgaggccccacgcaaaaaaaattccaaaaattttcaatgtttgatcccgaggttgccccaacagggaggtccaaagagtaaggaaggaattttgagctgaggtagggggaggggtataacaatgaaaaaattttttgcaaaatttggagaggggttccctacccactagaattgtctctggaccctcaaaaaaatttaaaatttttaaaatttttcataattggttggttgcccatagccgacaattttgttttgttgaccttgacaaatgaagagattggcaaactcttcaggaaataggcgccgtttcggatctgcactttcagtacggagtcgccactgacgcacaattggaggaacaaaatgcctgtgtgagaattaatgaacaaaatcaaaaatttatttttaaataaaactttattaagaaagctgaaatttaaaataaaatccatttttaaattaaaatattttttaatttattaaaaatacaaaattttttct

SEQ ID NO: 42006 - DNA, 806 bp, Heterodera glycines
  unsure (1)..(806): unsure at all n locations
aaaaaaaaaaaaaaaaaaaaaaatatatttaaaaaaaaaaaaaaaaaaaaaatatgggagcgggcccccaaaaaaaaaaaataaaaaaaaaaaaaaaaaaaaacgcattaaaataaaaaataaaaaaacaaaaaaaaaaaaaaaaatatttttgtgaaagaaaaaaaaaaaaaaaacaaacctctttctttttcttctctttttaataaaaaaaaaaaaaaaaaaaaaaaaaaaaaaagaaaggatggaggggggaaaccacccccctctccttccactctttattaaaaaaaaaaaaaaaaaaaaagaaaaaaaaagaaaaaaggtttttttttttttttatctctctcctcccccccctctcgcgaaaaagaaaaaagaaaaaaaaaaaaagaaaaagagaaaaaaaatatatatttncnttttttttattttaaaataagtgtggagggggcggggggcgggcgccccccccccctcctccccatttttaacattttttattaatttatcattgtgttttaccancccaaaaacaaaaaaaaaaaaaaaaaaacaaaaaaanatanataaaaaaaataaattatatgtatataaataaatataataaaaaaaaaaaaaaaaaataactaagtaagaaagaataaaaaaaataaaaaaaaaaaaaataaaaaaanataaaaaataaaataaaaaaccagancaaacaacaaccacacacacaaccacccacaaaaaaaaaaaaaaaaaaaaaaaaaaaaaaaaaaaaaaaaaaaaaaaaaaaaaaaacccctccccgccccccg

SEQ ID NO: 42007 - DNA, 77 bp, Heterodera glycines
ctctagagtccggttggggcgatttccaattggcacgcattgaccgcacttggagccatgtccaatgaagacgccga

SEQ ID NO: 42008 - DNA, 1119 bp, Heterodera glycines
  unsure (1)..(1119): unsure at all n locations
tggacaaaaaggtacttaattttgtaatcgccacaaatagttccttcaaaatgattgaccatcacacttttcattcattgctcgcaccgcaacaaattaaagtttttgctgttttaaagcctcgcaaatttttaatgtttagggtgagagccattacagaaagcaaattcttcctgcggtgtataagcaagtgcgggagaaaatcaaaaatgaattagaagaatgtgaatggctttcattcacaactgatgcgtggagcgggccaagcaacaattttctatggtaaaaaagctttttgctcgaacgaagaaacatctttctggcaaaaattttatcatggataagggaagaaaatgacgtgttcattagcccaccaattacggaaattgatgagcttgactgtgcgccgccgcctataaaaaaacaaaggccttctctgttcgacgatcttgatgaaatagcgtcatctagcaataaagagaacgaaggcattaaatatttttttttacacataaaagataaattaagtgggagcccatgacatcgaagaagaatttaacaaatatctgacactcagttgtgcacactcgcgtgatgatcctgttgaagcatggcgaaaaatgtcatcgaaatttccacttttgtcaaaaattgcgcgaaaatacctttctgctcctgcgacaagcttgccaagcgaagcaacttttaaagttgcacgggatgtttatgattacagacggtctcagttgaaaccggaaacagccgaaatgttaatttttttaaacaaagcacttccggaaataattacaaatactgaatttaccctcacttccatttgttgccaatttgttgctagttgtgttttttcatatttttttttgcttagaatttttaataaatntattatagtcttttagctttaaatatttaaggtttttattaattaaatcaatttttatcgaatatgaaaaaaatttttaaaaaatccgtatccgtatacggatccgtatttttcctggatacggatttttacggagtacggattttccggatttttagtccgtaaatccgtaatccgtatgtgtatctagtccgtaatcctgatcctgatccgtattt

SEQ ID NO: 42009 - DNA, 1004 bp, Heterodera glycines
  unsure (1)..(1004): unsure at all n locations
tctagagtccgaccatcaaacttcaacaatacacacattgttgcaatatcattagtcaaatgcacgaaataatgagtttaaaaattgaattttttgactttttttattcgggcttagggttcagaacaggttgaaatagatgtcagaatcgaaatctccgactttgaaatcccaaaaaataatttagaagggggtccattaccttaactattacccaatattaattaattatggcacaaaagctgttgccatttatcctaaatttctcaaattttctccccggtggcgctgtcggaagtgaagcagaaccaattccttatagtgttccttaaaaatgctcagattggtcggttttttaagcaaaatcgttgattaaaatgaatttaacaatgattttggtggccaaaatgacaaaagtacggataattttgaatttatcaaaatttcagaaacgcgactcataaaaattgtggaaaatttccgccctcccaaaaaaacacccaaaaacggacttgaaactgctgtcgtagatgacccgcttggtgttgagcatttcgtacgcgcccttgtcccatcctttgcttcgcttcgaccgtttgacctccttcgtcccgagcacaatttcattggcggacggttggaattgggccaacccatcgccgaggcgcgaggcgatgtcatccgagtcgtcgtcaaactgctgctggtcctcggcaccatcaccaacggagtgggactgaaatgggcgcgcgcgagtaaaatgaaatttattttaactttaaccttttttttgacaccctccctctcccataaacatttgtaaggttaggaaattttggacgaatacccctaaaatttttanaaataaaatatggncaaattgggagcaatcatttcaacagctaggggtttccaattttccccaggcggcacctctcggcagaacggcgacacaaattntgttttaccccatttggaaaaaaattctaacaaatggaaaagca

SEQ ID NO: 42010 - DNA, 838 bp, Heterodera glycines
agtatgagtgtgggcgaagttaaaaaagtatgagtgtggcgaagctaaaaaagtatgagtggggcgaagctaaaaaagtatgagtgtggcgaagataaaaaagtatgagtgtgggcgaagctaaaaaagtatgagtgtggcgaagctaaaaagtatgagtgtggcgaagctaaaaaagtatgagtgtggcgaagataaaaaagtatgagtgtgggcgaagctaaaaagtatgagtgtggcgaagctaaaaaagtatgagtgtggcgaagctaaaaaagtatgagtgtggcgaagctaaaaaagtatgagtgtgggcgaagctaaaaaaatatgagtgtgggcgaagctaaaaaagtatgagtgtggcgaagctaaaaaagtatgagtgtgggcgaagctaaaaaagtatgagtgtgggcgaagctaaaaagtatgagtgtggcgaagctaaaaaagtatgagtgtgggcgaagctaaaaaagtatgagtgtgggcgaagctaaaaaagtatgagtgtggcgaagctaaaaaagcatgagtgtgggcgaagctaaaaaagtatgagtgtggcgaagctaaaaaagtatgagtgtggcgaagctaaaaaagtatgagtgtgggcgaagctaaaaaagtatgagtgtggcgaagctaaaaaagtatgagtgtgggcgaagctaaaaaagtatcagtgtgggcgaagctaaaaactatgagtgtggcgaagctaaaaaagtatgagtgtgggcgaagctaaaaaagtatgagtgtgggcgaagctaaaaaagtatgagtgtggggaagcttaaaaaatattggtgggggcgaagctaaaaaa

SEQ ID NO: 42011 - DNA, 1112 bp, Heterodera glycines
  unsure (1)..(1112): unsure at all n locations
tcaccaattcaattttttgnagttttaaggaccaattaggacaataaaagaaaactcatcccntaacattaaaaattttgtgggataattntaatagaaaaagcttatttgttagcaacataatatgacggcaattaagctcccaacattaaatcattggaatgaattttctaataaaacgcactttattttgtaaaaaaatattcaaaaatttaaattttcacagtttttcaccttcacagattattatttaaaattttctttaatatatatattttttgaaaatacaatatacataatttattttttataaaaaatgtcaattttcgttcctttaaaaatgttttccacttcttcggcgtaaacaacaggattcgacgggggaattgaaagattaatgttctagcaaagcccaaaatcgattcatctaactaaatcctcgctttcaaaaaactcatttcctttatgatggctaaagaaaatgaaaaagaattgaatccggaggtaatataattaatttaatttaatattttattttaaaaacttttttttccttttcagttggataagccaaatccagaagaaatgccactcttggaaaacactcccatcaatgatttagtcaaaaaaattgaccgttcagttggccatacatcaaaatctgatttttcaaagcaattctcatggctgttgaagtgtgcattatgcataattttgccggtaaggcacattttaatgaagtattagttaattaatatgtacatatgttggaatgggttccttttttaatttaaaaatttttgatggagacacgaacttgctgattagattatcactgatcaataaaaaaaatttcattttataaaatataatttttcttgattttgattcgaactttctgctgatccgaaatcattgatcaacaaaaatcactttcagtttatgaagccaaatacattttcttggcctttgacccgaacttctttttgatcagaaatcattgatcaaacaaagactacaattatttttatattatataattaattttgacccgaacttgccttgaaaaaattacattttttttccctgcttgttatttattttttagccca

SEQ ID NO: 42012 - DNA, 998 bp, Heterodera glycines
  unsure (1)..(998): unsure at all n locations
tattaattantcggaccttaaattttcagctaattaataagaaaagaatgtacttaattgctcaccgatcacatattaattatcggaccttaaattttcagctaattaagtattcattttctcattttaatttaacgtcaatttttacgtgattgacctgatgcaccaatgtttacccaatttacaggattgacctttacagaaaaatgaaatgaggaaggaaaagacaaacgaccaacgcagccatccctaatcaccgattctcctgcctattttaattacagcattttttgtttgccaattattgctccgctaaaaatccgatccctaaagtgctctagcatttcaagcatagctaaattatatgcgtccacaattaccacttatgtgggaggttgcttatacgtgaccttttcaatcgaaaaattatgcatttaattaaatccaatattcagcttccgaggcaaacaatttttatattttcaactggatttttcaggactgatatttctgaactggctttttcagggcatctcatctgtttatgaaaactttactttttgtgttattataagcgtcaacgggtattcgaacatctcttccatatccgaatacatttttaaaacttttataatttaccccaaactagcgggtgcgtgaaccgtcggatctgggctgggaaaaagcgcttcgcgctttgtgagcttcgctacctaggcgcgttttagtctgttagggtctttgcgtcagccgacatgcacttggtttcctccaataattggagttgacacatcgcataatgcaatggaaaccggaagtgcgtacaaaagtgattagaagaggtgcaaaagtgattagaagaggtacaactgtgattaaaggaggtacaaaagtgattaaaggaggtacaaaagtgattaaaagaggtacaaaaatgattagaagaggtacaactgtgattaaaggaggtacaaaaatgattaaaagaggtacaaaaa

SEQ ID NO: 42013 - DNA, 941 bp, Heterodera glycines
aaatattctccatcgggaggaggctaaggattttcatctgtagataccctagccgataccctatccttagcattgtgaatatgcaatgaggatagagttagggatggggatttttttgctagttcagaatacggataccttatccctatcattatgaatatggatttatctgcagcttgcggattatctgcggatagttagcattgtgaatatgagcatgattgagtgacaggtcaaagggagagaaaaagatacgaaaatacaaaaattcagtgagaatgagagaaagaatagagagacaaagagaaaaggagagagaaagaaagaaaggttagagttacctaattaaaacaccaatcatcaatatacatatctaagcaagcaccttttcctccccccctacccaatgtgttcattcattcttttctgagttcattttgagttgcataaaaataaaacagacaaattttaatgtgctccttcaattaggtcactatgcattttaattacctaattattcatttgttaattacaaacttaaaatgcctaaataaatattcgataattacagaccaatttccctaacaaataagcaaaaccataaggggctacacaatttaaatttgctgcacaaaactaaagggtagtcgccccattttggttttgtagttgtataaaaaactgggtcacctaaagtaaaagcatcgggagccctcatctaggaaagtgcgcataagaaaagagactggcaaaaacttttgcgggagccggcaagagtaccgggaacctggaaaatttctgatagattttgctgaatttccgtctattatagttttctaaagagtttaaaatgcaatttctgccaatcatttttactcccgcatttggtagggcttataaaattggataaaccatgttaagaaataaaaaaatccttattt

SEQ ID NO: 42014 - DNA, 1651 bp, Heterodera glycines
  unsure (1)..(1651): unsure at all n locations
ttttacttaattggtcagtgcttaaaaattatgtatcaaacgaaaacttaaagtctctgggacctaaacaaatactgacattatgaaaatacaatgagaaaacagaatctagcttttttgagtatattcaatataattnttgtctgttacctttatcncaaaatttagttatcgaaaaaattctacaaacttttaacctttagtttgataccaagaaatgtaggcattgaccaagtaaaaaaaaaagttatggcctaagaaactgaggatggtcactgattggtcgtttaaagcgcaatagagccctaaacatgtctttacaggtatcctaattaaaaatagtttaaaattagcgcataaattggcatcggcgtagatttttttgaaaaaaaaaacttttcctatggccacaatctgtacagctgtgcacacagatggcaatattctccaaagtttagaaagatgaaaaacattgtattgcgttttcattgtcatgtgtttttatcgggaggccgaccgaaactggaaatgcaatgcaaatccgccgaaaaattttcggaaaatttatgcgggaaaataaatccgtcccccgcctaacacaacaaaaaaaaagaagcacaggaaaaacaaaagtaaaaataatattattgttgtaaatatgtatatagaggaaatttaaaaatataaatttttaaaatttttgaaatgcccagagacgaattgtggcgctgaaaaatttggcgaattgcccgccgccaatttgtgcgctgtgaagcggaaatgagtgagaaagagagagggcgcgagagagtgaaagaaagagagagagagagagagagaaagaaagatatatgggagagtgggagcacagcgccaaatttgcgaattttgagtgattggatgagacaaatttaactaaaattggaggacatttcaaaatgaaaagacggggggggggtggtgtgttgcncggctctcttctgtgctttttctccttgttgggttggtgntttgctccggnntgttggcgccttttcttggggggttgggcccctttttttttctcttctttcccgctggctctttcgtttttgtctttgtttgtgtgttttttgtcccttgttttgtgggttctttttcccgctgccntttggctggcctgngcgttnccccggttttgggtggcttggcttcgtgttcttcttttgnggtgctttccgtttgccttgctttcttgttttttgcttcgttgttgtcttcctctcgttgtgcggccgctgtgccccttttcctgctctctncgttggccgncgcttgttcggctcncgntcggtctntcntttcggcggcgctggtggggggggggtgctgcgcgntctctcgttcgcggggtggtgnggcgctccgcgcgtttgtgcgttttggtctttttctngcnccgtctgnntntcctcncntctcttggcgggcgncgngcggttngcgcggcggcttttgtttcgttctttctcttttttttgttgctgctgttcttgttgctnccctcgttggtttcnttgtgtgtgctcaaagattttctggncgtttntntntnnccgtctctgtcatataagagtgttgttagttttggtggcattttacttaattatat

SEQ ID NO: 42015 - DNA, 151 bp, Heterodera glycines
gttccatatcgcggtcgtagtggaacaggctgttgctgtagatgctttccagccctttgcgttcgatttgctcggcggtggggataaagcgataggcgccgacgatctccaactcctcctcatcccacagcaccaggtgataatagtcgtc

SEQ ID NO: 42016 - DNA, 1737 bp, Heterodera glycines
attttaaaaattttttaattgctttttaaatatgccaccaattgtaggcttaacttttttagtgaaaattcgatcactcatattttttgctaattgagcagaagcgtaccaaactttgcagggatactccccggtaaaggactaacttacactgaaatgagcgccgagctagctgctcaaaaaaattttcgaaaatctgagtctttcgtttttatttattttttgcaaaattaattcttaaatattttttcagaaagggttctgaaacgcaccaaattttatttacatgttagtttaggcactctgatgctttttctatcaaaaagggagatgaataaaatttttaaaaatttttaattcctttttaaacaggccaaaaagtttaggcttaactttttagtgaaaattcgatcactcatattttttgctaattgagcagaagcgtaccaaactttgcagggatactccccggtaaaggactaacttacactgaaatgagcgccgagctagctggctcaaaaaaattttcgaaaatctgagtctttcgtttttatttattttttgcaaaattaattcttaaatattttttcagaaagggttctgaaacgcaccaaattttatttacatgttagtttaggcactctgatgctttttctatcaaaaagggagatgaataaaatttttaaaaatttttaattcctttttaaacaggccaaaaagtttaggcttaactttttagtgaaaattcgatcactcatattttttgctaattgagcagaagcgtaccaaactttgcagggatactccccggtaaaggactaacttacactgaaatgagcgccgagctagctggctcaaaaaaattttcgaaaatctgagtctttcgtttttatttattttttgcaaaattaattgaaaaatcgattttttttgtttcggggcagtccccccgaacgatgcgcccagatttatgggagaccgatcctttccggaatagcttccctatagcctgtactttaattctgcgttggatttttgctccccataattgtttgagtaccccaaacggacacttgaaaaaatcgatttttttgttttcggggcagtccccccgagccgatgcgcccagatttatggggagaccgaatccttccggaatagcttccctatagcctgtactttaattctgcgttggatttttgctcctcataattgtttgagtaccccaaacggacacttgaaaaaatcgatttttttgttttcggggcagtccccccgaaccgatgcgcccagatttatggggagaccgaatccttcgggaatagcttccctatagcctgtactttaattctgcgttggatttttgctccccataaatgtttgagtaccccaaacggacacttgaaaaaatcgatttttttgtttcataaatatttttttcagaaagtgctctaaagcgcaccaaattttatttacaacttaattttagcactctgatgctttagtatcaaaaaggaagatggagaaaaaaatttttaaaaaatttttccttatattttggttatatcgttttgcttttggtggggtgcttggaacagtggaatcatgcgcacccgtccgatctggcaagttaagcaacgattgctgactagccaaaaggttcggtgccgtgatgaaacgaaccagcactgcttaccccgcggcacccggcacggtcccccgaaggaatggatttaa

SEQ ID NO: 42017 - DNA, 979 bp, Heterodera glycines
  unsure (1)..(979): unsure at all n locations
cggaagggacaaattatggcggaggagacactaccctctttgggttgttcttcattttgttcagttactggttgaagttgggcaagatgaaggacgacgacggcgagaaaaatgaggagaaataattggacattggagtggcgaagaaaagaacgacgaagagccaaggcaaaaaaaaagtgccggatcacggagggggaggggatcgttttccaatagaattctttgaattttgcacgtcataacggaaaaaattactatcgaattaaatttttaactaaattttctatatagcaaaattgtcaaattttcatgcctaaggttggtcagactaaactcgtgagcacagtaattccatcgacggatcagttaaaatgtacgatagccatgccgaccgacattgtgatggaaccgaacgttcaccacagcgggaagaagcattgagggtgaagcagagataactttttggtgaataattgaaaaattgactgatcagcgatcactaatgttcagagagtattctaagtaaaaattcataaaaattattagttttaaaaatttaaatttttgtttaaaaaaatttggcagaggtaaatttagcgtttcagaaatttgtccaagtttcaaaaacaaatttagcacaaaaaatgcgaaaaaatattaatgatttcgacgaacaattaaaatattcactaaaaattattttcaggaaaagctggtttttagattaaatttaaaactttttttttttgcttttttatgttgtatttttgttttttattcacattttaaatttatgtttgatcatttatttaaaaatgagaattgtcaaaatttttaggaattaaattaaataaatcataaacttgccaaaaaattatttaattntaaaaaatcaaatgataaaaaattcactccaaatttggagaaaaatactcagagaaatggtattttttgtctttcacatgagattgctaaa

SEQ ID NO: 42018 - DNA, 1190 bp, Heterodera glycines
  unsure (1)..(1190): unsure at all n locations
agcagaaactccatacacttactcttacataagcaatggctatgtacggctgctcggcacgttcaaagcncaaaaatcggcatttctgccggcgatctgatcggttgtggtgccgatttcaataaaaaacaaatgtttttcacaaagaatggtcgcattatattggtcggttataaaaaaacaacaacaaataatttacaaaaataatgctttatttttgcagatgccgacaatttatttgccacttctaacgatgcgttttgtccttttgttagcttatactccagtggggatttggttgaagccaacttcagccccaacttcaaatttaacatttccacaatcagaaaatgaataaagaatgaattcacactttaatatataataactgatcactcttcactgatcacttttttttatatttgttgtctttttttttgttatctaaatattctctaagcctaaataaaagtaacatttattattctgatttttaaattgatttatttgagtttaatgaatagggctataaattatatgcactaaaaaatgccaaatatgcgcataaaatatgcactaaaaatcccttaaatatgccctaaaaacccgaaaaatgcccaatgcactaaaatatgccttaaacattccccaaaatggcttctaattttcaaaaaaatgccaaattggtgtaaaaatacagaattgactttaaaaactccaaaacaatgactaagaaacttttttttagacaattgcaaaaaatattgactttcaaaatttatatatgcaattttgaatttttttttttttaatttttattttatgctcaaacaaaattactttttttgtatcctttgcatcaaaatttttttttcaaaatttcttataaaaatttcaaaatttttcgattttcaagggtgtattttttttatttccaaaaaagtcgatccttaggggtgtatttttcattgttattgcatttttcttatgaaaatttgccaaaaagtaccgaaatatgctctaaaatttcaaaaatggcgaaatatgcatttattctcgaaaaccccaaaatttggattatatgcactaaaaaccctcaccaaatcaaaaaaattttaatctagaaatgctatttttgagcccctttcttaatagcatatgcggcagaaaaaatatgcaaaagcatataa

SEQ ID NO: 42019 - DNA, 879 bp, Heterodera glycines
  unsure (1)..(879): unsure at all n locations
tttatttaatatgacaagggcaaattttaatcaggtcatggtagaaagttggtggtaaagtaaacgaagacggttggcgggtaaaaaacgggtggtttctccagcagaaaatttaccatcttcttttactgccgtttttcacatggttggtcgttatttgaccaggtcaaatgaccatggttaatgccctggtcaaataaccaccttctttgactacggccncctggttgttgattagggttgctgctttttgtccgttggtgcctgctgcctctgaccgtgttgtaataattgggggatgatccatggagtggcgaattgttttcggctatgtttcgactcgtcctggcactcgtcgtccatctaggcatttcgtttagcatattcgctatttctgctgagttgtcattttgcccattctgtacactttcactttcactttgttcccctcgggcgtcattttgcgccgcttttttgtcttttttcttgctacgcataagtttcttaataaattctggcatttttaatttgccgccgccttccgtttccgagtgttgtgccatcgaatcgtggtcactttggtgattatgcatggagtcattcttgtgtttaatactgttacggggcactgaccaaacagtgggacaccgtaagcacagagagaggacaaaagcaagggacaggagggtactgtagtaaaaacgcatttctcaggaagggaataaaattcgagatgtaaaaattgtctttgttaataataatgcatataatatgtaaatgtaatgactatgaaattatttatctataaataattaataatagataaatcaataaaaattcaatattccctcccctcccctcgnccatggctctcacaat

SEQ ID NO: 42020 - DNA, 579 bp, Heterodera glycines
attgggcctagttaatcagtaaaaaaaatttggagcgatttgaatgagaatagaacgagccagcttcgacggagttttggtaacccaaaaaactatccgaaatatttaaaaatctataaaaaacttacaaatgacaattcatgcgagattttcttgaaataagcttaattggtcctagttaagctgtaagacacccaccccttttgcacttaaaaaaatttcaaaaaatttgatcgtccataaataatttgtaattgatcaggggctcaccaaattttgcagagatacgtatcggagcactacaaatgcttactaatttttctagattttttaaccccgctgaaaaagttaagcctaaactttttcggcctgtttaaaaaggaattagaaatttttaaaatatttattcatctccctttttgataatataagagtcagagtgccttattcaacttgtaaataaattttggtgcgtttcagagcagtttctgaaaaaaatttatgaattaattttggaaaaataaataaataatgaaccctcctccttaataattttcctgcgcccaaggtactcactcg

SEQ ID NO: 42021 - DNA, 1121 bp, Heterodera glycines
tttttagcaaaatcaattcataatatttttcagaaactgctttgaaacgcacaaatgttaattaaagttaaataaggctctctgatgcttttctatcaaaagggagatgaataaaatttttaaaaattttaattcctttttaaacaggccaaaaaagtttaggcttatattttaaaaagtttcatcgaacctagcgcactaaaatcgatataatctctccaaattttgcaggccttctccattgtaaaggactaacttaaccagaaaaaatgccaacgcttgttgtttttaaaatttttcgaaattctgactttttcattacttatttattttttgcaaaattaattcataagtattttttcagaaagtgctctgaaacacacaaaactttatttacaggttaattaaggctctctgatgctttttctatcaaaagggagatgaataaatattttaaaaatttttaattcctttttaaacaggccaaaaagtttaggcttatattttaaaaagtttcatcgaacctagcgcactaaaatcgatataatctctccaaattttgcaggccttctccattgtaaaggactaacttaacctgaaaaaaggccgagtgagtacgcttcggtgcaggtaaaattattcgaaaggaagacagtttcattaattatttattattttgcaaaattaattcataaatatttttttcagaaactgctctgaaacgcaccaaatgttaattaaaagttaaataaggcactcagatgctttcactatcaaaaagggagatgaataaaaaatctaaaaatttttaattgctttttaaatatgcgaaaaattttaggcttaactttttttttataaactggtcagaagcgaaccagattttgcgagagcatcaaaaagacaaggaaaagcactgctatgatgctaactccagtaattctgaatttaaaattttttattaatttttaaagcttcactattttatttttttagcaaaatcaattcataaatattttttcagaaactgctctgaaacgcaccaaatgttaattaaaagttaaataaggctctctgatgtttttctatcaaaagggagatgaataaaatttttaaaaatt

SEQ ID NO: 42022 - DNA, 1288 bp, Heterodera glycines
  unsure (1)..(1288): unsure at all n locations
tttggtttggccagcttgtataattcttacaattcnagctcattaacccctcaaaataaactgtataagtgtgcggaaagtatggagttgataaacgctaataatttccgatttacaatttacttaagcaaatttatacagatacatttggaggaaaatgagctgaaaatgtgaaaatttcacaaagatggtcgtgaaaataataagtcggagattattggcgctatcaactcaatatttccgcaacgctgttagagtttatatttagatgataattagctgaaatttgagaatttcacaaggatggtcgtgaaaataataaatcagagaatattattaacccgatccttctacaatattgctgcagtatttatttagagattaagtagctgaaattgtgagattctctatttacatttcattatcactttgaaattctcaaaatttcagctcattatcatggaaatataaattgtataggcgtcgcagaaggatcgagtcgataagcgccaataattttccatttattattttggtttggccagcttgtataattcttacaatttcagctcattaccccctcaaaataaactgtataagtgttgcggaagtatggagttgataaacgctaataatttccgatttacaatttacttgagcaaatttatacagatacattttgaggaaaatgagctgaaaatgtgaaaatttcacaaagatggtcgtgaaaataataagtcggagaatattggcgctatcaactcaatatttccgcaaccctgttagagtttatatttagatgataattagctgaaattttgagaatttcacaaggatggtagtgaaaataataaatcagagaatattattaacccgatccttctacaatattgctgcagtatttatttagagattaagtagctgaaattgtgagattctctatttacatttcattatcactttgaaattctcaaaatttcagctcattatcatggaaatataaattgtataggcgtcgcagaaggatcgagtcgataagcgccaataattttccatttattgttttggtttggccagcttgtataattcttacaatttcagctcattaccccctcaaaataaactgtataagtgttgcggaagtatnggagtgataaacgctaataatttccgattttgcatttacttaagcaaatttatacagatacatttggaggaaaatgagctgaaaatgtgaaatttcacaaagatggtcgtgaaaatataaagtcggagatatcggcgctat

SEQ ID NO: 42023 - DNA, 1218 bp, Heterodera glycines
  unsure (1)..(1218): unsure at all n locations
tttttagtgaaagtttgatcactcatattttttgttaatgagcagaagcataccaaactttgcagggatactccccggtaaaggactaacttacactgaaatgagcgccgagctagcttgctctaaaaaatttttcgaaaatctgagtctttcgtttttatttattttttgcaaaattaattcttaaatatttttcagaaagggttctgaaacgcaccaaattttatttacatgttagtttaggcactctgatgctttttctatcaaaaagggagatgaataaaatttttaaaaatttttaattcctttttaaacaggccaaaaagtttaggcttaacttttttttcagaaactgatcagaagcgcaccaaactttgcagggatactgaaaggaagagaaaaacctattttaaatattatctagtcagttcatttaaataatttttatccaaaaaatttttttttgggttttcggggcagtccccctgaaccgatgcgcccagatttatggggagaccgaatccttccggaatagcttcactatagcctgtactttaattctgcgttggatttttgctccccataattgtttgagtaccccccaaacggacacttgaaaaaatcgatttatttttgttttcggggcagtccccccgaaccgatgcgcccagatttatggggagaccgaatccttcgggaatagcttccctatagcctgtactttaattctgcgttggatttttgctccccataattgtttgagtaccccaaacggacacttgaaaaaatcgatttttttgttttcggggcagtccccccgaaccgatgcgcccagatttatggggagaccgaatccttcgggaatagcttccctatagcctgtactttaattctgcgttggatttttgctccccataattgtttgagtaccccaaacggacacttgaaaaaatcgatttttttgttttcggggcagtccccccgaaccgatgcgcccagatttatggggagaccgaatccttcgggaatagcttccctatagcctgtactttaattctgcgttggatttttgctccccataattgtttgagtaccccaaacggacacttgaaaaaatcgatttttttgttttcggggcagtccccccgaaccgatgcgcccagatttatggggagaacgaatccttcgggagtagcttccctnatagccctgtacttt

SEQ ID NO: 42024 - DNA, 766 bp, Heterodera glycines
  unsure (1)..(766): unsure at all n locations
cccgagggcttggcgaatgggcatgcgtggcacccgtgagcagttggaacccgagggcttggcgaatgggcacgcgtggcacccgtgagcagttggaacccgagggcttcggcgaacgggcacgcgtggcacccgtgaacagttggaacccgagggctccggcgaacgggcctcgcgtgacacccgtgagcagtcggaaagcgagggcttggcgaacgggcatcgcgtggcgtccgtgagcagttggaacccgagggcttggcgaatgggcatgcgtggcacccgtgctcagttggaacccgagggcttggtgaatgggcatgcgtggcgtccgtgctcagttggaacccgagggcttggcgaatggcatcgtggcacccgtgagcagttggaatgggcatcgcgtggcgcacgtgcagcattggaacccgagggcttggcgaatgggcatcgcgtggcacccgtgagcagttggaatgggcatcgcgtggcacccgtgagcagctggaacccgagggctttggcgaatgggcattgcgtggcgtccgtgagcagttggaacccgagggcttggcgaatgggaatgcgtggcacccgtgctcagttggaacccgagggcttggcgaatgggctttgcgtggcacccgtgagcagttggaatgggcatgcgtggcgcacgtgcagcattggaacccgagggcttggcgaaggngcatgcgtggcacccgtgagcagttggaaggngcatgcgtggcacccgtgagca

SEQ ID NO: 42025 - DNA, 100 bp, Heterodera glycines
tgtcgtcggcgataggcgcctgggtgcgcgcaacgccgcgcatctcctgacggttgttgccgttgatcaccgccagcttcacctggccgtcgccttgcag

SEQ ID NO: 42026 - DNA, 889 bp, Heterodera glycines
aaaaatggggtttgacaagtttattggggaaaaaaagactttacaaaataatacccctgggagaagggagtgggaaacatgatttcaaaattttcaatttttttttagtctaatctactcaaaacggttcagaattcaataaaaataacattcacggtgcgaaaaatggggtttgaaaagtttattgggaaaaaaagactttacaaaataatacccctgggagaagggagtgggaaacatgatttcaaaattttcaattttttctagtctaatctactcaaaacggttcagaattcaataaaaataacattcacggtgcgaaaaatggggtttgaaaagtttattttgaaaaaaagactttacaaaataatacccctgggagaagggagtgggaaacatgatttcaaaattttcaatttttttatagtctaatctactcaaaacggttcagaattcaataaaaataacattcacggtgcgaaaaatggggtttgacaagtttattggggaaaaaaagactttacaaaataatacccctgggagaagggagtgggaaacatgatttcaaaattttcaattttttctagtctaatctactcaaaacggttcagaattcaataaaaataacattcacggtgcgaaaaatggggtttgacaagtttattggggaaaaaaagactttacaaaataatacccctgggagaagggagtgggaaacatgatttcaaaattttcaattttttctagtctaatctactcaaaacggttcagaattcaataaaaataacattcacggtgcgaaaaatggggtttgacaagtttattggggaaaaaaagactttacaaaataatacccctgggagaagggagtgggaaacatgattcaaaa

SEQ ID NO: 42027 - DNA, 774 bp, Heterodera glycines
  unsure (1)..(774): unsure at all n locations
gatttattattttcacgaccatccttttgaaattctcaaaatttcagctaattatcttctaaatataaactctaacagcgttgcggaaatattgagttaatagcgccaataatctccgacttattattttcacgaccatctttgtgaaattttcacattttcagctcattttcctccaaattatctgtataaatttgctcaagtaaattgtaaatcggaaattattagcgtttatcaactccatacagtttattttgagggggtaatgagctgaaattgtaagaattatacaagctggacaaaccaaaataataaatggaaaattattggcgcttatcgactcgatccttctgcgacgcctatacaatttatatttccatgataatgagctgaaattttgagaatttcaaagtgataatgaaatgtaaatagagaatctcacaatttcagctacttaatctctaaataaatactgcagcaatattgtagaaggatcgggttaataatattctctgatttattattttcacgaccatccttgtgaaattctcaaaatttcagctaattatcttctaaatataaactctaacagcgttgcggaaatattgagttgatagctccaataatctccgacttattattttcacgaccatctttgtgaaattttcacattttcagctcattttccttaaaatgtatctgtataaaatttgctcagtaaattgtaaatcggaaattattagcngttatcaactccatacttccccgcacact

SEQ ID NO: 42028 - DNA, 1212 bp, Heterodera glycines
aatttgcaggagagtgtctccgtcgtgaaatgcacagcgctgcgcggtctgccactcagcccgaccgcgtgtgcagacagccgtgtcggtgcgatcaaataaaacaattaattttgattgcatttaatatgaaaattaatccataataaaaaaaattctaacttttcttcagtgagcaggtgttcagcattacgtacagttgtgccaggtaaatattgtaaaattcgaaatgttttcaaattccgggcggggggggggggggggtaccgttttgttaaagtatgagaagccatttttatgaaaaaatattctgggaatgcgataccgacaattcatctgatcattttttcttctcggtctcaagtctatctcagtccatttgagctgttaaatccctttctcatttgcttaattgaatattgaatttgctattatttttataatttggcgtttttcattattttctcatgctttattaaatttattcaataaattaattcaacagatggccctccagcgatttggcattgcacggcgaatgcgacccgtcgctgagcggtgcccaatgtctgcagttccatcgagaacagtccgccattgtcgaggtgtactttgaacaattgaactacgagagtttgcaggagagcgaagcatacggagtaaaaacgaaaaatattttatttaaaattgaagaagggagggggaggaggggccaatgcttaatggggaaatatgtacgcggaaggcaaagcggaccaactgcgtttaggaaaagttagaaaccatcaacaaagttggcatcattcaaatgcgctaaaaagctctacagctaaccaaaactcataatgatttgcaaagaagtaaacaattaaaaataagaatatacaaaaattctgacttttctgcagtttcaggtcttaatttttatctggttgttaatctcatagaaataccttacatatacagtctaaatatagatgaacaaagaaaaaattttggctacaaaaagccattaaataccacaaatttggctttctgtctcttaaagtcacaatcaaaaatctcgagtaattgttgcgagaagttgttactttttttcttgtaacaatatcaaaaatattttgctgttttcccatagatgccaaatttgctgtctgactttggcggacagcatggcctatggatgggtgtttcagtgatcacaatcatgga

SEQ ID NO: 42029 - DNA, 989 bp, Heterodera glycines
cttgaatttatttgacaaatccaagacttaaaactgggagaagaaggggctgtggctgggggcctaaaatttggggccacatttggagaattaattctgatttctgaaaaagtcccagaaatgactattttttctttccataccttcttgtagagctcgagctgctctttccaatggtcttatcccggtctcgatccgtgccgaactcacaaagttatggagtgaaatgtgaaatattgttttcaccacaaggcattttttctgaaaaccggattcaaaaatctgaggtttggtataaccgttttagaaatagcgtagaaaacagcttcgatatcaagaaaccaagtcaagtccagaaaggaatattttaaaacgatttcgttttgttttggcattatgataccgaataactttcggaaattatggaaacaaaattggagaaattcgaataattttttgactgcaaatttttttccttttttgaattgggttcaaaaaaattttaagagaatttttgattattaatttgaagtcttgaatttatttgacaaatccaagacttaaaactgggagaagcaaggggctgtggctgggggcctaaaatttgggccacattggagaattaattctgatttctgaaaaagtcccagaaataactattttttctttccataccttcatgtagagctcgagctgctctttccaatggtcttatcccggtctcgatccgtgccgaactcacaaagttatggagtgaaatgtgaaatattgttttcaccacaaggcattttttctgaaaaccggattcaaaaatctgagggtttggtataaccgttttagaaatagtgtagaaaacagcttcgatatcaagaaatcaagtcaagtccagaaagaatattttaaacgatttcgttttgttttggcattatgataccgaataactttcgggaaattatggaacaaaattggagaaattcgaataatttttt

SEQ ID NO: 42030 - DNA, 1085 bp, Heterodera glycines
tttggcaattagatggaacttccttttgtttggaaattgccaaattcctcttctcgtctggccctcatggccagcacagaaattcgttggattttgcatagtttcttgtcaaggacgtcctttccagaattcgctgtgatgcaatgcgttcatgggtcaaaattccgtccaaatttcctcttcaaaaaaatgcgtcgtttctctcaccagctgattgctccgtcagccgctcctatctgttcgcatctgtcatcttatgctatgttaatgaatttgatataaaaaccgcaatgtttccaaccaattgaatgttccgccgctctgtcccgagagtcatcgttctgttgtagtgtcacatcctttttatggcacattttgtgtataagagtcatgttattagacttagacgtccgttttgccgcatttcatgtgttaaaggttgctgcagcatctctgcgtcagcaagcgtgattagttggaaattggtcatcagtattgcagtttcagttctcaagttcggcacccatgtcgtcagcaactgtcctggtgacaaaggtgttttttggaaatttaattttatttgatttaaaaatttgaaaacaaaattttatgtttttataattataaggtaatggatttttaggaataatcgccggcgcctgcggagatggtgtacttcaggctgcggatgtcattcttttttgccgctgccagtgctgcaaattgcgcggccacaagccaaaggactgctggacattggctgcttggcgtatattttgtttctttgttttgataaattgaatgcctaattcatgtgagaaccttgccacaattgcgtcagcaggcaaggaactcacgttcaagtggggaaaaagccgttttgatttgcgcggctatgccaagtaaatgtgcatcccattggcgtctgcatgggatgtgctcggtaaggactaccattttttgtgtcattttataaatttattttttaattattgcagaggaaatcaaagaagcagtgcaagctgccaggacattgtttccgccgcaatccacaaaagggatgtgttttgcgtgccaaaagacaa

SEQ ID NO: 42031 - DNA, 1329 bp, Heterodera glycines
  unsure (1)..(1329): unsure at all n locations
ctttctttaattgcgtcattttccctctctctcattgtgtccttttccctctctctctcattgcgtcctttccactctctctctctaattggtccctttccctccctctttctccctttccctctctctctctcattgcgtccctctcccctccccctttttctttaccttttgtgccaccgtcgcagtttccctctcgcggatatttcctccatcttatcccgccatttgctgcgcaataatttcccctattttcttgcgaagcacttttttagtcatcttcggtgtcggtccgtttgacatcatccataatgccgctatgacgttaagtaagaaaagcgcaagtgtaaaatgaaaggcaaaataattatctaaaatttaaattttaatgacattaataatttatttattgaaatattcgctacctaattaaaatcataataataataatcatataaataaacgcaaggaatggtaaataaatgcaaacacaaacgctgagaaagaaaaggaaagtggggggaataaacccaatcggaaaggaaagaaaggagtgaatggacacggaatttgcttcggttttgatcgattgttttggtacacatatttaggcccctaattgccttactttgttgtttttgtttgctcctcttctgttgcccttttggaattcattttgcgcaattacagtaattaaatgatccgtctcaatttgctttacatttgcttccgtttcttattttaattattagtcgacgacaattcgcatgttaaataaatcattattttctgattttctttttccgatcgcttcgatttgaatctctctccgttccgactgatcagcagaatctctcctttttgtcctgtccttttctgctaccaccatagccattgctcttcgtcctccccaattggcaaaaaaggacgtttcgttgccatttcattttggtgcctttccctccccaaaatgtccctccgttttcgccttcgctgttctttggccatttggaaaagtgcggagcaaagcccctccaaattgtgttgcgaacgtttcagctaaatcttggtttacaaaaaaatatttcggaattccccggccccaccgatttctgacggcacattctcagcagaccgaggagctgctcgccctcccgggccgccaattgtcccccgcttcgcattgcatcggctgagtattcgctccggggggcgccgatcagtccgccgtcaatcccgccattgttaaggtctgaacatggaaggatacgcagaagggatccgctgtggggaggaacgacagccaagtgccccccnaggccaaaggga

SEQ ID NO: 42032 - DNA, 1201 bp, Heterodera glycines
ggctcaaaaaaatttttcgaaaatcggagtctttcgtttttatttatttgcaaaattaattcataaatattttttcagaaagggttctgaaacgcaccaaattttatttacatgttagtttaggcactctgatgctttttctatcaataatggaggtgaataaaattttaattgctttttaactttgggaaaaagtttaggcttaactttttagtgaaagtttgatcactcatatttttttagtctaatctactcaaaacggttcagaattcaataaaaataacattcacggtgcgaaaaatggggtttgacaagtttattggggaaaaaaagactttacaaaataatacccctgggagaagggagtgggaaacatgatttcaaaattttcaattttttctagtctaatctactcaaaacggttcagaattcgataaaaataacattcacggtgcgaaaaatggggtttgaaaagtttattggggaaaaaaagactttacaaaataatacccctgggagaagggagtgggaaacatgatttcaaaattttcaattttttctagtctaatctactcaaaacggttcagaattcaataaaaataaaattcacggtgcgaaaaatggggtttgaaaagtttattggggaaaaaaagactttacaaaataatacccctgggagaagggagtgggaaacatgatttcaaaatttttgttgaaatatttgtcgtgctctgaagggcgtgggagggggggggcgaaggcccaccacgaggccgcgaagaggccgagtgagtaccttcggtgcaggaaaattattaaattttaaaaattttttaattgctttttaaatatgccaaaaaatgtaggcttaacttttttagtgaaaattcgatcactcatattttttgctaattgagcagaagcgtaccaaactttgcagggatactccccggtaaaggactaacttacactgaaatgagcgccgagctagctggctcaaaaaaattttcgaaaatctgagtctttcgtttttatttgttttttgcataattaattcataaatatttttttcagaaaatgctctgaaacgcaccaaattttatttacatgctagtttaggcactctgatgctttttctatcaaaaagggagatgaataaatttgtaaaaatttttaattcctttttaaacaggccaaaaag

SEQ ID NO: 42033 - DNA, 546 bp, Heterodera glycines
accgggaccgggccgggaattcccggtcatccgaggtcccggtcccggtcccgggttttgaaatgctcaggtcccggtcccggtcccgggttttgaaatgctcaggtcccggtcccggtcccggtagggcaaccgggaaccgggaaaaacaagcactggtaagaatgggttctgagtgaaaaattagtgaagaaaattagagtcaaagggaaaaataaaaaataataattaatatattctttaaaagtaacactgcccaagtgtgcaaatggcctaatggctagtctccttgactttgcccttcttctttcccctggttcaatccctctacagaaattagattattttcaattttttttttgtatactcgtgggtttcctataaagaaaatatgattcctcatagtttttttttaaattgatacatattttatcattttttaaatgaaaatcctaccaattgagcttaataatcgcaaaaaccaacctttttttgttgaaaatctgttaacaaattgcacccaaatttttaaaatttcccccggcg

SEQ ID NO: 42034 - DNA, 1229 bp, Heterodera glycines
tcagttactgtttactcagacttctcggtaaaagcgacttttattttacaaaacttttcaaaagaacaaaaattatgaattcaaagcattatttttattttaattttatcatagacgatttctattatctgaaaaatattcttttagatactgcattacagattgggattttatttggggtatgtcaaattgcccatttgattcaattatgcttattctttgtcacattctaaaaaaggtttaatatccttttttattcgctgttttaaatcaattctatttgagcccaccatgagaataagaatgaatcagttactgtttactcagagttctcggtaaaagcgacttttattttaataaaactttttcaaaagaacaaaaattatgaattcaaagcattatttttattttattttatcatagacgatttctattatctgaaaaatattcttttagatactgcattacagattgggattttatttggggtatgtcaaattgcccatttgattcaattatgcttattctttgtcacattctaaaaaaggtttaatatcattttttattcgctgttttagagtatatataatttgttgctatatcctggtcttttaatatttttgctgaactagcgaaccagcctacacaaaaagacgtctttgtcgcaatcaattctatttgagcccaccatgagaataagaatgaatcagctactgtttactcagacttctcggtaaaagcgacttttattttaataaaactttttcaaaagaactaaaattatgaattcaaagcattatttttattttattttatcataaacgatttctattatctgaaaaatattcttttagatactgcattacagattgggattttatttggggtatgtcaaattgcccatttgattcaaatatgcttattctttgtcacattctaaaaaaggtttattatcacttgaatcaatcaaccggacttacaacatttgaaagtggcaagcaaaaccagacataattttcgatgatttcgtggccatggaagcccccgcggagatcacacaaaatgcgacaaaagcagccgtacaaaacgacgcgtattttccccaaaattttgaccagcgtcgacaattaaatttctcaaacaccgaagcagcctgaaaccttcaaatgctacaattgcggccgtgaaagggcttcgtctacacgcaaatgcaatgctcaatggaggag

SEQ ID NO: 42035 - DNA, 961 bp, Heterodera glycines
ttaatgaaaagtcagatttcgaaaaatttaaaaacaccaagcgttggaatttttcaggttaagttagtcctttacaatggagaaggcctgcaaaatttggagagattatatcgattttagtgcgctaggttcgatgaaactttttaaaatataagcctaaactttttggcctgtttaaaaaggaattaaaaatttttaaaatatttattcatctcccttttgatagaaaaagcatcagagagccttatttaacttttaattaacatttggtgcgtttcagagcacgttctaaaaaatatttatgaattaattttgcaaaataataaataattaatgaaaaagtcagaatttcgaaaaattttaaaaacaacaagcgttggcattttttcaggttaagttagtcctttacaatggagaaggcctgcaaaatttggagagattatatcgattttagtgcgctaggttcgatgaaactttttaaaatataagcctaaactttttggcctgtttaaaaaggaattaaaaatttttaaaatatttattcatctcccttttgatagaaaaagcatcagagagccttatttaacttttaattaacatttggtgcgtttcagagcactttctgaaaaaatacttatgaattaattttgcaaaaaataaataagtaatgaaaaagtcagaatttcgaaaaattttaaaaacaacaagcgttggcattttttcaggttaagttagtcctttacaatggagaaggcctgcaaaatttggagagattatatcgattttagtgcgctaggttcgatgaaactttttaaaatataagcctaaactttttggcctgtttaaaaaggaattaaaaatttttaaaaattttattcatctcccttttgatagaaaaagcatcagagagccttatttaaatgttaattaacatttggtgcgtttcagagcagtttctgaa

SEQ ID NO: 42036 - DNA, 496 bp, Heterodera glycines
atgtttgaaaattcataatccacttctaaatgaatcaattaaagtgcaaaaagcattaaaaatagagaaaaaaactggagcattttatacttttttagaattttctatcttcaaaatgaagaagttattacataaattttggaaaaattggttttttgagaaaaaaaattaatagcactgttctgaaaaggttttttgaaaaacacgaaattcttcctctataagcttctgtttattctatatttttataagacttttgaaaaaaagtacaaaaataaactgattttggaattcgggatcatagatggaagcaaatggttttttgggccatgggttcagatccacttgcctgtaaaaatgttttttagggtttttgggaccactaatcaagaacttggcatccattttgcccaattccaaagccttgatccgaactcgaaaccccaaaaataatttttaaaaaatgttgcacgaatgtggatttgaacccctggcc

SEQ ID NO: 42037 - DNA, 57 bp, Heterodera glycines
attggcctgcaccacgatgcggcggctgccgttgttgcggctgatctggttgggacc

SEQ ID NO: 42038 - DNA, 1109 bp, Heterodera glycines
  unsure (1)..(1109): unsure at all n locations
cgggtttcaaaaattaagatttaaaagaggcaaaattacagacgtttttcaaattttgggtgtctccgaatagaaagaagttggaaatcagtacttttcacgcctataaaattcgggccgaaaaatattggtgtttgtgactagaaaaatagcagatgcatatcaaatgactacagaaaattacagcctccaagaaaataattgctttgcagaagcaatattttgtagagcccctcaaacacattgtgcttataggaaaggccgaattaaacaataggggcctttttattatgattacaacaaatcagcatggcgtctcgctgatatggtatgtttcagttaaggtttagccgatctacaaatttcggcactgtctaatttgtaaaagcgaagcaaattcctttggattccaaagtggaattacagaattgcaacggcaaatacaaaatagacaacgacgctttcattataaagctttaagggaggaaaagtaatacgaatatttcaatttcttacttatcagaatagacaaagataggttacacacgaacatttttatagaaattccggctgaaactaaaatccctcttttggtcttaacttatgatttttggcccattatggatgaattaaatatagaaggcgtcgcagaaatacattcatattttctcaattcgggtttcaaaaaattaagatttaaaagaggctaaattacagacgtttttcaaattttgggtgtctccgaatagaaagaagttgtaaatcagtacttttcacgcctataaaattcgggccgaaaaatattggtgtttgtgactagaaaaatagcagatgcatatcaaatgactacagaaaattaaagcctccaagaaaataattgctttgcagaagcaatattttgtagagcccctcaaacacattgtgcttataggaaaggccgaattaaacaataggggcctttttattatgattacaacaaatcagcatggcgtctcgctgatatggtatgtttcagttaaggtttagccgatctacaaatttcggcactgtctattttgtaaaagcgaagcaaattncctttggattccanagtggaattacagaattgc

SEQ ID NO: 42039 - DNA, 1099 bp, Heterodera glycines
tttcccttttcaaagcaaagaaaggaacgaaaaggggaaaaaaggggggggggggggggacaaataaaaataaacgcacacattgcaataaatgggaacagaaagcgcagcggagcattcattctttgggttggcatgtgatgaaagtgataattgataaggggacaaaagacgtaacaaaataaacaatcgtcgcaaaaattcaatttaatcgtacaaaatttttaaatttaattcaaaactaattcattaattaatggaagaaagaaaatgacgtaatattataaaaaaggaaagcggagaacggagaattacgctttatttgtgtttctttttgcttttcctcccaaattcctccgttttatttgccaaccaaagaacacacaaaagcacaaaggccaaaaagaagtgggcacagaataaataaatgtgccatctgctgcttagggaaagtgttgggatgcaaaggcattcttcggacggatgactcatcgcttttcctttcgcttttgctgtgccaatggccattcattctgtctctccctttatccctctctctgtcccttcctccgctttatcctccctttatccctccctgtgtctctttatccctttttgtcctcccttttcgtctgttctcgaagggatggattttattattaatattaatcttttcccgccaacaattgttcgttcgttctttcgcttcacgtggggggacaccgattaattctgtgacagcgcccaatgcgtcgctaatcgtaagccgtgacattcatcgctcatcgattcactcacttttgcctcgtgctttttatttgcacaataaaattacttccgaagttcagccgatgacgacggcacagccacgggtcattaattaattgattcattcactaattaattaactgattcgtcatcattagttaaagtgcaggcattaatgttagtcaaaaggtggaactaattgatcagcagaaggagagaaaaaaaattgtaaaccaaaaaatgataatttaattgtaagtaattttatagcgaatgcgaatttgatcaattaataagaaaatagaataaattaacttttaatacagcacat

SEQ ID NO: 42040 - DNA, 303 bp, Heterodera glycines
tggtcaatggcaactcgtacaaaaaaaaaatttcaaagaatttcactaaaacttataatttttatataaaaaaactaaatggattttctagcctagaaaaacttttttaaacacttaaattttcaaaaaatttaagaaattttaaaaaatcagctgaaaaattagtaaaaaaaacttagaattttttttaagtttttctaggctagaaaatccattaaggtaaaattctaagtttagttgaaaattcttagaaatttttttttgtacgagttgccctgtgtacgagttcccatgccactaaaa

SEQ ID NO: 42041 - DNA, 1337 bp, Heterodera glycines
ctttgcctaagaaacataggattgatatgatggaaaaccgtaataaatgagccatgttttaggtattttatttcctgacatttattttaagcaaatgggcgcaccaactgtttttaactttgtttttgacccgatcacattggaggtggcgctggctcacggttggtggtttggtgaaaaagcataataacagtttttgattaattatgaaacaaaattcccaaattagtcattgagcattaatatgtccgcatcaattatcaaaaatggggttctgggttttgttcgtgttttggctctatggtctcgtactctgctcgaggcaattagttcgggaagagacagggagtgagtgagagagagaaagagagagagaaatctagaatcttccaaattaaacattcttggaatcatcaatagccctaagagtcctcaattagtttgtaaaatttaaaaaaatagttgtttgtttcaaaaaatttacggtcaaaaatgtccgggaaacgagttttttgaagtttacaagccttaacttttttgatagactaaaagaggactcttacagctatcgaatgacaccaagaatgtttaatttaggtgattctataaatgatcccttaaattttacaaattattttatggtagtgtctttttatggtccggtggactgatagagccatcagagtgcttattccgttcaggtttaatcaacccaaacactggagtgttcaatgaccgtgcgaatgtacaacagccagtgccgttgtaccatgcgcttcggcgcggctttatcaaattgccgagcatggcaacgggaatcgcattgacacttaccgattgcgttgagtggttcttcatcgacgacaacaccggcaaattcagcgaccgtttttccgatgatcagttctcattgttcgatgcgatccaccaacctcgtccgctggtcaagagcaacgtgcgagaaatcattgacatggcaaacaatcggcggcttactgttgcggaagcggtgcgtgcgaatgtcttgtgccaagacactggaagattcatcaatgtgcacggacacgctgagtcgctgcgtgatgcgtaccaactcaaattggttcaaaagccgcagactttggccgaggtcattgatagtggctcgctggacaacgatggtcgtttcatcgatggtgttaaacctcgcactctgctcgaggcgatttgttcgggaatgctcgacccggatgtggcgcacatcagagcgggaccaggcgacgaagtgatttccatcggagaggcgctgaagagaggtcgcttgacgccgcaaggggagaattgtgttgactctgggt

SEQ ID NO: 42042 - DNA, 1784 bp, Heterodera glycines
  unsure (1)..(1784): unsure at all n locations
cccctntttcgaaaaaaaaatttcaaaatttttttctgaagaaaagtcattttaggggttttcgcggtcagagaatccgattcttacatccatttcggcccaattcgaaccttgaacccaaattcgaacaaaaagtcgaaaatcaaattttttatagtttcgcatttttggttcaaacccggctttaatgtaagaaaacaaatcaaaagtcataaatgatgttttttgatgaggttttacgaaattggttgcttttatgtcgcctaattaaattttttatctttaaatttttcactttttcacgaaaaaattcacataactcacttaaaacacgttatggctaaaaataaaggtcagattcttgatcagcatcaaaaattagcctagaaaaaattattagaaaaaaaatttcaggggggtgacaaaacctagaagtaccgcctttacttggttttacacattttatattatattaaaatagcataactgactttgcacggcaattctgtagcctcatctccgactacaaattccgataggcaaattgggcaatcaccacctttgttttcttcatctattttctgttttgataggttggcagtgattttcaaacctaaatttttatgaagaattttatgtgttgtgactttttttagcaatttttaaagaaattaattgaaacttttaattcattgttaaatgtatataaaagcttttctgtatttctgtctccagtttttgtaaactattttctgaaattaaagtagtcaatttaaatcagtttaagtgttatttgtatttcattntgttaattatttttaattgaaattacaaaaagttttttgcctttttccgactgttattaaataaaacattccccaacgcccaatttgactgattcgattatctttacctttctgttttgttttgtattcattaattttgaattttgcccaatgccaagcacatatcgctataattatggccaagctaaatagcaatccaaaaaaaatatccgccactcgcttcttacgccgactttttcgcctgcctttcttttgagctaaattttaattttgtttttaattcgctgataaatttattcgattgttttggtttattattttttgcttcaaataaacaatatttaaatgcgtgctggcgcgtttcttaaattccgccacccatgcgcgtttcttaagcccgccaaaatgggtttgcgcgtttcttaaattccgttaaattccgccacccatgcgcgtttcttaagcccgccaaaatgggtttgcgcgtttcttaaattccgccacccatgcgcgtttcttaagcccgccaaaatgggtttgcgcgtttcttaaattccgttaaattccgccacccatgcgcgtttcttaagcccgccaaaatgggtttgcgcgtttcttaaattccgccacccatgcgcgtttcttaaacccgccaaaatgggtttgcgcgtttcttaaattccgttaaattccgccacccatgcgcgtttcctaaacccgccaaaatgggtttgcgcgtttcttaaattccgccacccatgcgcgtttcttaaacccgccaaaatgggtttgcgcgtttcttanattccgccacccatgcgcgtttcttaagcccgccaaaatgtgtttgcgcgtttcttaaattccgccacccatgcgcgtttcttaagcccgccaaaatgggtttgcgcgtttcttaaatcccgccacccatgcgcgtttcttaagcccgccaaatgggtttgcgcgtttcttaaa

SEQ ID NO: 42043 - DNA, 1252 bp, Heterodera glycines
tttctttttaattgtcctgcattttcgcaaaaaaaaatttgttttcaagcaaagggatgcttgtctcgtttgtaaaaaatgtacttaacattaactccagcagtggtcttatgtgggcattccatgaaacattgtgccactgttttctgaccgacctcaacagagaaagaatggaattggcgatgagcagacaaagttgacaaaatgtaagacgctgttcaacaccagtgcagcaagtcaatgtgtcagaaaaacatgccgtcaaaaacgcgtgccaacacaccatgccgggcccaccactgagtaattttggcatttacatcttccgcaaaagtcccgcaccatcatacaccttgcacaccacaaattcatcctcgtcctctgctgaacaaagttactgatcggagacaaaatgccaatgcaaaagggccttttgcgccgcctgtgccatccgaaaggttctgccaaaattttgattccggacagtgcaccaatttgatcaaatgatttgttgcactgttcgtaatcaactcaacattggatggaaaataataacaaaaatgagaaaacgaatgaatgaatgggatgggaagagaagagagaatgagataagaaggaagaaaggtcagcagaagcattaataatgtgaaaagagagtgcgaaaatagcaggaaatagtgtatggcaggcagagggagggaaagagagaaacgaaaattgacaaaaacaataaacaaaaaaaaagtgctctttgatccccgaggcagcacatttcttcaaccgcgccatatgtatgtaaatgcacaaaactaaacgattgaagaaaaaatatatgtacaaaaatagcccggaagcgtaaaggaagtttcgaaaaattttttattcggcacttttgcagtttaggtgccccctaatttggacagagaagtttgtggcttttcgggatcgctgctcatgtaatttgacactcattttggcgaattttgaattccggaccagaatttaacagaaaatccaatgcctttgaattttacactaatgttcaaatttaacccttcaaaaactctaattggtgtcccaccaatttttcttggcatttgtaaaagtcggacaccgcaggggccaagtaaaccagcgcatttgagccacaccagtgcaggcaatggccaatctttagattcatgaaatgtttaaaaattcaaaaaaataaaatgaagaataaaaaaattcaaatttccgaggaattccgaaa

SEQ ID NO: 42044 - DNA, 190 bp, Heterodera glycines
ttcctatttttctatctttttcgggatttttgtacctatttacctaatgtgtaaatatttggtacttttccattatgctgacacaccacaaatttattgtgctttatgctgacacactccaaatttattgggcttttatgcttcttaaataattttttgcggccgtataaaggacgacgacgatccattc

SEQ ID NO: 42045 - DNA, 870 bp, Heterodera glycines
tgggcgcatcgtttcggggggactgccccgaaacaaaaaaaatcgatttttcaagtgtccgtttggggtactcaaacaatatgggggagcaaaaatccacgccagaattaaagtacagtctatagggaagctattccggaaggattcggtctccccataaatctgggcgcatcggttcggggggactgccccgaaaacaaaaaaatcgattttttcaagtgtccgtttggggtactcaaacaattatggggagcaaaaatccaacgcagaattaaagtacaggctatagggaagctattccggaaggattcggtctccccataaatctgggcgcatcggttcggggggactgccccgaaaacaaaaaaatcgattttttcaagtgtccgtttggggtactcaaacaattatggggagcaaaaatccaacgcagaattaaagtacaggctatagggaagctattccggaaggattcggtctccccataaatctgggcgcatcggttcggggggactgccccgaaaacaaaaaaatcgattttttcaagtgtccgtttggggtactcaaacaattatggggagcaaaaatccaacgcagaattaaagtacagactatcgggaagctattcccgaaggattcggtctccccataaatctgggcgcatcggttcggggggactgccccgaaaacaaaaaaaatcgattttttcaagtgtccgtttggggtactcaaacaattatggggagcaaaaatccaacgcagaattaaagtacagactatagggaagctattcccgaaggattcggtctccccataaatctgggcgcatcgggtcggggggactgccccgaaacaaaaaaatcgattttt

SEQ ID NO: 42046 - DNA, 1029 bp, Heterodera glycines
  unsure (1)..(1029): unsure at all n locations
tttttcaaaaaaggataaaattcttgaaaaattaagcaattatcttaacaaattacataaaaatttcaaaactttttgctggcggcgcctgacggcacagccgatcccccattttagcatatttttgaaaaatggacccaatattgaaaaaagtctttttttttgtcgaaaacaaatacctgcaaaacacacctcctaattcgggatttcaaaaaaagaaaggaaaacacccctaaaaatcgattaggaaaattgatcagaactgttatctcagtttgacataaatcagtgagtttggctagtctcggctctatctcatcaaagagttcattttggaaaatttatttaacatttttctaaattagtgaatcaattttatttgacacatgaagatctttcgaaacacaccaaattttaaagttttggtaactctaaaaagttatgaacggtgccgaaacggtgggcagaattgtgcctgtccaagtacagtacccggaaattgaacggtggcacggcagggcccagcgcagcagagaccaaatgggtcggatgaaatacgtcagtgatttgggccaacattatgccgaggggacggacagctgcacttaattactaataattgattgaaagcaaccacaaatacgcgcactgacaaattaattgaatttgaaggcaattaattatatacacattaaattgaaacgctgcttgagggcaattaggggacaaattaattaattattatacataatacttgaggcaataaaaataacagagagcggggcgggggaagagggcgggtaacagtcagtcaacaaaacggggtgtggggcacaaaacagcggcgggctgaaagtggggggaggggcagcgccgatcaaaattggctgactgatcagtgatcatcagccaaccccattcacccgtgttcctcagtcgtaaacattgattgaaatggacaacggcagcagcaggaaatanaataattaggngacgaaaggagggcaaaggcgtgccgcgggggagcat

SEQ ID NO: 42047 - DNA, 51 bp, Heterodera glycines
cccggcttgcgttggatcagaccggcgcgttgcagccccgtctcaatgcgt

SEQ ID NO: 42048 - DNA, 1028 bp, Heterodera glycines
ttttaaattttttatagatttttaaatgtttggatttttttggcttaccaaaacttcatcgaacctggttctttctatctcttttcaaatcgccccaaattttttttacagcttaactaggccctattaagcttatttccagaaaatctcgcatgaattctcatttttaaattttttatagatttttaaatgtttggattttttttggcttaccaaaacttcatcgaacctggttctttctattctctttcaaatcgccccaaattttttttacagcttaactaggcgatattaagcttatttccagaaaatctcgcatgaattctcatttttaaattttttatagatttttaaatgtttggattttttttggcttaccaaaacttcatcgaacctggttctttctattctcttttaaatcgccccaaattttttttacagcttaactaggccctattaagcttatttccaaaaaatctcgcatgaattctaatttttaaattttttatagatttttaaatgtttggatttttttttggcttaccaaaacttcatcgaacctggctatttctattctcattcaaatcgccccaaattttttttacagcttaactaggccctattaagcttatttccagaaaatctcgcatgaattctcattttaaaaattttttaattgctttttaaatatgccaaaaaatgtaggcttaacttttttagtgaaaattcgatcactcatattttttgctaattgagcagaagcgtaccaaactttgcagggatactccccggtaaaggactaacttacactgaaatgagcgccgagctagctggctcaaaaaaattttcgaaaatctgagtctttcgtttttatttattttttgcaaaattaattcttaaatattttttcagaaagggttctgaaacgcaccaaattttatttacatgttagtttaggcactctgatgctttttctatcaaaaagggagatgaataaaatttttaaaaatttttaattcctttttaaa

SEQ ID NO: 42049 - DNA, 881 bp, Heterodera glycines
ctattttgagatttttcgtcactaaaagtcccgaccctaatcataatgcttgaaaaataattaattttttttttaaatattcaattctttcttcaaataaattggaataaataatacatttaaatacaaataaaagatctttgcttccattcattagaatgtgctttcaatcggacatcatttgttgcgtgaacaattgcattccgttggacagcgattggaaattgccattgggcggcggcggctgcagaaattccaccgatgcggcgccatttggcatctgaaagcgttggaagtgaccgtcctgtggattggccatgttgtggtaccattatcgactgtgttccggtgggatggaattgggcgtccatttgtgtcgccgctcctccgtctccgatcgggcgctgctcagtccaaaggcgagcattttgtgggaattgacgaatttcgaccggtgccaagaattgttgctgagtgctggcacacgactgctgctggtcgccgagttgggcagggcccggcgaaccggcgatcatcggaccgacgcccacggcgcgaacactgcgaatcgtttggtcctgaaaagtcccacttttggtgttctcatccttttggccattcattcttctcctttccaatttcaatttttgtttgtgcaaaattcgttcacttcattacgcaccccgggcaaatcgtttgcttaggaaatgacaaaacggagaaaaggcgcgaaacggcgaccgatcggacggatccattctcaacgcgaccgatcaacacaacgaacccattcatcatcatcatcataatacacaattcatgacaatgagaagaaaggaaggattttgggaatgtttgtttgcttatttggtcggccgaat

SEQ ID NO: 42050 - DNA, 897 bp, Heterodera glycines
tttgcggtaaaaaaatgagaaaaaagagatagccatctttttggtcaagaattttttttttgtttgcgtttcaaatatcgtaagattgtttgataggagacaagagaaggcaactgttggtaccaattttgcgttaaaaaaatgagaaaaaagagatagccattttttggtcaagaattttttttgtttgcgtttcaaatatcgtaagattgtttgatagggccagacaagagaaggcaactgttggtaccaagtttgcggtaaaaaaatgagaaaaaagagataaccatttttggtcaagaattttttttgtttgcgtttcagatatattgtttgatagggccagacaagagaaggcaactgttggtaccaagtttgcggtaaaaaaatgagaaaaaagagatagccattttttggtcaagaattttttttgtttgcgtttcaaatatcgtaagattgtttgatagggccagacaagagaaggcaactgttggtaccaattttgcggtaaaaaaatgagaaaaaagagataaccatttttggtcaagaattttttttgtttgcgtttcaaatatcgtaagattgtttgatagggccagacaagagaaggcaactgttggtaccaagtttgcggtaaaaaaatgagaaaaaagaaccatttttgtttgatagggccagacaagagaaggcaactgttggtaccaagtttgcggtaaaaaaatgagaaaaaagagatagccattttttggtcaagaattttttttgtttgcgtttcaaatatcgtaagattgtttgatagggccagacaagagaaggcaactgttggtaccaattttgcggtaaaaaatgagaaaaagagataaccatttttggtcaagaattttttttgtttgcgtt

SEQ ID NO: 42051 - DNA, 814 bp, Heterodera glycines
cacatttgatatccgctgactcatgatttaagtctttttgtctagctaaataattttgcctgagaaaatttcgcgattgcgtattttgtgggcgttgcggatttgcgttgttcggtttgggtttataagcgggactttttggtcaaatgcattccattcgcgtgcatcagtctcctctagttgccgcaacatttcacgtttgattaactcatagcggaaaggtactgtcgaacatgccgacctaaaggccctctcggctcgtccaaaaactttggactcgagcgaacttatccttttcgcatttgtccattcgccagtattcgaatcaaaacgcttgaaaaattcacggaacttttccgcaccttcattgacttttagagcggggatttgactaattatgagtgcgtatgctacttggtccattcccggttctcttccccgttcaatgacattctcaattggacgattttcgaaattttggcgagccaaattttgagcggcattaatttgttgctgttgtggttgcgaaattggctgaacaacttgcggaatgtgtgcttggtttatcatgccaaattggtggttcccttggggcaaatacggctgttggagttgcgggttataagcattttgcatttgtggtggattttgcgcatttgtgctcataaaaccaatcatttgttggtttaaaaagctgcatgagtaatggtgctagctggtaaaatggatttattgccgggtaaatccaaaagggccctggaactgcttgctgaaccggcgggaaaaatgctattggttgctgaacgacttgtgg

SEQ ID NO: 42052 - DNA, 849 bp, Heterodera glycines
gagaacacttgttttaggggttttcagggtcagggaaaaccggttttgacttcaatttcgaccaattccgaaccccggacccgatttctaacaataaatcgaaaattcatttttaactaaagttcatcttttgttccaaaaaacgctttttaggagttttaagggtcaggaaaaccgattatgacttcgatttcgaaaccccggacacgatttctaacaataaatcgaaaattcatttttaactaaagttcatcttttgttccaaaaaaacgctttttaggggttttaagggtcaggaaaaccgattatgacttcgatttcgacaattccgaaccccggacacgatttctaacaataaatcgaaaattcatttttaactaaagttcatcttttgttccaaaaaacgctttttaggggttttaagggtcaggaaaaccgattatgacttcgatttcgacaattccgaaccccggacacgatttctaacaataaatcgaaaattcatttttaactaaagttcatcttttgttccaaaaaacgctttttaggggttttaagggtcaggaaaaccgattatgacttccatttcgatgaattccgaaccccggacacgatttctaacaataaatcgaaaattcatttttaactaaagttcatcttttgttcctaaaaacgctttttaggggttttaagggtcaggaaaaccgattatgacttcgatttcgatcaattccgaaccccggacacgatttctaacaataaatcgaaaattcatttttactaaagttcatcttttgttccaaaaaacgctttttagggggtttaagggtcaggaaaaccgattatgac

SEQ ID NO: 42053 - DNA, 1341 bp, Heterodera glycines
ccataactttgttcatattcaaacaagtcctaattttttattacgtatcattcaaaagcacaaagtcttaaagtctcagcgtttagacaattgccaaaaaagatatgattatttaagtattaccttattctgaatttgtgcttttgaatgatattacaaaattaggacttgttcgaatatgaacaaagttatggtcgagaaattcatgattgctagttgattggactcataaagtgcaatagaacccgggattttgcctaatccgggccaaaatccaatctcaaaaaacctggattgattgaaagctttcaataatccgaaaaatccctaattcttcctttttagcctttctttttgactttccattgactgtgctttttgtccacctttcgtcttcaattttgttcatccaaaatggcggaggaaaccagcaaaaccagtgaaaacatcgctgaggacaacggcatcaaagtgctcgactctttgtttgccgccgtcgcccacgcctcaaaatgtttggcattcgctgccggcacgcccaacttctgcttggccacgcccgccttcctggctgtcatggtacggcctttcggacacttcctctatttttaggggaggatggtcagtaataaaatggtgttttcgtaatttagaaacacttccgctccctcctccttttttgggttggcaaataaaatgccatcatttcgctgtgtgatttaggcgctaggatttctataaattgtaacctttgacacgtgcgcatcagaaattaaccccacaaactgcggtcaaatttatccttgcaaaaaatgttggcaaattcggcggttgcgcccgaactttttttttgtcggttgagtaagccgaaaaatggaccaccttttttgttttggcctctgttcaaaccgaaagtaacacaccaatttaaaaaatcaaataaatcttcggaatgaatttccccattttccccaaaaactctgtttttctatttttaggtttggtgctgtttcctcatgccggtaatggtcatacggggagagggcatcatttgaattgagtcgaaatgcgttttgtttcagcctgtcgctgtgcttttccgcagctatcgccgcgacggcaacgcgttcactgtgcaggcggcgtacaacgtcattctgtggtgagggggcgggggaggaggtcaactgcatctgagcaaagccataagttatatgatttggtatctatcaaaagctatggtctttttgaaaaaaaaaacgattttctttctaacaataagcaatcgcaacccacataggaggaaattttaaatttattggatttgactaaaaataaaaa

SEQ ID NO: 42054 - DNA, 1040 bp, Heterodera glycines
ctgttggtaccaattttgcggtaaaaaaatgagaaaaaagagataaccatttttggtcaagaatttttttttttgcgttttaaatatcgtaagattgtttgatagggccagacaagagaaggcaactgttggtaccaattttgcggtaaaaaaatgagaaaaaagagataaccatttttggtcaagaattttttttgtttgcgtttcaaatatcgtaagattgtttgatagggccagacaagagaaggcaactgttggtaccaattttgcggtaaaaaaatgagaaaaaagagataaacattttttggtcaagaattttttttgtttgcgtttcaaatatcgtaagattgtttgatagggccagacaagagaaggcaactgttggtaccaagtttgcggtaaaaaaatgagaaaaaagagataaccattttttggtcaagaattttttttgtttgcgtttcaaatatcgtaagattgtttgatagggccagacaagagaaggcaactgttggtaccaagtttgcggtaaaaaaatgagaaaaaagagataaccattttttggtcaagaattttttttgtttgcgtttcaaatatcgtaagattgtttgatagggccagacaagagaattcaactgttggtaccaattttgcggtaaaaaaatgagaaaaaagagataaccatttttggtcaagaattttttttgtttgcgtttcaaatacagtaagattgtttgatagggccagacaagagaaggcaactgttggtaccaattttgcggtaaaaaaatgagaaaaaagagatagacattttttggtcaagaattttttttgtttgcgtttcaaatatcgtaaaattgtttgatagggccagacaagagaaggcaactgttggtaccaagtttgcggtaaaaaatgaaaaaaaagagatagccatttttttggcaggaattttttttgtttgcgttcaaatatcgaatgattgtttgatagggccagacaaaaaaggcaactggtgggaccaattttgggggaaaaaaatg

SEQ ID NO: 42055 - DNA, 652 bp, Heterodera glycines
  unsure (1)..(652): unsure at all n locations
aaaattntgaggttcacgctccttacatgtgctaatttacggggaaatgttgcgcatgggagttcgacctgagctgatccgccagggaaaccacctgctggagatgaaagcacgaaagcgtggtgccatcacaaccacagtgtttcgggacaggcaaaaaattgaaaaaatgaatttattttaattttcgatcactttagctacaagctaatcccgatcaaactggccagctttgtcaagacgttcggccttgaaatcgagggggtggacaacaaaaagtattttccccacaaatacaacaaggtcggggggggggggggtgaaaaacaagaataaactgaaaaatcgataaaaatacaggctgaaaactatggcactgtcctggacaccctgccaccgatggaagaatactaccccggcagcctttttccggcagagcgcacgaaattcgagcagtggtacgaggagaaccgggagacggagtttgacctgtgcgaggtgattgccgattactgcaagacgggtaagaattttgaaaaattaacttccagaattaaaaattttaaagatgtccaaattttggcccacggtctggtgaagatgcggcaactgtttctgtcccagaccaagcatgacatcaccgactcgatca

SEQ ID NO: 42056 - DNA, 843 bp, Heterodera glycines
  unsure (1)..(843): unsure at all n locations
aatttgatcaggctttgttttgctcaattcgcattatttatggcattttgttcggtttagtcactcaaaatggacttaaaaaaggaaaagtgccaaagattgggtccattttttaaagaaattcactcaatctaaattaattttgcccatattgttttttttgaatggactcaattttcatttattttggcatatcaaaaattttaatgccttttaagtgaagtaaaaatgccattttttgcagtaaatatatgaaaaagtaaacagacgactgacaagtgcctgacgacggcggcagtaaaagacaacacgccaaatgtacacacccataaataaaaataataaattctgtgtgtattggggggaatggggcagtggaacgggaacggggagggggcacaaatcggggggacggggagagatcggcgggggggataagcggggggaggagggggaagagaagggatgtgtaaagtgaagaagcaattcaggcggagggtgagaaccaaagttgagtgaaaaagctggtgaaatggaggataagcaaaaaaaataaaaatttaaatttaaaattacaaatttaaaaaaacggatgggatgaaaaggactgggaatgggatggatggagaaggggacgaacaaatgggataaaggcagataaaggaacaccggaaatcccgattgaacgaccataggaaatttcggaattctcgggcctaatctcaagtccgatagctcatgaaatttccctatttttcggttccaacccaagttctagcctggttactttcctgattcctgngactaatcccgagttttctgatatgctcgaaaaactctcga

SEQ ID NO: 42057 - DNA, 835 bp, Heterodera glycines
attttagctcgaaatggctgacccattgaatacccgcgggtcgactcttttccaggcaatttcccccgaatgctatgccaattcgggcacttttgcgcacattacgggattaatgccgtgagtatttttgcgcactctaaacattactttacttttaccattgttacttttacagtaatcacgaataccgtttccgattggccgcaatgaccgccacgggtgatgtgctgtactccgagccgatctctgcgcgcacccgacatgaacaggcgccagtggtgtacaacagcaaagaacgacgcgaattggacggaacacatcatcaacagcagcacaatgataacagagtagggaagagcaaaataaaaatgagcaattaaatcacgagtgggaaatttaagggcactttgacttaccaaacgaccccacgtacgtccatccttggccacgactcggctgaccatcatccgccgcatcatttgttcggccaatcatccaaccatatcaaaaaattggcggtctcctccgttcaatcatcgtctaaaaaacagcaaaagaatgtgcaacaaaaaccaatcgcaccacaactgtcagcggaagaacaaccagaagaaactacggcaacttccagggcgatgttgccgaaagcgccgaactgttcagcacccaccttctcggcattgactagtgaaagtgcacgagtcgcctggaaattggtcaaatccgccgaagatggaggaacaaaggaactgtcaccgaaggtggagaaacaaaggaaaacagccaaagcacgtcgtcgacatcagcactgatttcgagcttcaagggtggacaa

SEQ ID NO: 42058 - DNA, 1312 bp, Heterodera glycines
  unsure (1)..(1312): unsure at all n locations
gttgtttggagaatgccgtgtaatagaaagcagtcgaagttgagcggatttaagaagaatggaaattttcattggggattttcatccaagagaatgaaacaatgggagtaagtcgacgaaaagtctcttcactaattttatggagggggggggggaggattttccgggtgggaaatgcaatttcgcatatccatgccaaacacaaaagtttatcgtggtgcaaaaaaacctccagcttttgataggtacaagttgcccctccaacggtttcaaaataagttatgtaatagggggggggggatctttggtcactgacttttgtctccgtcatttgtcccctccccccagcaaaatcattcatcggaaacgagcctttgactttattactgtttttaaagaataaagcgattaatggcatattattttgtaattttaatgaatttatttatgccagcgacgagcggaagaatttaatttaaaaattattattaatatagtcattaaggcctcacattcaagtgtcatttaatgttgaaattaagcagtttatatgcattttccttgttttttaagtattgccaccggaaattccgcgccaggaaaggggaggggggaaagcacggattggcatttacggttccctgcttcggcactattttaagccgaaggaatgttttggtgcgatttttggcatggaatagcaaaggcgcaggcaaaagtaatcagaacgatttgattttngaaagtaaattgataataggaaaaacatcacacgtgccgatttgtcttaaataggggttcgcaggtgtccttatttctaaaaacgcgaaaaacagcaggctgtgaaattgaagtccaaagccttatatatttgaagccttttatccttattttgttttgcaaaggcgctttaaatgcattggacaaataaatacatggaaaaaacaaagggtgtccccaaataacaatacgccgtgccaaccatcgcctttgggggatgcccgcggggtcacaccgacaggtgacaaaacgccgacgagaagcgccttttaaaggggtcccatgtaaaagcaatgaatgattccttttgagggctatggaaagagcgaattttgttttatgggcgggagcgaacaaacatatttatgtcgtctgaacaatttataagtatttcctgtaggaaacaaatactttgttttgaaatattaatttttgattggttcttccttttccggacgttgggatggccggaaattaaaacgaaatgatcaacagaaaatttactaacaaatgtttgcactagaaaagacaa

SEQ ID NO: 42059 - DNA, 471 bp, Heterodera glycines
ttaggtctatcaaatgatatcaagaattaaaaatttggttgcttttgagcaaagctataaataatttttcgacaaaaattttcataatgatggtttttaaataacggctccgcccccttattttaaccaaaggagcatcagcggagacggggcgtagtgccggtgtcatggcaactcgtacaaagtttaaatgaatgtggccataactttttttagtcggccaatttcttaaaacttggtatcattcgaatgcctttcatgcttagaagcgttgattaagcagaagctaagtgattaagttcatctcacaaagaagttacattttaaagaagattaaaaattcacaaaagcagacctttttgcaatttataaattatattcttttttgtgagatgcttaatcgcttagcttctgcttaatcatcgcttctaaacatgaagcattcgaatggtacaagttttaagaaattgg

SEQ ID NO: 42060 - DNA, 918 bp, Heterodera glycines
aaggaattccggcgcgcctgccgcctgggcgacgcgggcgccgcctactcaaaaaagtcgatggaaaattggtcgacgatgggcggcggcggtggcggcgccgcgccatcggtcgccggcgtcagcgccagcggctgcagcaccgcccagcgctcgccgtccgccgccggcggcttctatcgccagtcgccaacgcccggcgcagcgaccgctacggcgacaacggcgcgccagcagaggccgctggcgctgccgtcgctgtccatgcgccggtcgccgcgccaaaagccggcgcggcgccaacctcaaaatccgcagcagcaacagaataagtggcgactgttgtcccgcaaaagtacctcaatgtcatgccattcggccttattatgagagagagacaaaatgccaagaattttgaatttgaaaataaaaaaaacattttattatctctcttttttgtgtacaaataaatatatgtgtataagtactgagttaaaaagtgataaactgataaattttatatttccatccatcttctcgagagaatatttattaatattaattaaaaaagaaaattgcaatgtcaaaactctcaatttttcgagtttttaaccggttcaaaaattggttaagactcatttccctaattggagatttgttttttcgtgtttatctactcgatacaattattggtaaattgttcaaatgcatttgaaaaacgctatttcactcgcaacttttcaaattttttattcatgtacaaaaaaaccgtgctgggtcgtttcgtaaaaagtgccaccttgggaatgtttcgtaaaagtgccaactattttattcgattttgataacatataaaatgaatatataaaatatataatttatcaatggcaatttttattttttatctgtgcaaatacg

SEQ ID NO: 42061 - DNA, 1318 bp, Heterodera glycines
ctcagattcatgatcattgatcagcaccccaaaaagacagcgggacttggagattacagccccattgtttttcacagcgcgtagacagaaaacttttttgaacactcttaagttgaaatgaagaattttaaagaattaaatgttccgacggtgagacggtatccaccgaagaattttttttttggaaaatttaagaaaattttaagagattcttgacaatcagctaaaaataattaattcaaaaatggaagttgaaatcaatttgaaattgtttagtacggattggcggcggtgatggtaaatcagcagatccaatgggcacagaatttaaaggcttatatgaagaacataaaaaatccgaaaaagctaggaaaaaatatttaaaaaatcagccaaaacaaccgattcgtgcagctgttgcaaatgaattttcgagacatagtaagaaaaattaaaaaacaaaataaaattgtaaaataaaaagtttgaaaaaattgggtattttaaatccttgattattagagatcggatacggaccagatccgtatacggatttttacggatccatagtccgtatttttttcggccgatacggattttttacggacaacagttttccctggtttttagtccgtaatccgtatcgatatcaagtccgtaatactgatactgatccctattttcgcaaaattccgatctctattgattatcaacgaaatttgtttaaaaatgcttaaattcatttttacttaatttttcttggattacatggtggttgaatataccaatggacttgaaattatttatgtatttttattttcatttaaaaaaatattgctgatttttattgaagaaattttcgggatgaagaaatttttaaaagcttccgcaaaataaaaagtgactttttttacttttttttttgctttttaatttttaatatattttctggtttaaagaagataaaatttaatttatagataaattttcatattacagtttgtttgtttttttataaaatttagatatattttttttgtataaaaaataaaattttaaaaaacaaaaaaaaatgaagaaaatcaatttttgtatagattcctggcgcggcaattttatgtaaatccggtagacgtataggagccggtgactttaaaaaaacaatttgttgattaaaattttataatatattcacaaaaaattcttaaaaataacccgtttaaaatctaattgtttaatttgtaaaactacaaaccgttttagggtgtgcttcttataaaatgtccactttcgttgccatggaaaatgacctgccagg

SEQ ID NO: 42062 - DNA, 1233 bp, Heterodera glycines
  unsure (1)..(1233): unsure at all n locations
tgaggagttaacntccggagccccaaacaacatccacactcaaaacacccgttccgatcaaaactattatacacccgacccttttaaacggtctttttaggtacgtgaaggaaaacaaagatttatttaaaattacggcggccggaaaggtacagtcgaacatgaatttgccgattgaaaacagtaattatagagatgttttgttgtatctcgcagggaagaaagatgaaacgccgcgcggtgcaaaatttctcaaagatcggttactgaaggatccaacagtaaaagacatggttgataaatcaaaggtcatgtggggacgtggaaggaaaaaggcaataaaatctataaaaacacccggcatagtgcgagtgaagaaacccttcaaaccactaatatgggcaagactgtagagaaaattttatcgaaaatttattttaatttaaaatctccggcaagttttgctggaattcaaaaaattttaaatgcggccaaaaagattgacccgaaaattacgaccgatgacgttaataaattcctagaaaagcagaaaacatacacgattcacaagcccatcaggaaaagattcccgagactaaagacgataccaagtggcttccataccgattaacagtgcgatttgtgcatatttgaccagttgaaaaagcataacgacggttataaatatttattggtctgcatcgacgtgctgagtcgaatgatcttcagtgcaccggccaagtcaaagaagagtgaggacatgatcgaagcttttgatcgtgtgttcgaaaagtctaaaattatcccgatgaaaatatatagtgacagtgggcttgaattccaagcaggaaaaatgaaaaaatattttgaggaaaaattcatcatcaaaaatgtaatgtatagtcctgatctgcacgccggagtcgttgaaagggcaaatcggacaataaaggagcgcttgtacagatattttacaaagaaagacactcttcgatgggtcgacgtaatagacaaaataataacaaacattaacaacagtgtgaatagaacactgggagccaaaccgtcttcaattaattttgaaaatgcccgtgcgctctgggaaaaattatataaggagaaggaatttaaaatttcgaaaaagaacaaatttaaaattggcgatatcgttcgaattacaaggaaaagggaaaatttcaaagggatacctcccaactttaccgaagaattgtt

SEQ ID NO: 42063 - DNA, 990 bp, Heterodera glycines
tagggaagctattcccgaaagattcggtctccccctaattctgggcgcatcgttcggggggactgccccgaaaacaaaaaaatcgattttttcaagtgtccgtttgggtactcaaacaattatggggagcaaaaatccaacgcagaattaaagtacaggctatagggaagctattccggaaggattcggtctccccataaatctgggcgcatcggttcggggggactgccccgaaaacaaaaaaatcgattttttcaagtgtccgtttggggtactcaaacaattatggggagcaaaaatccaacgcagaattaaagtacaggctatagggaagctattccggaaggattcggtctccccataaatctgggcgcatcggctcggggggactgccccgaaaacaaaaaaatcgattttttcaagtgtccgtttggggtactcaaacaattatggggagcaaaaatccaacgcagaattaaagtacaggctatagggaagctattcccgaaggattcggtctccccataaatctgggcgcatcggttcggggggactgccccgaaaacaaaaaaatcgattttttcaagtgtccgtttggggtactcaaacaattatggggagcaaaaatccaacgcagaattaaagtacaggctatagggaagctattcccgaaagattcggtctccccataaatctgggcgcatcggttcggggggactgccccgaaaacaaaaataaatcgattttttcaagtgtccgtttggggtactcaaacaattatggggagcaaaaatccaacgcagaattaaagtacaggctatagtgaagctattcccgaaggattcggtctccccataaatctgggcgcatcggttcagggggactgccccgaaaacccaaaaaaaaattttttagataaaaattatttaaatgaactgactagataatacctagaagaggttatttctcttcctttcagtatccctgcaa

SEQ ID NO: 42064 - DNA, 1101 bp, Heterodera glycines
gttgtcatgacaccgaaaaaggcattcaaaatgagggagactatgtataaaaagtacattttacaaaaatgttggaacttgtcttggtgtttttcttggtactcgccgttcaacaacaacaccatttcacatccgtgccattctcagctgttcctcggcatccaacgcgcccgcatcgcacaccaccgacatttgctgggattggttgaccacgacgtcatcgatgccggcggataatgccgttgccatcgtctgcggtgtggtggtgccattcagaattgagcccgtgttcaggaatcgttggtgcaacttcttcacttggtccatttgcggtggctccatgccgaactcggcccgatatcttcaaaaattggaatatgatcaagagttaaaaaattaatcattatttgtggtgatcagggatgtgtaggaatgccggtttcaattactgagttccaacatttttggcacggaatttcgattgaatgccgaaattttttgagctatcggaattccatgataatattgagtctccatggtcataaattcgagaatgccaaaagccccgcccaaatttatgtaaatttaattagaatagtcctaaaatcgtaaccaattattttatattgtcgaattactgtctgggttttttcgaatcaactgaaatggatgtcataccgaaattccttggaatttaaaaaattcctaaatttttgaattgggaaactccaaattccactgcatcttcttttccccatttgttgtgccatttgactaccttcgagcaacttgcgcaaaggaatgcgtctcctcaaaccagcagaccaatttgaccttctcaagtacactcagcactcgtgcccctttgttgatcgccgctcgtgccatttgatgggccattttaattggattttaaaaattcgaaatatttataaatttaaaggttgacgattttggtaattcgacgacaaaaaaatcgccataacttttgtcaaaatcgatcaaattaaacattcaaagcaatggaggcactcttatctattgtacatgcaaaattcaagaaaagttacatctttaaaaaagttatatgtaagtacatga

SEQ ID NO: 42065 - DNA, 714 bp, Heterodera glycines
caatttttttaagaaaaaattataggtttactttctgcgattcatttagaagtcaaaattaagcagtacaaaaactaattaaattaggaaattggaacgtcaaaaatctgtctgccgggggaatcaaactgctttcttaattttcagcccattaggaaggggcattaatagaagaggagggtccctaatggagggaaattttatttttcaattttatatttattaaatcggcacaaaaattacataattttttaataccagcaacatatgtatttgcctatagagaggcaagtagagtagagaagagaacagagtgtgacagacgaatgagagagtggaggagaggctagtagagcctgagagaaatagtgcttcatagacgttattgaagagagaatagaggaggagtgaaaaatagagcggaaaagagaaagagcaatttaattcgctattaattcagtttatagaaaacttattaattaagaattcagtatttctttggaatttttgcaaaaagttttcggaattcctcggaaatttgaattttttttatttaaccattttatttttttgaatttttaaacatttcatgaatttaaagattggccattgcctgcactggtgtggctcaaatgcgctggtttacttggcccctgcggtgtccgacttttacaaatgccaagaaaaattggtgggacaccaattagagttttt

SEQ ID NO: 42066 - DNA, 1171 bp, Heterodera glycines
  unsure (1)..(1171): unsure at all n locations
ctactccctattattgtcctatggaaataatcaaatccatagcagaacgcacgctacaggtgtaaaaaatttttttttcctttgtaaatttttctaaacaaactttttttttgagagagcggaggaggccttgggcgcggagacgaccccgctgggagcagaactggaaaaactttgtgcaaacgccgaacggatcgcagtgcaacaggagaagctcatggaaaagatggaactctacaagcaaaaactgagcagcggattggcacatggcacagcaatgctggtggcgtccaaagtggtcggagagcggacacccttcggagaagccctgcagaagacggctcaaactctggcagctcttgacgcggcgcgacgacagctcagcaaaagcgacgtgaagctgggaggcaccaccacaacaatcagcgctatccgcgtgagttagcttgttttgtttttgttttttgctggtaatttcccattttcagaaacaactggcactgctgcagacgaaacgcttggatttggacgtcttcaaagcgaaatttaggcgcgcatcaacaaccgaggaaaaaaatgccgtgagaatgttttttgttgttgttgctgctgagttcacgatttttcaatccttttcagattcagccccaattgcaacgagcacagagcgagttcacgcgccttcaaacacagctgaaggagctcgtcttggactaccagaagaatatgcagaacatgaagaagagcctgctggagttcgtggaggcccaaatcaaattccacacgatgtacgtccaagcggcaacaacaacagcaccagcaaagccgatggcagaagctccgagaccattccccgacaatttgatccaaaaaattgtacggtcgaaacaaatggagtttccgaaagaggtgaaaaagcgagttttgcattgtcaatttcatccctttttgcaggtttccagcggagaaattcaacaactgtgcgctgccgcaactgacgccttcaaacgccaaccatcgctggtcgaaatccttccgcctgttatggtctgcggcgacgtccacggccaatttcctgacttgatgagaatcttcaactgcctcgggaccccgccggagaagaaatacctgttcctgggcgactacgtggaccgtggcgcgcnaatccgtg

SEQ ID NO: 42067 - DNA, 705 bp, Heterodera glycines
cccccccccccctctccccccccttacgctcgattccgctctttctccacatggatgccgttttcgccactgcctgaggccaaattgcgttaactttgccccctaaacattcgccccccggcgacttcccccgccctccgccgcccattccttttccatttgacaatcaacggccaattgttcgtttttaagcaaagagattagatgatgaccagtgggcggaagaaggggcaaatgggctcagaaagtgtgccaagtgccgtggtgatggcaaacacacaaattggaaattggacgggagggaaagaggggggggggatggcacaaattagggagtattagggacaaatagccaaatgaggggaaactctgtcattaagcaccattttctgattgattggcatgtgaaataaatgaaattataacactggcagccattggcatttgccattttcttcgtccattggtcattcgtccgtctgcgccgccgtggcaccgcccgccatttgctggcggcgcggcaacaaattcttctgctgccggtggcgataattattatgctcatcatcgcctcatattgccttggcggacaattctcaaaccaattgagacaattggggcgaaagctgaaaaaggaaaatgagacgaataaagggaggtaaagaacaaattaaaggggaatggaaactgacgcccggggggggg

SEQ ID NO: 42068 - DNA, 597 bp, Heterodera glycines
taaaaaaagaaaaacgccaaaatagttgcaaaaacatgtcaataaatgtgtgaattttctaaaatttccttatttttgtccttttcggttgcacaattgtaaatcaaacacatttgaggattttcaaacataaaaagttttcgtttgtctgccaaacatggccaggatttttgctttttttaaaaattgattcataaaggtccatttttgttttgttttttattgcatttttcataataatttttagagatcgacattttgaaaaaaacctggacctggacctggattccttgttggacctggatttcctggacaaaaatccaggaaaatccaggtccaggaaaaatccaggctcctcgagacgtggatccaggcctggacctggattttttaaaactcattttaaaaatcaaaaaaatgtttgaaatattcaattaattgcgtgggaacatctaaaaatatctaatttacaataataatttgtttttaaatatatttaatcattttttgaaaacttgaaaaaatatcggtcacttgaaataataaattctaaaattttgtccaggaaaatccaggttttttcctgttttgcctgga

SEQ ID NO: 42069 - DNA, 1677 bp, Heterodera glycines
  unsure (1)..(1677): unsure at all n locations
ttttgattttaaaaatttttgtttaaccccttactctaaatggccattttttgctggggaaatccccaatttttgctggggtagcgaaaatgccatcggtcacatggaaatgcgatgaaaggggcgaaagaatgagaggaaagagagagagaggaggaggaggggggggggggggtcacaattaaaatacgattaaaaaaagttgggataaatatttattatataagggaaagatgaggaatttaataaattaatttaaaaatgcacatttatttcaatgggataaatttggaagggatatttttgaaatgaaacggagccaatgaatggacagagagagggggggcggggcgggggatttaacggagagcacaaagtccattaaaaagcaaaaaaagagcccgccaattttcgctaattttattttgcacaatttctgttcatttaaattttgcagatggacaaacaaaagaaacgaacgaccgaaaattatgagaagggtgagagagaagagagggacagcagcagagaagaaaaggacgaagagagcggaggaagagcgaaaaagagaataggcagagaaaattggcaaatcccagcggaaaaacagacatttttgaaaattaatttgacacaaaaaggagaaaatgccattaaacaatgacaaaattaaaatgattttgaattttattaacaaggctttttagtttatttttcggaatatttaatttaactaattttattgacccccaattagcgacagaatttcaattaaattaatatattccacttagtccgttggttttgatttttattttattatacatcttaaaaacatgtcaaaaatgcaaattaattaattaaattgggattttcccccattttccatctcccatttggccatcacataaatttgcatcgatttgtcttctcaaaaatattcccttccaaaacagaaattgaaatgccccgcagatgtgaagtgtaatgactccaaatgttcacattgttcacacattcctgctcggtcagctcaatttttgtctgaaaacgaattaaatttcatttatttattttttaattcaattaaatggaataaaaatagcagataatttacaaacatttaaaatttagagctgataattaacattattgagtttttatggcggggtggggtaaagaaatcatttgctatttgtaagggaagagattggcacaatccccgccttacggcatatgccccaattagttaattgccaaaaaaatttgccaaaattcttttatatttccacgcagaagtgagtgaattgtccatgcttaaactgtgcctgattgatgggacagtgttggatggacgggcatttcctcttcaaattcttggctcggtcttcgtccggcgtcgacgccaaataacagtggacgaattcgccaattaccgactcctttctcggcaatcgttcactaattgcctccatcgatttgttttgtctgtacaaaaagtccgaaaatgctttttcgagcagtgcgccgtcaattcgcaatttatccgctgggaaaattggcttanattttanacttatgaaattttattcttttttanattctgatcacttttttaagccgtaaatgcaaaatgaatgcgtcgctttgggggactccaatttcacggaagccatt

SEQ ID NO: 42070 - DNA, 1123 bp, Heterodera glycines
taaacaattatgtttcgttgttaatttagtaaaaattatcgttttatttaacaaaaaatgaattaaacaattaagaaatatccctttattcaaaatttgttttatatttatattatttatttaatgcttttccaaaataaataaaattatttgactttattaaataaataaccaaagaatctcatgattaattaaaaaaagaatacgttaatttttaaaaatttttcccaatttctttaattttttttaaatgttaattacccctattttacctttttgtgttagcaagcagtccacccattccaaaacataaaaatgtaattgaatacctgtaataattatgatgtcatcccaaaatcatttttccattaaacgaaattttagattcaaaaacgcaaaaaaaaatttttttaatttttttgttggatgttttattaattcaacaccacacacacacccagcaaataatgatgactactgcagcagcaatgacaacatccaccacaccacagctacaacatcatcatcatcatcatcaacagcagcagcaaagcatttttgcccggctttccgccaccattggccaccacagtcaatcggaacaaaaattggcacgaatgagggccgcttattctggcgccaacgaaggtggcggcggtgccagtgccaatgccaaaatccaaaaagccgggtaaggagatgctgggttttttggaaatttttattagataaatgaattttgctgagggaaattgaaaagcaaaattagattattttatgtgattttttttttgtgaattttttttattaataaatgaatttttaaatgtattttatgggaaaaagcgaaaagaaaaattaaatttatgtgaataatttaatttaattttagttaatgtaaattttttttttttatattgagagttttaatcttacaagctgaattaaattaataaaataaattaaattattatatatcatctgcattaagtaaccgaaaaagcttggttaagtgaataaaattttgttttaattcgattttagtttaataaaataaaatatttttcccttttaagcttgaaattgtcatctgatacatccaaatccccttccatcacttcca

SEQ ID NO: 42071 - DNA, 1105 bp, Heterodera glycines
tttttgttttcggggcagtccccccgaaccgatgcgcccagatttatggggagaccgaatccttccggaatagcttccctatagcctgtactttaattctgcgttggatttttgctccccataattgtttgagtaccccaaacggacacttgaaaaaatcgatttttttgttttcggggcagtccccccgaaccgatgcgcccagatttatggggagaccgaatccttcgggaatagcttccctatagcctgtactttaattctgcgttggatttttgctccccataaatgtttgagtaccccaaacggacacttgaaaaaatcgatttttttgtttcataaatatttttttcagaaagtcatgcgcacccgtccgatctggcaagttaagcaacgattgctgactagccaaaaggttcggtgccgtgatgaaacgaaccagcactgcttaccccgcggcacccggcacggtcccccgaaggaatggatttaattaaattctctccttcggggatttttttccattaggtcgtccgttagcgttcgattgctctagtcaatttttcaaaatttttgttgaaatatttgtcgtgctctgaagggcgtgggagggggggggggcgaaggcccaccacgaggccgcgaagaggccgagtgagtaccttcggtgcaggaaaattattaaattttaaaattttttaattgctttttaaatatgccaaaaaatgtaggcttaacttttttagtgaaaattcgatcactcatattttttgctaattgagcagaagcgtaccaaactttgcagggatactccccggtaaaggactaacttacactgaaatgagcgccgagctagctggctcaaaaaaatttttcgaaaatctgagtctttcgtttttatttatttgcaaaattaattcataaatattttttcagaaagggttctgaaacgcaccaaattttatttacatgtttagtttatgcactctgatgcttttttctttcaaaatgggaggggaataaaattttaattgcttttttacttttgggaaaaaaagtttaggttaacttttttatggaaaagtttgttcactcttattttttt

SEQ ID NO: 42072 - DNA, 871 bp, Heterodera glycines
tgtatgtgcgcggttgggtggtgctacgggcgcgcccatccctaatccgtccgcgtgcggcgcgccgccgccattttggactcagatatagcattttcctcccccagtttattgcttggtgaccaccacagacagatccaacgttgtttttttttttttgcgttgtcttgtccagcattttggacagttatccggcacacaaattgatcaaaaattgttttctatggcccgtgccggaattttgatgagcgttaatcaggtggatgcatgaaaagcaaaaaaaattttttcttaaaaacgaaaacaaacgaaaattaaaaaccgaaaatgctaaattaattgaaaattttacatttgaaaagtcgaaaactaaagtttttgatggatgaaaataaaacacgaaaagaaactcaaatttgcccaaaaggggaggatgagataaaaaaaaaatgaaaaacgaaatttcgtccatccctgggcccaatgtgtacagaatttcgtatttcttgacacattttattttctggctacctgggattgcaaaaatttgcaataaatttcacaaagtttgaaaaaaatcattttcctcaaccagtattttttttacaaccttcacaggtttttaaaacttgaaaatttcattatgtgaaattttgtttagagaaaaaaaatgtggttttttttttaaaatttgcacgtcaacgaaatattttaaaatttgcagactgataacttttataccaattattttcctgaaaaatttcaagttattctgtaagaaaacccagcttttcaaacctaacaattacacaatatatatattttttaattttggtcttaaattttcaaatgactcattttccgtcagccc

SEQ ID NO: 42073 - DNA, 310 bp, Heterodera glycines
tgcttatttttccttttctaaattttagtcattgaattttttctgctttcaatagttaataaatactgaataaattgttttattctttttaaaaatgaattattgtagacgcttttttcgcccgatttctcgcgttcttgtaactaattcacgtttctctgcgtgccgaagatcttattatgcaatttggtttgaatatatatagaattttaagaaagaattttcctaaatttaaaaaaataataatttgttttcttactttttctgtgtttaaaaaaacaatttatttattatttgatatatttaattt

SEQ ID NO: 42074 - DNA, 1231 bp, Heterodera glycines
  unsure (1)..(1231): unsure at all n locations
tttttgttcaatgtccttttntaggttattttccctctgtcgtccatttgcccacccacgaaatgatgccgagcagtcgtcgcttttccttgctccttcgtccctctatttcctcttccacttgtgcccttcccttttcgtcgccttcttccaaatcgtcgattttcttcctcagttcggcgattttatcgtcaaaatgattggaaactgtgaaagttttttggcacttctgaatgatctcagtcctataaaattgaaaattaatttttgttagccaaatttggttaattttgaagaacccatgcaaaatggccttattggggggctaacttagaattagtattcatttggccctaattagtacccatttagccccaattaaagcccaaagattgggctttttctaattaattccccggattgcctgaagctcttctccgtcggctgtttgtctgccatcgccaccttctcctcctccacttgctttttgcacaaatccgaatataatggacaaaagtggggctcttccaccgctttgtcaaagatcagatcaatgatcatctgtgaggataacaatattattatgattttttagttttgagacagcgaaaacctccaaaagtttggggtcttcgtggattttgtatttgatgaattcctcggataagtctttgtaagtggacggagtgactttgttgagcagtccgcgcatttctttgcacaacttctgaaatttcatcgaaatgaaattgttggacggattgaaactcagagactccattctatggaatttgtcccgtgttaaaaattttcgaaaatccaactgtaattccaatgaaatggatttcaccccaacattcgaccaaatatactcgacaccaattaagaattaatcagttggaattcgctcggtgccgtgccctcccccccccccaataattaattgcccacctcatatttcacttcttcatcatttctttccggtgcgttcatgtcaaaacgttcctcgcgcttcggcttccatgcatttgccgatctccttggcaaattgtcggccacttgcggactgccgctgacctgcgccaatttgattggtcgttggtcgagcgattggcgcgcaattgggccctaatgaggcgggagaggggaggggtataattaactaatgcatattatcaatattaattttttgtgccaaaattcgaaaatgtagcaattttttttctctaaa

SEQ ID NO: 42075 - DNA, 763 bp, Heterodera glycines
atctcacatctggttgaacgttatttgttgtcatttcacaattttcgattgttttcaacgcattatttggattttcttttggtggattgtcttaagttttattttgtctgccctcaaaaggaaagggctgatgaagaggacgacgaagaagaagattgatttgtggcgcagctgcgaattgatgagtaagctgaggaagagagagagactaatgatggggaggggagggaaggggaggggaaccggttgaatggtggacggactcaaaaaaggaacggaggcgggggctcaagagggagggggggggacgaatggggcggaattaatgtaatttatctccacggtgattgaagtttgcggacaaagacatttacataagattaaagcgcatttcattcgattcaattgttttggtgggaatgatttcgcatttatgaacggacggtgaacatcaaatgcatgcgaaacaaaacatttaatgggtttcaattgcatcctcccgaccctaatatgtaaggtaattgatgaattaagtgtttaaggttaaaatttctttgctttttttctccatgtttttccttggcccataaattctcaaaacggaacagaaattaaaaagccctgaaaacattttctaagaatttttggggttgctgatcacgaatatggcattcatttagtgaattttgaaaaattcgaattttcgactttttgttcgaattcgggtccagggttcgaaattggcttaaatgaatgccatatt

SEQ ID NO: 42076 - DNA, 926 bp, Heterodera glycines
  unsure (1)..(926): unsure at all n locations
agaaaattgtcctaaaacgagatagccatttttctgagaattaattcacaatttccgcagctcttgcggtaatggaaaaaattttgaagaggctctgcggaacagattagcatcggggttacgagatagaatattgtcctaaaaagagatagccatttttctgagaattaattcacaatttccgcagctcttgcggtaatggaaaaaattttgaagaggctctgcggaacagattagcatcggggttacgagatagaaaattgtcctaaaacgagatagccatttttctgagaattaattcacaatttccgcagctcttgcggtaatggaaaaaattttgaagaggctctgcggaacagattagcatcggggttacgagatagaatattgtcctaaaaagagatagccatttttctgagaattaattcacaatttccgcagctcttgcggtaatggaaaaaattttgaagaggctctgcggaacagattagcatcggggttacgagatagaaaattgtcctaaaacgagatagccatttttctgagaattaattcacaatttccgcagctcttgcggtaatggaaaaaattttgaagaggctctgcggaacagattagcatcggggttacgagatagaatattgtcctaaaaagagatagccatttttctgagaattaattcacaatttccgcagctcttgcggtaatggaaaaaattttgaagaggctctgcggaacagattagcatcggggttacgagatagaaaattgtcctanaacgagatagccatttttctgagaattaattcacaatttccgcagctcttgcggtaatggaaaaaattttgaagaggctctgcggaacagattagcatcggggttacgagatagaatattgtcctangacgagatagccatttttctga

SEQ ID NO: 42077 - DNA, 882 bp, Heterodera glycines
gggagcaaaaatcccacgcagaattaaagtacaggctatagggaagctgttccggaaggattcggtctccccataaatctgggtgcatcggttcggggggtctgccccgataacaaaaaaatcgattttttcaagtgtccgtttggtgtactcaaacaattatggggagcaaaaatccaacgcagaattaaagtacaggctatagggaacctattccggaaggattcggtctccccataaatctgggcgcatcggttcagggggtctgccccgaaatccccaaaaaaattttttggataaaaattatttaaatgaactgactagataatatttataataggctattcctcttcccctctcccttactctctctccccctcctctctatccttccctcttcccctctcccttactctctctccccttctctatcgttccctcccctaaaatttttttgaaatcgtccagaatatttttgtttcgcaccgttcccccccccccccccctccgttgaagcaacattttcaatgtgaccaacgcaatgtcccagcaagtgtggatgttccagcgctatgagcaggttagcatctttaattcctcccccattaattaattaatgctttccccgtccttccgtttgaggttttggagtataaatccacgcccattttgcctcctccggtcactcctctcgctcaccttttaatgtttgtccgtcgcttcttcaaagtgagtggcatgtcaattaatttggcattcattaccttccgaatagtcaaaacatcgtccgtcgtttcccttttatttgtcaaatcgtcgcaaagagggatcatttgcattgagtgagttggcaaaacccaaagtcagtcggggggggggggg

SEQ ID NO: 42078 - DNA, 1305 bp, Heterodera glycines
ctgaacctggtccaattggaccccttgattttttggacaaacctgacaaaaattcggagtttccataaaaaatctagccacgataaatccagcaggttcagaacggcctctattttcagacccgtattcagtgggaaggttgtctccgaactttaaaaaattcaagcaaaattaaaacatctaatttcataacaaacaacccttaaaatttacgagaattttctgcattgttggcacggccggcgaacggcttaattcctttaaatactcgaatttgtaattgaagaatatttatgtacaattgtcagggaattttttctgaccaatttttgaaaaaagtaaagcaaaaattatgaagaaaagccaaaaaaatttttaccggattttgtcgtccttccgaaaaaatggcgttaatttttttttcgtattaaaattttttgcgtccatttcagcaccaatcgcttggcgcaccgtacaaagtgcagggctttccgaccatcaaagtattcgggcttgacaagaataagccgacggattacaatggtattttacatcactttttttgtttacctaatcatttgtggcctcataatttctctttttttttgtcttaattttttcaaatttttgttgggtattgtgtttttgagttaattagctaaaaaatttaccaaattaaaaaaaaacttttcgtctttgaaaaatacaagtttttaaaaaataagtgtaaaattttcagggcacaggaaaggtggctgcacaagattatagaaacctgacttttgaaaaagactaaattgggctggaaaatagaccgggattgggttttcgagattcaaatcccgattttgtcgggggtgctctttagggcgtttcaaaaaaccaagcctggtgatcccgttcgacccctgcaaatttagttatttttttcagtcccaaatacggtggatgcggggggggggggggagtcaaatggacccttggcatattgttgaggggtaaaaacggaagggtttcaaaatttggcataatacaatttatttcaaccccaggacaacgcagcgcccaggacattgtgaacgcggcggtcaacgaggtgaagcgggtggcaaacgcgcggctcgccggccgcgccaacggcggcggttaccagcaaaagtcgggcggcgccggctcaaacgcggtggtggaactgacggatgccaactttgaagtacgtattgaaaatgcaattgcaaaataatcgttacagggagggggggggggggtcattttttgattgctaaaaattaaaaaaaaatttag

SEQ ID NO: 42079 - DNA, 1326 bp, Heterodera glycines
ttcaattttaataaataacaaattttcgctaagaattcccctttttgttattaccagctgatcacccagaaaaacttgatacttatggagcaaaattattattgtttaaaaaccaattaactcaaccttaatttgattaagtgaagagttttaatggacgtttattaaagaaaacaatgataacaaaaaattcaacaaaatggacaaatttaaaagataaaatgaatctccaaattgtccagcctttccatctttcttaaggccactctccgatcagcctttgctcttcttctttttcttctgacccttctgctgctctcctccgctgggctcctccgtctcttcccttgccttcttccgagtcgcttccccctcctccccttccgtctcttccaatttgaccttcttttgctccttctccttttgctggtgttcttccgtttcttcctcccctccctcagtttctccttcgcttcgcattcgtttcgtccctttttttgcttttccactctgttgttcttcctgttgcggttcttcggcctgttcagttcccttttttagcgtcatgtcgaactttgcgtcataatgatgcacctccccccttaaaaatgttactttttatatgaagactaatttaacattaagtccaattggtgatggtgagttttcagatgaagaaaaattgaaatttaaaaacgaaatcaattgtatttagagaaacaagataaagtttcagtaaaaaactaacaaagggagcattttccccatttcgcgaaattttaagcataaccgaaaaccggggatcaatttctcctcgattgactcactttttgaaagtgtacgcgcccttcggtgcctgtttcacgccagaaaagcgttgctttttcgcccctccccgcgcgtccgcctcttttatcgcctgctctatgtacaccctcgcctcaattccctgtccgttgcccaatgattcgtcgcaaagtgcgtccactcgcgtcgcaagtgaaacttttgctgccaattttcgtgctatctttaaagacaataatgatttgtttgatttcttgttaagggtattgcgtttttagccgttttatgtttgtcacattttcgtctcacctttccctttgacttttgtccggcttgagtgaccaattgcgcgtgataaattattccatattttggcgtatcctttttagttttgagtgctcggaagagcgctttctcagcccccaaaatttgaactgtcgaagcaggacactttgccaaagccatcagcgagcctaaaaacaatagcaaaatatgtcatcaattggggtgcacttcgtt

SEQ ID NO: 42080 - DNA, 802 bp, Heterodera glycines
accgtttttagcgtatttaccgtaccatgcgaacactgtaaatgcatattgtgatgtttctgatcactttccatatgtaataatgagtagcaattggcccactttcaggccattctttcgcctctcctcggccctcctctcaaatcgcttcttctcgtccccctcccccgcttttcctccccctccgtccattttttcctccaattccttcacggcggcctttgctccatccctccgttaacttccgatgaaaatccgctcgatgtttgggagcttttcgaattgggtgcctttgttcggtccgaaatgttcgtcaaaatgttggcattgaatgtgcgagcaatggtaaaacaataaattaaatgctattgttaacactgcttaatttgttttagcttttccacttctttcatcggccttgcgtcgcctgcgtttcggccgtttttgacgctttgccaaaaatggaattggaaattccggtgaatgccaatttccctttttgtctttctctctaattgacttgtcttttacgtaaaaaggctctccgtgaattatttgacgaagctttgcgatggcaagcggccaatttcacgcgcatttggaagggtttgctgtcgcactttaagacaattaaatattgctcatttcggttaattgtttcaggccgcatctttttgcatttgtccgaccgttggcaaaggcactgtcgcgacgcccttctccaatcggtggacgaagaaaactttgtcgacgttttgcttggctgtgagaagctgcaggtgatccttccccggctcaaatc

SEQ ID NO: 42081 - DNA, 997 bp, Heterodera glycines
ggactcaacccaacagcattccaatcactcgggactcaacccaccagcatttcaatcactggggactcaacccaccagcattccaatcactgggactcaacccaccagcatttcaatcactgggactcaacccaccagcatttcaatcactgggactcaacccatcagcatttcaatcactgggactcaacccaccagcatttcaatcactgggactcaacccaacacagcatttcaatcactgggactcaacccaccagcatttcaatcactgggactcaaaccaccagcatttcaatcactgggactaaacccaacagcattccaatcactgggactcaacccatgggactcaacccaccagcattccaatcactgggactcaacccaccagcatttcaatcactgggactcaacccaccagcatttcaatcactgggactcaacccaccagcattccaatcactgggactcaacccaccagcattccaatcactgggactcaacccaccagcatttcaatcactgggactcaacccatgggactcaaccccccagcatttcaatcactgggactctcacccccagaatttcaatcactgggactctcacccccagcatttcaatcactgtgactctcacccacagcatttcaatcactgggactctcacccccagcatttcaatctctgagactctcaaccccagcatttcaatcactgtgactctcaacaccagaatttcaatcactgggactctcaccaccagcatttcaatcactgagactctcaacaccagcatttcaatctctgtgactcacaaccccagaatctcaatcactgagactctcaacaccagaatttcaatctctgggactctcaccaccagcatttcaatcactgagactctcaacaccagcgtatcaatcactgtgactctcaccaccagcgtttcaatcactgtgactctcaacaccagcatatcaatcactgagact

SEQ ID NO: 42082 - DNA, 51 bp, Heterodera glycines
tccggcaaagctttgcacgccaggccacgatttacgggttcgactccagca

SEQ ID NO: 42083 - DNA, 539 bp, Heterodera glycines
tttggaacaagcggagggctcgccgacccgatatctcgcggcgcataccatgcaccacacagtcactaatcggcgcggatttatcgtggatttttcaatacatcctcggcgattttggcaggcgaatgctaatgagaaagaaagagagtgaaaattggaactaaaagataaattttaaaaagtgggactaaattttcaaaagcaaacgaaaaatgtataaaaaaataaagaaaaagaaaaaaacaaattaagtcgaattttgcatgggtgattattagcccatggtggtatatgacaaacccatgttttcataaatttgtacaattattatttttgtctacaaaagtgagcgatgaccgtcacaatttttgtagtttatgggacagtattttgtggccttgactcccatttttattattatccaggaaatttctcaactccgagttgtgtcccagtttatggtgaactttggaagccattaggaattctatttgcctcgggattttcgccgtggagaggatttctactgtactccggct

SEQ ID NO: 42084 - DNA, 706 bp, Heterodera glycines
tagatcaattatttcttcttttctaaaatgttctcttcacttttcaaaaaatattttctctcaacccttccccccccccctccccattcttaccagtgcatgaaatctcgtgtctcgtgccaaaatacgagatatgagacgagtcgcccctaaaaatacgagattacgagaaacgagacgagcaacatccctggtatatatatcgctaaaaaattcatttgacttataagctacaaacaaatttctcaatttaagttaaattaataatattttacattataatatttttttaactttcgattatacttttcaatttctcttcaatatatatttttaattattagcttataatcaattatcctagtcaaaataattttttgttttttaatcagttaaagtggacatatttattaaaccaaattaaataactagcttagtctttacaaatccatttttctatcttccgaccccgtccaatagtagcttggacccatttattttttcttaacaagttcgttaaattttaaaaagtattacttaatttatttacattttaattttattcctctgttctaatattacaatatttcatatttacataaatttatttattagtcacatctaacatacgtaaaattgcttgctatttaaataatgtcttttgattatataagtattatctaaataataattattgcgttctaat

SEQ ID NO: 42085 - DNA, 1017 bp, Heterodera glycines
ggagttgctgctccacgccattctctgctgcttcaacgccgcctcccacaagtgaacgccggatgcattttctttggggtgaccaatctcattttcagactgagctaccctaacttcagtgcttccgaccaggaatatgtgagtgagaaggaaggcagaaatactattcaaattgagagatgcacccaaaaacctcaccgcaggaatttaaaatttttttaaatagaaaaaaattttcaaaaaaaaaacttcgtaatagattaggccctaatcgttcattccccctcaaatgtggcgggtggtggaacctctcctatctctgatctgtttacttggccctttgccacgcttttgtttctcagatttgtgaattggcactggtggtgcgcgacattttccgccacattccgccgtaccatcatcctccacaccatcagcagcagcaggagaacggaaggagaaagtacatggatttgttcttggagcatttgcaggagcaaaaggcattcaaaaaccgaaaaaacggagggatggcggcagtgagaaacactttgtcacaacagcagcagcagagacagctgacggacagatccgacgattaatggggggaggtgaaacctggcgaatggtcgtcagtcgactgtctgggatgtatgatttttcgtttttgacaaaaaaaatttatgatcgaagctgtcctatttcaagcttctgaaaatgatcttttattgtgcaaaatgtttgtgtaacataatcattcattttcctgttcctgatgtatggccattttctatatgtaaaaaatcaatgattttccgttttcatttatttatgcattgggatggatgtccgtccaacactgtatcagcagtgtctctaacaaatgaataaatcaaaaggtgattagaaggtattcagataaaagatgggtaatgctgttgatgaagtagttttgaaaatacaaaggagaagcgagaaagagagaacgtaaaaggagaaaagcattttcagtttaat

SEQ ID NO: 42086 - DNA, 1006 bp, Heterodera glycines
  unsure (1)..(1006): unsure at all n locations
gcaaaaccgtggactatttcaagaagacgcttgtcgtggagggcattatttacgacaggcacaaaactaaaaaatgccacaaaaaaactgttgaaatttgcacagaattggcgaaggtgaagtgcggaccaacgtgttcacgctggagaaggcgaagaagaacgaactgttctcccagaagaagccgtccatcgccgctgttgtcgcacaggcgacgccgccccgttgcttttcgcaccaccacctgaacaacaacaacaacggcatcatcagcaccaacatggacacctgtggtggtgccgagacggtgttgggccgtcacagggcaacccgtggcagccgcaatcggtcgacctcggcatggtcgtccacgcaggagagcaccggcaccgagatgcgcaggtggtggcaaaaagaaagcacacagagagacggacttgggagggtgcacacgtacccccgtcctccgcagtttccccggtataccgacacttgcgccgccctataacccccatttgcacattcattcaaattccatttaactaattacttcctttaatgtgacttattaaatcttcatgatttttcttttcattggcacaaatttgcctttgctgctgatgcacgtattgacaaaaaacaaaaaattatggtgtctatcgttatgattagttgtttttttttgcatatcttttaattgctttttttgttattgcacgttgaaaattggtaatatcttaaaatatgtttttgcttggcggcgcaagtgtcgaggcgcaaatttcgcaacacggtttcccccagctcaattcatcataaaattaaaaaaggcttaaaaatttactaattttttttcttgaaaagttttaggttttgaaaattgaaaaacccctttaatttgngcatttcgtcgatggaattcggtgccattctttctgttcattntctctctttttgcagtgcctgcggnntccatgcgatgttttcccatcgtgagctcgactcc

SEQ ID NO: 42087 - DNA, 1287 bp, Heterodera glycines
  unsure (1)..(1287): unsure at all n locations
gcttatcaaaacacgtacggcgcactttttttcaaaaattttggggaatagggcggcgggggtccagcggtgccataggcgcagccggggaaaattttaaaaagggcccggtgttttttttgaaaatttaccgggcccttcctgtctctactaacaaataagcagttttccaaacaaatagtcatggtatcgattttgttacgaatttactaaattaataaattacgatgatttaaaagaaataaaataaatttacaaaaaataaaatttaaacacaaaaaataaattggccaaaaaattgatcacctgctgggagagaaataaaaatgtggaaacgaaaagaactcatcaaaaatgaacacattattaaatcatttaaaagaaaacttaaaaattacaaaatttttaaatgattttatcatttcgtaaaagtgccaatttttagagattttgcgaaaaaaaactcgtatatgtttgcttaaactcaaccaaattaaattattttgatgtcaaaagattgcttgttgattgctctactggcacaaaaaaattccattcatttttcaaaaagttatggccaaaaattctaaaaaaaaattgtctcccaaaaaagtgaataatttttcatgcttttcgaaaaatcaatagctatagtatgattaccaagattatttcatttggtttcatttggttgcgtttaagcaaagttatacgagtttttttcgtaaaatccaaaaaattggcactttttacgaaacgacccagcacgtaaagaaacaaatgatttctgaggaaaattgcattgcctataaactgaagagacaaaaatcattcttgatattgtacaccatttttccgatttttctatttcaagtcttattttgggctttatttatttagataagcaaatatggaaattattggtcattaaaatatgatgataacaatcacaaataaaattgttaaccgacctaaaataaaaataatgcataaaaagaaggaacaaagcctggggtttaatttatctcacaattcagctcatttatactcaatgccttctttttggattgctaccgtactatgttatattgacactcggcatttgtttacagtgctttcgcgggttgatcttcggcatttggctactgtaccgcactgttttggcattcgatatttggttaccgtgctttggcatcttcgtgttctgcatttggttactgtttcgtgttttcttttacgactgngcgaagatgtcgcagtgattcgtccgctngttttgactctaga

SEQ ID NO: 42088 - DNA, 1173 bp, Heterodera glycines
attggccaacggtttcgagcactctttgcattcgtaacgcgtgcgtccattcacttgctgagagttccaaaattgatgctaaatgggggggggggggcggtgaagcggctaattgtccctccgttttcttccgctgctcactttttgctgttccgcgtctcccccgccgcgcattcgtccgccgccgctttgcctctcagcgccgctcgcggttggtctccgcgttctctgctggtgctgctgctgtctctgccgttgttcctccctcgcgcgttcagccgccgccaccagcgccgcctgataagcgtgcagcgaatgacgcaattcggccgcaattgacgtgccgttatgatgcgcggcgccgtgcgaatagtgcggcagcggtaccaacgccgtggggggcgcgggcggacgcattcggtcgatgtcgatcatttgctgtgagtgggagagttgctgctgaagagcggcggaacggttgtgctgctgttgttgctggagagccgccacaattacataaagcgaggaatactcagcaccgttctgcggcatcaaattggggggcgcggcgtttgaagtggcaccgcctgaaagaacgtgaaaccctttccgctaaatgcaaccaaatgcccaaaccattcgctccggcggcggttgtgccaaatgctggaagcagcgggtgttccgcagcggcgcgtccacctccgttcgtcatattcaatgcaggggtgggcgatgccgcgggcgccgttgcggaaggcagctgcgacatttgtgcccaaaatgccgcgttccccgcccctcctccgcctcccggcgccgttggctgcgatttttgctgctgctgctgggcggctgccgcaagtgcgagccggcgcgaccacaaatagtgaaagtccactgttgcgggcggcgggaaaaaaaaggacggagccggaggggcggcaggcacagccgcggggcgcaaaaacgcactgccggcggctgacgaatggtcaaatgcgacgaggccgcccaacggattgaccgatgccgcggccggcggatgggaacccatcgcatttggagaagagccggtggctctgtgctgctgactctgttgttggtgcgcatgattgccaaggcgttctccgaccgattgcggagatgccgggagggaaggctcaattttgt

SEQ ID NO: 42089 - DNA, 1474 bp, Heterodera glycines
tgatctgatagctttcattgaatatcttttcatcagcatttactgtaattttaaattctctggacaatgtaatggtagtgttattttcggtgccataatactctaatgcattttcaatgagattaaattttaatgttttattgtcatcaaatgtttgaccgtttaaagtccacgacaatgtttgttcttcgggctcaatttcaaccaaacttttgatctttttcttcagaattgccacagtttcattactctttacccaaataggataatttttcacttcattctcaatttcttctcgaacaacaatttgaaattcaccaatggacaagcgaataatgccacttttttgaaactgataataataaatttttttttcatcattaagaaaaacataatcatcttctgggccgtattgcagtgatatttttgtgagttcagttccaatctttgttttggtctccatttccatttttccaattatcttttgcttcaaatcttccaccttttccgttccatttaccctaacagtgattatcttagtttttatgggcgactgttcattgaatatattttcttcagcagtcactttaatttcaaaatttacgaacactaaaatgactgcgccttcttcaattttattgtcagccattgtatcactgtcctgaagcacagtcacagtaccatcatctgggtttttgattccaaatgttttcttttctgactgaatcctccaagcctcttttttgatcagctccttcaactctttcactgtggttgagccttgtaccacaacagtggtctgattgctttccttggttaacattgcatcagctttcactgtaatttgaatgccatcaatggatgatggcattatcatcagcagcaaaaatattgtcaatagccaaacagaaacaccaatagagaacagtgaaaggcaaaattgcttcattttgggtaatggtagaaacttcaaagaatggaagggtaattaatctgatgaatgtgagggatatggagataggaatatatgtatcgctcttgtcaaggggccccttttatgggaagaatctactcaaatatttgaaacattaatgatcacttcaatttggcaaatatagtaaattattgaattggccaatgagtgatcattttaatttggcagtgttatagtgagttattgaattggcaattgcgtgatcactttcatttggcagtgttatagtgagttattgaattggcaattgcgtgatcactttcatttggcagtgttatagtgagttattgaattggcaattgcgtgatcactttcatttggcagtgttatagtgagttattgaattggcaattgcgtgatcactttcatttggcagtgttatagtgagttattgaattggcaattgcgtgatcactttcatttggcagtgttatagtgaggtattggattgggaaatttgctgatcactttcatttggca

SEQ ID NO: 42090 - DNA, 1002 bp, Heterodera glycines
  unsure (1)..(1002): unsure at all n locations
ctttacnntttgtacgggagaatatgagcgacaaaaacatggatttttggacccaaagactttaattatacaccccaatgcgcgggaggcgaattgcaaggaatttcgctatttgtatactcaaacacggggaatagtcacccaatatgaccaagtgacaggggaaatgcacgaattaccacctgattctgtgcattatctctccagacacgggaagattgacttcccagaaataccaatacatttttttagaaataaagtacttgccaatttatccgagctatattccccggaaaattttgaagaaacgatcgaagtggcgaaggttgtgcaggaaattgcaagactctcgcggccaaacgcctgggaaattgtctcagagaaaaatgatcaaatggccacaaatatagtctcgaatggcttattttcctttttaagagggggaataatttcagctaatcaattatgggtttttctttgttgctgctatataacggtgacagtattaattcagtgcttcttaccagcaccaattgcacaggccatacagtatttgggcttaggtggtcttattttaaatggcttaagaatggtgcaaaactttacgggtgacagagtcagaaataatgcagcaatctctcaggaggctgtggaagcgcagctggtcaagtgtaatcccaaaccagtgctggaaaataagtgcagtatggctggggcaaggccaaatgtgattgaaatggaaaagcacttcgcatgtaacataccgcttactgagaggtggctatcggtcgattcaattccgaccacctncaaacggagaaaaaacgaaccagccgagcccggaccgtcagaaaatagaaaaatcgttacaatcgcaatgatgcgtgtgaattcatgcgatgaaaagtttagaagtatggccagangtaatggatatgnaataaannatgtgtggacacgggtgcacatgtttcgctgtgtaatgtagaaactgcacgaaaa

SEQ ID NO: 42091 - DNA, 1513 bp, Heterodera glycines
  unsure (1)..(1513): unsure at all n locations
gttaaaatttattgaaatttaatttatccacattatnaaattttttcaataaatacnncaaaaatattnngagagtcctttngagcatagattacatnntaagcattagcatttgttttcaaaatgtgtgccgaactttgatgatgccaattttgttgatgaatcactgctttttgtgccaattactcaccaatcggaaagtgcaaagagattttagagaagcgcaatgaaaagcagaaacaaaagtgccggatgtgataaagacggaaaatgggataattaattaattaattattaattaactaattaattaattaagtaaaatttttaagggttttcgaatgataccattttgtctgggttggtttgacacttttaaaagttaggagatttttttgcgggaagtagcagcctaagtaattcttatcatttaaatagctctgaaattttccaattcaagttttaactaccaaaagcttttcggtgaagggttcagaagttccggcaaataattttaaatttctgaattttaatctcaatttaaatgagtgatctggatagctgatcaatttaacgaggcaaataatgcccggcacgtagttttcgtgcttttttaactttacaagtcatttgtgggatttacttgaaatttcttaatcaaattgggaaaaaaacagcaggcctctctaattttcctgtccttgcagagctaggacttgaagtcacgtgaggccaacaccacttatgtgtcgactggcccttctttttcagttttttttaattaaaaaggagagattttatatctctgtaagataatgataatccatttatgcatttattaagatttatttaaaattttcaacttgtggcactttcaagatcatttgtctgttacataataagcaaaaacgttaatttttaagcaaattgggatacaatttttcatttttaatgctaaaaactgccgaaataattcctttttatttttttgctaagtacctaggaataaactccaaatttttaattccacacaaatcgctgttgggccttgtaggctcatcgagggtcgaaaaatttccaagactcgagaaccgatgccgagcattgaatccacgccgaggctcgagaccaagaaataattctgaacactctatatgatttttaaaaaaaaaaaaaaaaatatatatattcattatcaggaatgtctaaaactatctcggttttcaagcattaaatcttaattataaatgcagtacatttattgttaacaaatttttctaatttacaataattttctattaaaaaataatttttaatttctcaattgctaaatttttcttttcattcaaaaatgaatgaatgaatgaatcataattaattaatctttctgattacgtcccattattacaaaaaaatataagccctatttattatatatattgaattttttaaatgctaggctaaattaaaagcaaaattaaaaatgtattgttatttatttcattttaaaatt

SEQ ID NO: 42092 - DNA, 1049 bp, Heterodera glycines
ttttttgagaatatctattctttttgagacagccattttcaaaccgcccttttgtagggctccaccgcagatagtaatgcgtttttggggaaaaccccacaagtacaacggtgtagaaaaaaagagatagccatttttctgagaatatctattcttctgagacagcaattttcaaccgaccttttgtagggctcaaccgcagatagtaatgcgtttttggggaaaccccacatgtacaacggtgtagaaaaaaagagatagccatttttctgagaatatctattcttctgagaaagcaattttcaacccgaccttttgtagggctcaaccgcagatagtaatgcgtttttggggaaaccccacatgtacaacggtgtagaaaaaaagagatagccatttttctgagaatatctattcttctgagacagcaattttcaacccgaccttttgtagggctcaaccgcagatagtaatgcgtttttggggaaaccccacatgtacaacggtgtagaaaaaaagagatagccatttttctgagaatatctattcttctgagacagcaattttcaacccgaccttttgtagggctcaaccgcagatagtaatgcgtttttggggaaaccccacatgtacaacggtgtagaaaaaaagagatagccatttttctgagaatatctattcttctgagacagcaattttcaaaccgaccttttgtagggctcaaccgcagatagtaatgcgtttttggggaaaccccacatgtacaacggtgtagaaaaaaagagatagccatttttctgagaatatctattcttctgagacagcaattttcaaaccgaccttttgtagggctcaaccgcagatagtaatgcgtttttggggaaaccccacatgtaccacggtgtagaaaaaaagagataaccatttttctgagaatatctattcttctgagaaagaaatttttcaaaccaccttttgtagggctcaccccagataagaatggggttttgggggaaaaccccacatgggccaacggtggtagaaaaaaa

SEQ ID NO: 42093 - DNA, 750 bp, Heterodera glycines
ttcacagtacgcccatccgccgttttcgttctgatcagtctgatcgtcagttttgttttgatcatccgtcttcttctgctgggcactgtcgtcgatcgccgtctctctctccgcttgtttttgcccattccatcggcacaaaattcgggcgatagttccgtgtcgtcggatccctttgaactgttgtttttgtatcgtcaacagagacgcattcgaattcgttcttctcgcttgacccttctccagtatagtatcgtttttcactgtaagtgaaagagtttatcccttatgcttatttatcagcaggcgtcactatctgatcaaagcttttgtagaaattgtctccgtctgatcactcccaaatcattctttcttcgtctaatcacccccccccccctcctctttttacctccatcggtctctttgcttctcttgccaccctctccgtctctcgttgaccatcgtctcagctgttgtacgatgcccaatgcattttcacttcgtctctttatctgctgttgttgtccctcttcctcaattggcaaattgaatgaaattctcttccgcgactgtgccatttcgccgttttggcatttttgctgcttttcctctctttccgcgtcatttcctttcaatgaaatgaaagaagccgcccttttcggctgtcctttctctccgattggaaacatttttgaaggtcgttttggcacttggagaaagtttttatctgtcgctgttgtcaattcgctt

SEQ ID NO: 42094 - DNA, 871 bp, Heterodera glycines
tgacctccatcggcttcatgttcagcacttttgtgatgcgtccttgcatgataagaaagtgcgggttgttcacgtttatgccgacttggcgaaacatatcggacacacgttggtttgtggcagaagtgccgttgatttggtagctgtttttcccgttgatgataatcttgcaataaattgacattatttaaaagtttaagttacaatcacctgccgtctcacgacaatttccttatatttgttgtagccagcaggctgtttatcgggcgggacgtcgttgtcaaaagtgatcgtaacagttgctcggctgatgccggcctggccttgcttgtacaccaactcgttgagggaatgcactcggacctgggcgaggtttgtgatgccaagcaggaagcatatggcatccaaaatgttcgatttcccagaaccgttgagtccggtaatggcattaaattcgggatccaaatctctgactgcttcatgctgtgaatatgacttgaagccctcaatctctatttttttgattctcatctatttaaaaaaaatattatagttaaaagacaaaaatttgaacaaacatacaaagtgcaattttaagatgcttgatctccttgtttgtttgggtctgttgttttgcttgaacttcgaagccaaaagaattcaaaaagaaaaaaataatgccaaaaaaatttggctaaatgttttaaattaaaatagaatacgagtccaacaaaaaatcattgcaggacagaatgggaaaacaataaaagtgggttggtttcccgaactgaaatcccagctttatctcgttactaaaatcccatccgcaaaaaaaaacgggtgtttgggcgttttgaactaatttgactaa

SEQ ID NO: 42095 - DNA, 819 bp, Heterodera glycines
ccccatttttcgcaccgtgaatgttatttttattgaattctgaaccggtttgagtagattagactagaaaaaattgaaaattttgaaatcatgtttcccactcccttctcccaggggtattattttgtaaagtctttttttccccaataaacttgtcaaaccccatttttcgcaccgtgaatgttatttttattgaattctgaaccgttttgagtagattagactataaaaaattgaaaattttgaaatcatgtttcccactcccttctcccaggggtattattttgtaaagtcttttttccccaataaacttgtcaaaccccatttttcgcaccgtgaatgttatttttattgaattctgaaccggtttgagtagattagactagaaaaaattgaaaattttgaaatcatgtttcccactcccttctcccaggggtattattttgtaaagtcttttttccccaataaacttgtcaaaccccatttttcgcaccgtgaatgttatttttattgaattctgagccgttttgagtagattagactagaaaaaattgaaaattttgaaatcatgtttcccactcccttctcccaggggtattattttgtaaagtctttttttccccaataaacttttcataccccatttttcgcaccgtgaatgttatttttattgaattctgaaccggtttgagtagattagactaaaaaaaattgaaaattttgaaatcatgtttcccactcccttctcccaggggtattattttgtaaacttttttttcccaataaacttttcaaaccccatttttcgcaccgggaatg

SEQ ID NO: 42096 - DNA, 926 bp, Heterodera glycines
catttttcgcaccgtgaatgttatttttattgaattctgagccgttttgagtagattagactagaaaaaattgaaaattttgaaatcatgtttcccactcccttctcccaggggtattattttgtaaagtctttttttccccaataaacttttcataccccatttttcgcaccgtgaatgttatttttattgaattctgaaccgttttgagtagattagactagaaaaaattgaaaattttgaaatcatgtttcccactcccttctcccaggggtattattttgtaaagtctttttttccccaataaacttttcaaaccccatttttcgcaccgtgaatgttatttttattgaattctgaaccgttttgagtagattagactagaaaaaattgaaaattttgaaatcatgtttcccactcccttctcccaggggtattattttgtaaagtctttttttcaaaataaacttttcaaaccccatttttcgcaccgtgaatgttatttttattgaattctgaaccggtttgagtagattagactagaaaaaattgaaaattttgaaatcatgtttcccactcccttctcccaggggtattattttgtaaagtctttttttccccaataaacttgtcaaaccccatttttcgcaccgtgaatgttatttttattgaattctgaaccgttttgagtagattagactagaaaaaattgaaaattttgaaatcatgtttcccactcccttctcccaggggtattattttgtaaagtctttttttccccaataaacttttcaaaaccccatttttcgcaccgtgaatgttatttttatttgaattctgaaccgttttgagtagattagactagaaaaaattgaaaattttgaaatcatgtttccccactcccttctcccagggggaattatttt

SEQ ID NO: 42097 - DNA, 1122 bp, Heterodera glycines
tcttcttcgctccgtatcttgcatttttgcctaaccattcttgcactttgtcgcattgtctttccaaatgaccaacttggttacatttgtggcactttgccgacttgtgtagacagtctttgtaactgtgatatagttttccacatctccagcatttaggagtatgagctgatgtgtggccctgctggaattttggattgctgcccttttcccttttgttgacattttgcttcatcgcattgaccaccaatttcgaagttgaatactcaatcattttcgcctccgttatagtggtcataaaatttatgcaatcctcaacaacttcgtcatatttgactgattcgccgtaggacgcaagttttgaaaggatgcactgtcgtaggaccgtgtctcttgacgacttaagtgcagttagaagcatcagacccttgaattgttcttcctttaggtttacaaatttgaaattgtttaacaattgcttgtgcatgttgatgaattgacagaagtcctcattttcccacttttcagctgttagacattcgaatctgtcgatgaaaattgattgtggttttgcaaagagcttttccaaatttttcactgcttcatcatagttgaaatcagtaacttttttcggtagatagaatttgttgtactccgaaaaagcgttttccgaaagtttgttcatcaaagctttcactttggtttcgtcctgtgcgtttggtgacgcacaatcaattgcaaacgaaaacctgtcaaaccattcggaaattctgctcttttcttcatatggttcgaagattccgatgtccggcaaatgcggaattgtcgcatttgctggggtcggggcaagtagggacgagacacagaataaataaaaaatttattccgggaaggacctcaaacttgggtaattaaacaaaatatttgaaatggtgaaaaatatcttcgtcctgtgcgtttggtgacgcacaatcaattgcaaacgaaaacctgtcaaaccattcggaaattctgctcttttcttcatatggttcgaagattccgatgtccggcaaatgcggaattgtcgcatttgcttgctggttttgtcgtggttgtcactgtcctccgacgaattgagca

SEQ ID NO: 42098 - DNA, 1095 bp, Heterodera glycines
ataaattgatcattgtattcacagtcctgcaaatttccgtaaatcgaaatcctgttccaaaaattttccataaattgatcattggaatccgcggccccaaaatttccgttaatcgaaatctggtgccaaaaatttccataaattgatcattggaatccgaagtccccaaaatttccgtaaatcgaaatccggtgccaaaaagtttccataaattgatcattggaatccgcggccccaaaatttccgttaatcgaaatctggtgccaaaaagtttccataaattgatcattggaatccgaggccccgaaatttccgtaaatcgaaatccggtgccaaaaagtttccataaattgatcattggaatccgaggcccccaaatttccgtatcctgtgccaaaaattttccataaattgatcattggaatccgaggccccgaaatttccgtaaatcgaaatccgatgccaaaaattttccataaattgttaattggaatccgaagtccccaaaatttccgtaaatcgaaatccgatgccaaaaattttccataaattgatcattggaatccgaagtccccaaatttccgtaaatcgaaatccgatgccaaaaattttccataaattgtaattggaatccgaggcccccaaatttccgtatcctgtgccaaaaattttccataaattgatcattggaatccgaggccccgaaatttccgtaaatcgaaatccgatgccaaaaattttccataaattgttaattggaatccgaagtccccaaaatttccgtaaatcgaaatccgatgccaaaaattttccataaattgatcattggaatccgaagtccccaaatttccgtaaatcgaaatccgatgccaaaaattttccataaattgatcattggaatccgaagtccccaaaatttccgtaaatcgaaatccgatgccaaaaattttccataaattgatcattggaatccgaggccccgaaatttccgtaaatcgaaatccggtgccaaaaagtttccataaattgttaattggaatccgaagtccccaaaatttccgtaaatcgaaatccgatgccgaaaattttccataa

SEQ ID NO: 42099 - DNA, 1279 bp, Heterodera glycines
cctgtccccgtccccagcgattcttcctgttggccgccccctcctcggtcatcatcaaccaaaatattgttgttgttgttgttgttatcagtcattagagagtgaaagatagctagagatttcatatcaacaatgtaattgacgaaaaatgatgcagataataaatgtattaaaaatacattataaaaaggtacgcaaagtatgaatatgtgatcaatatgcaaatttattaaaacatttagtaaataaattgataaataaggcaaattacaacaaaaatgaaaaaattgtatggtggaagtcagagatgaagcaaacacaaagaaagaaatgggatcgaagattgaaatttaataaataaattgaaaaacataatggaaacaaaagccccccccccccttcaccatgtgctgtcaaacagcatcaatcctttccagcagcctgtggatcataaaggactcaaagcggtccattatgctttccagatgcgacgtgccataagtgtaaacttttgtgttgatcgccttcgagtgtcccatacccttcgccgttcggtccaacagcaaactggatgtttcagcttggttccggttccgttcgaccaaagccttcagcacaggatgcgttcgcaacagcccaatgagctcggcactgaacagtgtacgggacgtagcgccggcatgccgaatttcatggagcgaacccagaggaaatttgagcttgaatgtgtgcaacagcccctaaaggatatgaaacatatatttattggcttctgcttatgaagataagatatatacattgagcagcctgttcatgttgttcaactggaacggtttgccgtcccgcacgttgaaaaaaaaagggtccgagggcaaaatttcaatgtgatcaatgtgttggtaacggtaaatggcaaccgccgagtattcaaacatacttttctgttttggttgtggggggggggtgcaatattttgtatatttgtgcattctttgcaaccaacatgatggcacataaatctcttgagaatatttttagtatatttattggcatatgcctatgaatgtatgaaatacatatttttaaaacacctgagaaatttaaagtcctctaaagccggctccaaagcaaccgccccagagaacagcttctgctggatagcgcaatgcttctgcttaattgcctcatgctgcagcaggcacatagcgctcgcataagtgttctgtctgcagccgcgcacggagattatgttgcctataaatgtttttaaaatatcaaa

SEQ ID NO: 42100 - DNA, 769 bp, Heterodera glycines
  unsure (1)..(769): unsure at all n locations
gggaaattttttgaaaatgagtataatttgttaagagaatttcgtccaaaaatcgtcaaatcttgtgattttcgagccaattattggtaaaaaaaaatttggagttttgggaggccggcggtgccgataggcgccgccgaanagttttcggaattttaggaatttttaattaattttattaagaaaattgtacaaatttaaaaattttcaagagtccccaattccccgagttagtttcggtgagtcggaggataaaaagtcggaggtagggggctcggggagcaaccctattataaacccccaaaataggtgctaaaaatggaaatgagataaatattttaaaaatcaaaaatgtagtcaagtaaataaataaataaattttgaatatgaatttttgataaaattttccatttttcaggggtgtatttttcgtttttattgcatttttgttaataattttttcaaaatagcagaaaatattttacaaaaaattcttcaaaatgaaaaagagcacaaaaaaagcaataaatttattattattaacaggttatatcgctccgatttgattcggttttttttcggtttttcataaaaatcggtcggttgtttcggttttttgattatttcggtcggtcggtttcggttaaaaaaaccgaaaaaaaccgaaccgaaaaaaaccgaaaaagtcaaaaatttctcggtcggtttttttcggtcaaaaaccgaaaccgaaaaccaaaaaataccgaaaaaacccgaaaaaaaaacc

SEQ ID NO: 42101 - DNA, 820 bp, Heterodera glycines
tgctcgtctcctcgcccctccccttaattaaaggggggggggcgaatgccaaagcgacaatttgccatttcttttgaccgtcccaccgtccctttgtgctcatttgtctctcttttcctttgtccatttgtctcttttgtccaataggctttacgtccttttgacaattttcgtcttcagatgctctcctccttttgtccatctctttccatcgcttcaattcaattccaatgagtggtccgagttttcagtttcagtccggaatggtccgggaacaaatcacgatggactgtctagaggaagtgtctctgcgcaggcttcgtcatgaagcagtacagttcatcaacaaacatgtcagtgggacggagaaagacagcgaggacaagagagggagagagtgagggagggagggaaggaaggaaagagagacaagagagagtaaaggataagggggagagagagacgagagagtgagggagggagggagagggggagagagagacgagagagtgagggagagagggaagagacagagagagacaacgaaggacagggagagagaaggagggaggaatggtgggatttaaaacagttttgtgtttcagcatcagcggcattcactgggcgatcggcttctcgaccacattttgctctacaggcacaatttccgatcagtgaacattctcgagttgatccaatcgactgaagaattgtcagagggctgtctgatcgaaattgtgatcagttgtaagtgtttctgatccaaggcatttacttaagcagagcttaagcgataatttaaattttactattgttcttc

SEQ ID NO: 42102 - DNA, 1313 bp, Heterodera glycines
  unsure (1)..(1313): unsure at all n locations
agacaatgtcatgaaaagtgttaaaaccgcttttcccacctgttggtcgtacaaagcccagaagaacacgatgggaatgtacagcacaataatggccaacatgcttttgactccggcgatcagatgctcgtcgtactttggtcgcgcgtagtccaaccaatggtcgggcgatcgccgatggcttcggcttttgcttcccctgagacaattcatagggcaaattattgttatattaggcaatttcaaggtttagcaaatgccatcaatggctaaggatgggcggaaactatgagtttaagccctctaagtgacaaaaaatttgagcatcgattccgccgaatacgatgcgatggcattttctgatcactttgtcttatctctgtgctggatttgatcagtctcccctcccccaattattcaccagcatgtgttgcggattttgcgtcggagagcgaagaaaatgcagcggacgaccttccacagaatgttgcccttgttggccggcgtgattttgtagttgcgccagccaaacagaaaggtgaggaaggcgacgagcatcagaaggccggggatggcaaaagccaacggaaaacaatggtcggcaccaaggcattggacagtacggagccgaggggtgatgcccatggcgagcagggagccggcattgatggcgaagtagaagaactgaacggcggattgatcatttgggactattgccaattgtatggcaaacgaccactgatcaggaccaatactgatcagccttgggaaaaagtgacaaaattgatttgatttaaaggctactgatcaacaattggttgttggttcgttggcaccgataactgaccgagaagaactgcgttcgctgcctctgctggtcgtcgccgaattggtcggccgcaaatgccgacacacacggctttatcccgccggtggccaatgcgatcacggccaagccggaatagtccaatgttttgcggaccaaactgtccaagacgggaatggcaccgacggagagcagcacatggccaaacacatagacaagtgacacctgacgaaggcatcaacgaattaaatgacggaaaatgatgttaattataatgtgaagaatttaattgcttttttgttttggccatgaaaaaaactccgatgaaaaaagcgatggatttggaaaactaaaaaagggagatcaatttgatcagtttaagtttaaaatcattccgtttttgctcattttctgtatttatgagtataataaaaatttgaaaaataggatattttgcgcacccnaaagaatgacgcgaaaacggccg

SEQ ID NO: 42103 - DNA, 1198 bp, Heterodera glycines
ttttctttcttaaaattagcccaagatcgcaaattttccgttaaaatttttctaggcttaaaatctttttgttttttgttctgctagtagaggaatgttaagagctttcagaacttgttaacaaattgcattaaaatttcaaaattttttcccacctcctattggcaccgccggacctttccccctcgcccaatccccaaaagttttttagaaaaatgcgccacaaaaaaattgtctacgtgtcaaaatccctttaatttaaaatacgtacgtaattctcattaaccatttttattttttcaataaaaagtatttaccagatgatgatttttagtatgtgttgaaatgattgctgaaataattaatcaattgaacaaatattgataaatagaaaatttattttaaaaatttcctaactaactggcagaattaaaaaagtgtctttaaacttttctaagtataagcaattcataaaatttagcctaatttatatgctagagatatttcaagcaaaaacgaagtcaaaaaacacgaaattaaattttattttattaaataaatgacttttatattttattaaaatatagaagtgaatctcatatgaaaatctttatgtaatgaatttttcatttttcattttctatcaaaaatatcatttaattttgcttattaatttatgaattttttctctctaattgcctatttttggaaaattcatcgcttgatcaactatatcaaaaatatttttattttgtcttatggcaaataatttcgtttttttaaatttttttatccttttattcttaaaaaaattttattttataaaatatttcgtcaattatttatgttccgaacaaatttctatgcattattttatagagaattgatttaaattctttctagttcagtcgacatcgtaagctacagttctgtctgtccttatttattgccaagttgaatttagtcttaagaatttgattttaccatctttcattatacagtaatttaagaaaaattattgcactttttatgagtttattttatgttaatttgttattttaacaataaaaggtttattaacttttttaaaaagcacaatgtttaaaatttataaaataatttttaaaaattatttatttcattattttgtcaatctaagtttttaataatttttaataatatatggccctttattaat

SEQ ID NO: 42104 - DNA, 830 bp, Heterodera glycines
gtccgtttgggggtactcaaacaattatgggggagtaaaaatccaatgcagaattaaagtacaggctatagggaagctattcccgaaggattcgatctccccataaatctgggcgcatcggttcggggggactgccccgaaaacaaaaaaatcgattttttcaagtgtccgtttggggtactcaaacaattatggggagcaaaaatccaacgcagaattaaagtacaggctatagggaagctattcccgaaggattcggtctccccataaatctgggcgcatcggttcggggggactgccccgaaaacaaaaataaatcgattttttcaagtgtccgtttggggtactcaaacaattatggggagcaaaaatccaacgcagaattaaagtacaggctatagtgaagctattccggaaggattcggtctccccataaatctgggcgcatcggttcagggggactgccccgaaaacccaaaaaaattttttggataaaaattatttaaatgaactgactagataatatttaaaataggttatttctcttcctttcagtatccctgcaaagtttggtgcgcttctgatcagtttctgaaaaaaagttaagcctaaactttttggcctgtttaaaaaggaattaaaaatttttaaaaattttattcatctccctttttgatagaaaaagcatcagagtgcctaaactaacatgtaaataaaatttggtgcgtttcaaaacccctttctgaaaaaatatttaaagaattaattttgcaaaaaataaataaaaacgaaaaaactcaaaattttccgaaaatttttttgagccagct

SEQ ID NO: 42105 - DNA, 1135 bp, Heterodera glycines
aggtctgatgaaataattaacattgaattcgtattatcagcagacatcaaaaaaagagaaggaagcacaataatttttaaaattaaaaatgaattgaagctaaatgaaagagtataacgaaagcaaaaaaattgaatttttattgttttttaaaggcacatttatgtagaaaacctttcagcaagtcataaaaattttacacagaaaagtccatttataacaaaaaacttcaattttgaaatgaagaaaattaattaaacagaggaaaaataaattattttgaccattgtagatttatgttttatattttaaaaaatggaatttctattaatttaatttatcgatttttgtcacgaccaaaatatttcgctcttgaaattactaatttgacattttataacttgagcagaccaaactttgatggcgttctgaaaactttaagacacgatgaaaatcggagaaaatttcaggtttctaattgcacctagaaatgctgtctcttctttggaacaagatttttttccgccacaaaattttcatttcagcttccgttttcagtatctcaaattttcttgatagaatttcaaaaattttgcataataatatggcacatgttacaacaatccataggtgatttaactgaaacagaaatttgcatatgatatgacaccgcgtcatatctcagatataatccgatttggaacagcaggtccagagcagaagggatgggggcggacacacttaaaagcggcaatcgttattgatgaattttttaagaatttattcaaatttcaataattcggctttatttaaaatgttcttcagacaattattatttttctcaatgaagaaaaacaaaaagttttttttaattatattaataaatggggtattaatttaacccagttcctattaattactatgggataaagaattaaaatggttcattctatcaaaaaaataaataaattaaaaaaaaaaacgaatgactccactttaatatttacaacataattgtgatttgaaccgataacttttaatgtcaaaaccgttgaactaatcactgagccactaattactaaacactatcgaaattgtagaatttttttctatttttttttctttaaaaattcaa

SEQ ID NO: 42106 - DNA, 1256 bp, Heterodera glycines
  unsure (1)..(1256): unsure at all n locations
aatttgttattaaaaaataaaattcatatcaatttttacaaattctcttgccactgttaataaatttcgatcagactctttaattcagtccaattctgatcataaattaaaaaaaaaaaacaattttgtcggcttttatataataaaattcgggttgaaaagcaaaaaatgtcatttgttaaaaataaatttttttatgggaataatttttcatcatataaattttttaaaaaacttttatttgatgcattttttgaaaaatgtagctgaactatcggatagttggatttgaaggaggacctgctgaagcatgagtatccatcagtcccgtcctgttccaccaggatttgtgcattgaataagcctaataattaattaaattttattttatggtttttctaaaagctctacgaaatttataaaactaaaaatttaggttgaaatttataaaacaaaaatttcggtttaaaaaaaatggttcccgaatccacctgtctgagtctctggccacaacagtacccggagagcaagcttcactcaagcagtaattttgacacgacttttgtgtggcaaaattattccgattacctttaatttttctttaattattaattaattttttaatcgattaaatttcacgttaaaaataattattgaattgtgtggtttttaccctcgcatccgttatactcaaatggttgacaagtttttgtgtcagcattgaaaaaatgtcgtgtgattcgggtactgctacatctaacaccttggtcctaaaatttttgtaagaattccagtaaaaaagttattttccttaacctttggttgtgagcaaacaaaatttttggatggacaacacagtgattttgtttggtatacggtgcccgaaaatacagtaacaggggtacagtagtgtgtggaagggcattgccgatttgttgtgcatgggcgcacagcgccgttgggctctttccaaacctggttttttttttaaattttaataatgtattttttcaatttttttttttgccaacttcgccaccgtccggacagctgaaaaggaaataatatttttaaagaattttttaacacattatctaattaatttaaatgcaaaaaaattcaaaaattaagtgtcccgacatttgcggtccgaaagtggattttttcgaggtcttggccataagtcagacttttgatttcgtttttcgttaactaattatcccgctcgacagtgaaacattttttcgccgnggata

SEQ ID NO: 42107 - DNA, 547 bp, Heterodera glycines
aaattttcaaaacaaaaacagcaatttttggcagaacccgcgctgttttcccgttggacccattggagtgccaaaaaaatgctaatgggcaaaggtttcgggaatagcaaaacattttgtcaattaaaatttgggtccgattaaaattggactgaaacttgccaggctcagaaaattttatatttggtttaacatttttcgtttctatgttttaaatgaaagaaaatgtttttttttgaaaaattggtaatttttttaattttactcaattttcttaataaatttgacgccaaattttctaatttttcccagcggcgcctaacggcaccgccggatcacaattttcctaagaatttgggttctaataaaattggactgaaacataccagactcacaaaaaaaaattaaatatatatatatataccggatttcctcgattataagccccggggcttctattgttcaacccccctccaaggggggcttatattcgagggggggcttccattcgagggggggcgtataatcgaggaaatacggtatatat

SEQ ID NO: 42108 - DNA, 255 bp, Heterodera glycines
  unsure (1)..(255): unsure at all n locations
tataataacgcntgcggacatctacacttttgaattgaccataattggtaattactctttctttttctccatattgaccatcttactcatactccccccacccttttcttcttccgccacccacctccctctcttgatagtttaaactgaaggcggttaaacgacaatctgatccccatcaagctagcttctgcaggtcctgctcgagcggccgcccggggatcgatccccgatctagtaacatagatgacaccg

SEQ ID NO: 42109 - DNA, 915 bp, Heterodera glycines
  unsure (1)..(915): unsure at all n locations
tgttaaggctttaantttggcaaatccacanttttttgtccacttcaagtgcttttcggtcctcacagtgaatgatgccggaagtgcggccatccaccgaacggacctcgaaggcattgctcctggcaaagatttttaaaaattttcgaatttttttggaaatacctaagcttgtccgtcgcccaaaggtagcgcgagacgaaggcgagcggaagcggaatccggatggccgttttccattcgtcgcccatctcaattaaaaaataataacagtcttctgaaaaatttcaacttattctgacaattaaataagaaatagagaatttttaaattttgtgaaagttatctccatagttttttcgaaccctactaattaatgtgttaattagggttaatttgtttttaattataaattgcacaacttcgtcatccaataatcgtcgttcttcattttgttcctccgctgggcttttcaaagcactctgaaaattaattatttcatttttaataatttaaatggaaattaattacagttaaaattaaataaaaatatattttttaaatgccttaaaaacggccaaatccatcagcgaaggcggcggatgctttgattgactgtctctgagcagaggactgacctgtgaagattaaacactttccatttcaaataatattaaaattaaatttgttgattttaattaaatttattagtctaattaaactctaatcattcggacaaaaaaacatttttcagaaaattcagaaatttccccggaaaatgaaatataaaataaaatttgctgattcttaattaaactttattagtgaattaaactctgaacacggacaaattttcaggaaaacgcattttaatttacctcataaaaatttgtccggataaaagttttaaaatta

SEQ ID NO: 42110 - DNA, 1026 bp, Heterodera glycines
aaaaaaaataataatagggttgggcttgccattttaatttgaattttttagaatgtgtcggttaaatgcaaaaactgtgtggaaaaaattgttataactccattcagagaagagatagaaaaaaaaaataaaaaataggtttagagagcccgtgaacagctgcatcggatgcaagtgccgccgttgctgtacgcctaacagttggtgagcaatgacggaaaattgcttaaaaaagaaaccaaacaaactcatcaattgttagctcccgttgacaaaccgaagggtacattggggcaatggatgttgggctaccgtatcagttattaaaatttttgtttttcaaaaaggatactaaaaatgggataaccccattcagagacaagtcaaaaaaaataataataggcttggactaccatactaattagaaattttagaatgtgtctgttaaatgcaaaactgttgtgaaaaattgttataactccattcagagaagagatagaaaaaaaataaaaataggtttagagagcccgtgaacagctgcatcggatgcaagtgccgccgttgctgtacgcctaacagttggtgagcaatgagggaaaattgcttaaaaaagaaaccaaacaaactcatcaattgttagctcccgttgacaaaccgaagggtacattggggcaatggatgttgggctaccgtatcagttattaaaattgttgtttttcaaaaaggatactaaaactgggataaccccattcagagactagtcaaaaaaaataataataggcttggactaccatactaattagaaattttagaatgtgtctgttaaatgcaaaactgttgtgaaaaattgttataactccattcagagaagagatagaaaaaaaaaataaaaataggtttagagagcccatgaacagctgcatcggatgcaagtgccgccgttgctgtacgcctaacagttggtgagcaatgacggaaaattgcttaaaaaagaaaccaaacaaactcatcaattgttagctcccg

SEQ ID NO: 42111 - DNA, 1604 bp, Heterodera glycines
  unsure (1)..(1604): unsure at all n locations
tattttttgtatttttaatataaatattaaaaatccgttttattgatttttttgaaaattttgattaaattcattttcattcattatttagattaatttttggttaatattaattaaattttttaaattaaatttacaaaaaagaaataatatttacggcaataataaaagctaaaataacgtaaagcgaataaattcatattaatttcaaataaaaataattttgaagccggaatttcacttttttaattaaattattaaaaaattactcatattgcggaattattttgaaacatatttgttttcatttaatttttgtaataataaatctaaatttacatttatattttttgtcatttatattaaaaataaaaagattcttttattttaataaaatttattttatttttttaattatttagaatacaaaagaatgttaattaaattttaaatttcataaataaatattataattaactacatcaattaaattaaaaatggttgaaaaaatataaacaatattatcaaaattgaagtcaacaatatgcaaaatattctattatcaaataaaaatgaatcgaataatttttgccgttttttgtaaatggttgtcaattattgttaaattaaaaaaacaattcatattattctttttaaaaataataagtaaattgatagtaaaaatagtgaaaataatgataaaaattatatttaattatacaaacaattattaaaaataataagtgaaactttatttagaaaatcgaacttttaataaatttaccaaaattgtctttatatccctctaaacaaataaatatttgaaatgtaaaactttaataaacatagtgaattataaataatttatttttacttttatcaagcaattaaaattaattaaaaaaacaatttttaaattaataaataaaaatccaattttaatttattcaatatttaaaaatatttatttaaatacaaatagattatgtgtacgaagaaaaatgaaaaaaaacgtagacgacatgagataaaaaagaagcaaatccaaaaaacccagaggaaggaagaagggaaagtcaaggagattagccactaggccatccgcacaattctcgtcgttacttttaaagaatatattaatatatttttaaaattttttccttttaactccaattttcttcactaatttttcactcagaccccccattcttaccagtgcttgtttttcccggttcccggttgccctaccgggaccgggaccgggaccgggacctgagcttttcaaaatccgggaccgggacctctngaggaccgggacctcggatgaccggaacttcccggcccggtcccggtcccgctgcactctagtttatattattattaatatttttaaaaatatattttattattaataatttttattttattcttcggaagattttaaattaacaatttcaaatgttcattaaatgctttaattttctatatggaccggatttatttaatggttttaagtgatgttagtactataatttatggtctaattattaatgctataatttaagtaccaatattagtaataaatactttttcttaataacaca

SEQ ID NO: 42112 - DNA, 760 bp, Heterodera glycines
gtccgcctcgtgctgtcgcgttttgtccacatcccttgcaaaattcaattttatttttgctaaaagcacacaaaaaacagggaaaagcggagacaaaaataatggttattctcaagaaaaatcagcaaaatgtcagcagaggactgccaaagtcagtcccaccgatcgctgttttgcccaatttggtcaccgaaaaaagaatatttgaagcggggtaaagtctgtccatttgatgggcaatgtcagtcccgtccctttttgctgatcattggtgcctgtcccacaattggtgattggctctgaatgctgatcctccactcattcggtgccccttttatgacgtcgaattgcgctgccggcgccaaggtcgacctcgagattctctgcacgtgatggttgctgctgctgctgttccgccgttgcgaccaccgatcgccactttttgcactgatcagcagcaaaaggcaatttgtgggaggtgggggatgaccaagcagtagaaaatggaaaacgaaacaaacaacaaaaggggcgggagggacggaatggcggaacggcggcggaaagcgccgcgggggctaaaaatcaaattttgtgaatggaaaaggggacaaaaaaataaatttttattgtttgttgcttttaaatttctcatgccctttttgatgggccaatttattccgttggcacagcgatcggtcgcccctccccttttttcaattgcttttttcggacattttaatgcattaattgcatttgc

SEQ ID NO: 42113 - DNA, 1668 bp, Heterodera glycines
  unsure (1)..(1668): unsure at all n locations
ttttcggggcagtccccctgaaccgatgcgcccagatttttggggagaccgaatccttcgggaatagcttccctatagtctgtactttaattctgcgttggatttttgctccccataaatgtttgagtaccccaaacggacacttgaaaaaatcgatttttttgttttcggggcagtccccccgaaccgatgcgcccagatttatggggagaccgaatccttccggaatagcttccctatagcctgtactttaattctgcgttggatttttgctccccataattgtttgagtaccccaaacggacacttgaaaaaatcgatttttttgttttcggggcagtccccccgaaccgatgcgcccagatttatggggagaccgaatccttcgggaatagcttccctatagtctgtactttaattctgcgttggatttttgctccccataaatgtttgagtaccccaaacggacacttgaaaaaatcgatttttttgttttcggggcagtccccccgaaccgatgcgcccagatttatggggagaccgaatccttcgggaatagcttccctatagcctgtactttaattctgcgttggatttttgctccccataattgtttgagtaccccaaacggacacttgaaaaaatcgatttttttgttttcggggcagtccccccgaaccgatgcgcccagatttatggggagaccgaatccttccggaatagcttccctatagcctgtactttattctgcgtggatttttgctccccataattgtttgagtaccccaaacggacacttgaaaaaatcgatttttttatntcataaatattttttcagaaaatgctctgaaacgcaccaaattttatttacatgttagtttaggcactctgatgctttttctatcgaaaagggagatgaataaaatttttaaaaatttttaattcctttttaaacaggccaaaaagtttaggcttaactttttttcagaaactgatcagaagcgccccaaactttgcagggatactgaaaggaaaagaattaacctgttttatcacattagcttgtcatcagtttttataaaaaattttcaaaattctgcgtctcctattattttatttttttttcaaaattttgaagggcggggggggggcgaaggcccaccacgaggccgcgaagaggccgagtgagtaccttcggtgcaggaaaattattaaattttaaaaattttttaattgttttttaaatatgccaaaaaatgtaggcttaacttttttagtgaaaattcgatcactcatattttttgctaattgagcagaagcgtaccaaactttgcagggatactccccggtaaaggactaacttacactgaaatgagcgccgagctagctggctcaaaaaaattttcgaaaatctgagtctttcgtttttatttattttttgcaaaattaattcttaaatattttttcagaaagggttctgaaacgcaccagattttatttacatgttagtttaggcactctgatgctttttctatcaaaaagggagatgaataaaatttttaaaaatttttaattcctttttaaacaggccaaaaagtttaggcttaacttttttttcagaaacttatcagaagcgcaccaaactttgcagggatactgaaaggaaga

SEQ ID NO: 42114 - DNA, 786 bp, Heterodera glycines
  unsure (1)..(786): unsure at all n locations
atttttaaatttatcttatatccaagaaaaatgactatcttttatgtggagaaantttatacgggacaaaagcgctcgaccttgagagggagggcggtgcgcaatcgccatttaatttctcagagaatttttaaatttatcttatatccaagaaaaatgactatctcttcttttgagaaattttatacgttacaaaagcgctcgagcgtgagagggagggcggtgcgcaatcgccattttatttcttatagaatttttaaatttatcttatatccaagaaaaatgactatctcttcttttgagaaattttatacgttacaaaagcgctcgagcgtgagagggagggcggtgcgcaatcgcatcgctatttaatttctcagagaatttttaaatttatcttatatccaagaaaaatgactatctcttcttttgagaaattttatacgttacaaaagcgctcgagcgtgagagggagggcggtgcgcaatcgccatttaatttctcagagaatttttaaatttatcttatatccaagaaaaatgactatctcttcttttgagaaattttatacgttacaaaagcgctcgagcgtgagagggagggcggtgcgcaatcgccattttatttcttagagaatttttaaatttatcttatatccaagaaaaatgactatctcttcttttgagaattttatacgttacaatagcgctcgagcgtgagagggagtgcggtgcgcaatcgcatcgccatttaatttctcagagaatttttaaatttatcttatat

SEQ ID NO: 42115 - DNA, 731 bp, Heterodera glycines
aaaaagcgttctattgatttttaaatttggaatatattttaaaaaatgatttttgctttatgcttttaactattaaaaagttgtagaaaaaatttcgctttcgcatttcgcctttcgcattttcgcatattttagcttttcgcatttcgcttttttttcattttgcatttttcagtttcgcaaatttagcttttcgcatttcgctttttatttttcaatttggcccatccctggtgtaaaatgacaaaattttattcaaaaagcaacaaattattaggcgaaatccgtaaggggttcgtaacagtgatgccgcgggttgagaaaaatttcgggttcgggtttcggtcgggcactcaaaaaatttcgggtttcgggttgagaaaaacctcgggtttcgggtccgggttggcatcactgttcgggatcaaaaaatcagatttttaccaatatttttacggcgcatttttacaaaaaaacttttattgaatgggcgagggaagagaatccggcggtgccgataggcgccgccggaaaaattttgtaacttcgtcctgatttattaacagattttcaccaaaaaaggacaattttggcaacgaaaattctgatcaatttagaaaacgtgattttatgcaattttgagtctggaacctatgatggatatttaccggcactttggctttaaatcgaagttgatttttttgcggcgcattttttcaaaaaatttttgg

SEQ ID NO: 42116 - DNA, 1013 bp, Heterodera glycines
atatttttcatcttctgttctttatatgccatcattttccatcccttccggcgtaaaattgcaatttttaggtcaaattttgaaatcttagaggagaggaattttgtggttcggcacggcaccaataagatttttttgggattttaatgaattttgtaaagaaaatattcaatttcaataaatttttctcttttcaccttcgccggcgaccctcactccccgcaatagtcatccgtaacagcgaaaatttctcggtttaaagactaaaaacccgaggccgtgaaccgagcccaagaagcgaaaaactcgagaaatttcccggaccgataataggaatgagttaatagaaacattgttttgcacttttagttattaaaatatttatgccacatttttgggtttcgcaattacttacaaaaatgcgccaaaacatattccatcgaaccaaatgcaagtttaaaggttatctgatacaatttttatttattcctgtctatatttatgtattgtataaattaagttatttatttattttttgctataatttgttttatttatcctaattttttaaaattaatattattatattttttccaaacaatgttatttgaaaacaccgtcaaaatggagtgtttcaatgtaatttaattaaataatttaatgatttatttaatttaataaaataattagttcaataaaatatgaattttattgtctaatttatacggcattattattatctaattagttctcaatgtttttggaatgaaattcaaattatttgtttatctgaagatagtcggttaatgattcttaaatatcttttaattattgcttttagcaaaattactgaaattttaagtagttatgtgctttggttcatccctctttcagtaggcctcctttacatgatgagtaaaatatttaattttttatattactccttgactaacagcgtcaactttttttccttctttcacaaaatttttgtagtaactttatacaataaatta

SEQ ID NO: 42117 - DNA, 810 bp, Heterodera glycines
tccagcgtttctgtccgagctaacacaggtattctaaagtaggcatattagggcatatcgggggggggggcgaaggcccaccacgaggccgcgaagaggccgagtgagtaccttcggtgcaggaaaattattaaggaagagagttcattatttatttgttttttgcaaaattaattcttaaatattttttcagaaagggttctgaaacgcaccaaattttatttacatgttagtttaggcactctgatgctttttctatcaaaaagggagatgaataaaatttttaaaaatttttaattcctttttaaacagaccaaaaagtttaggcttgtgtggtaagtgtgaggaactgtgttcctccaggcaaaaaattctaagaaaatttataagcatttgaagggttctcagcagtttccctgcaaaatttggtgagcttctgatcagtctagaacgttgggtgatcaaatgcaaaaaataattaaaaaaaaataatgctggtgtggtaagtgtgaagaactgtgttcctccaggcaaaaaattctaagaaaatttataagcatttgtagggttctcagcagtttccctgcaaaatttggtgagcttctgatcagtctagaacgttgggtgataaaatgaaaaaaataattaaaaaaaaataatgctggtgtggtaagtgtgaagaactgtgttcctccaggcaaaaaattctaagaaaatttataagcatttgaagggttctcagcagtttccctgcaaaattgtccgtttggggtactcaaacaattatggggagcaaaaatccaacgcaga

SEQ ID NO: 42118 - DNA, 766 bp, Heterodera glycines
gagagaaagagagaagacccagcactaaagacagatagagagaccacccagctctaaagagagaaagagagaagacccggcactatggagagagagagaatggtcgagagagagcataggcagcgcgcaaaagagagaaagaattcaacgatcttggtatcattcgatagctctatgtgtcctctattagccagcaaaatttcaaaaaaaattcgttaggtatcaaaaaagatatgtccaaaaatgttaagaaaaccagtttttcgaaatttatgaaaacatacagtcaggtgccaaagtaatgcccccaaaaatttttttttgaaaactgcgattttctcaaaattgaatgatgtgaaaaaggtctaatttatgacaaaataaacattaattagtgcgctaataaatacccaaaaactgcccgataactctctttgtcaatgagaaaattgctcatgaaccgaacaacccccctttttgggggtgcaaaagtaatgccccaacaagtttaatcgaccaaaactcaatttttatgttgagataaaattctgaaaaaattcatactaagctatcttttgatactgatcaaaaaagtcttttggaccaacttgatcagatcactccttcatggtgatttgaaaagccaaaaatggcttgaaaacgggaaatttttcgaaaaaatttcctagggggttgaaaatttttttctgggaaatttaagtaagcttatcagatagaggacaaaattctctaccgaattgccttt

SEQ ID NO: 42119 - DNA, 1001 bp, Heterodera glycines
atgaaattttcatgctaaatttatttcatcaaaggaaacattgccgtaaaattttcaactacaccaattaaaatgtgattcttcaatttataaataaaattactactactgtataccaactttaatttttttaatttcaccaactcagctacagtatactttccaccggtgtcaccaattttgaattcgtaatatgacatgaaaattttgccagcatttttaggtatatcagtccacgagcattgaaattgccaaagagatcgacagtatcaccaccgtaacaaacaaacagtacattcataaccatgacaatcaccagcaccaccaagaagaacagcacaaacaacacttctccagcgtgtcaacaagtgaccaaagtgaaaaggacaaaaaaggtacaaaattaaagtgattttttaggcttgtttttggtcacatttttgccaattttttgtgccaataatctctggcgtttgtttaattcgcacatattaaatccattttgttgatagaggtgaaatttgggaaaatgagttttagactttttgttcgaatatgggtttggtttcgaatgtgtcaaaattagattttccatctcaaaatccctaaaagagctttatctcattaaaaaaaataaaagttttgattaatcaccagcacctctcatctatttatgtatcatatttaaaattgaaaagaatattttaaaccatttttaagcataggagcaatttctcggccgcaattgtccggggcgaaatgcctgcagaaatattaccgaagtttctctaattaaaagtattatttctgatggcgtaattggcattttgtttttaggaggaatgcgcgactgggtgatgccgttggactttggccatgccgacgcagaagccaagcatttgattcacattgtggcaaattgtcaccgggaagaatactcacccattacgacacattgtgagcgggaataattaaaaaatcagaataattctgctcaaaat

SEQ ID NO: 42120 - DNA, 1152 bp, Heterodera glycines
  unsure (1)..(1152): unsure at all n locations
ttttggagaaaatgccgccaatttcaccgccaagaatgccaaatttcgtttctggccaatcatttcgtgtactntcagcaagttgtccaatccgtcgccgtccaatcactgctcgagcttaaccaattgccgtccccgtcggatgccattcttgacgaggtgcagcagttgtgccaatcggaaacagtggcgggcagccaagcgctgaaacagagctgctggttggcattcggagcatggtcaacgaagtatgccagcatacgacggcacagaatgcgaaggaatgtgccggggagggcggcgccggtgccacggcaaaatgcgcacagtcgggattcgtggacaaggacaaatgcccggcggacaagaagcagaagtacaaagaggtgaaccgggcggtcggatgtcatcccaaaaattaaaaaaataattagttactaattggggtcatttcgccctgtacaagcagcagcaaccgcagtgcatctacgacaaggcggtgatggccatcgacgcggcgcatgcgcacgcaaatgccgcacagcgtgcgcgccatgttgctgccggtgttcctgaacacgggcgagcagccgcaggtgcgcatcactgcgttcgccaacattttgggcgcccaaccaacggccgaggtggtggaccagctgatgtacgcgattggcaaggagccgaaccgggaagtgcaggcgtactgctacagaacgatgaagaccatgtccaactcgcagaagccgggcgagacgcaaatgtgggaaaatttaaaatttggcactcacaattggccgaatttagtgccaaacacgtcaaatcgtcactgaaactgttggaaaatgccgtggacgagcagcaattgcgcaccagcggaaagtggcagttcgagcagttgtacaacaatgcgcaacgcgagggcgtgtgctttgcaaagtgaacggacagccgatcagcggggacgagcagtgtcaggacgagctgcagcaccagcagtgcgtgcagttcaacgacccacgccagacggacgtgaccattcgcacggggccaatcgcagtgcgattcaacggacgcaaggcgtggctgaaggtgtcccaggcgtacaagaacgcccagtgcgggctgtgcggacactacgacgacgcggac

SEQ ID NO: 42121 - DNA, 1229 bp, Heterodera glycines
  unsure (1)..(1229): unsure at all n locations
atgaattatgattaaatttttgctgactctgccaatgctcctattgaccatttttaccactatttttctctcactcatcgtcttctcgtctctcctttattataagctattttcctaagccaacgcccttttctccctcttttctgttagtcatttctcattggtgttgacgatccaacattcagtgtaaaatttgttaaacctctcaacattttaaatcaaaatcctaataaaaatttcgttgaatttctccgcctcttatttgtgcaaaattttcgaaaaagtaattttctatttaaaattaaaaaattcagaagcaaattcaagaattttttttatttttaaatgcattttttaccacatgaattatgattaaatttttgcgtttcgaattcattttggaattaagaaaaataaaaattgataatcatttgatcatttttagcgcactttaagcaccgccgttaggcagcgcagttccaaaatttattccatgccacagatattatgggcaggacacgccaagtacctcaaacttgggtaattaaaccgaagaaagagtgcagtggggaagaatgacgcccaaaatgaaggaaatattcgatgctgtgcgaactctttgtgacccctctctgactctgccaatgcagcagttgaccatttttaccactatttttctctcactcatcgtctgctcgtctctcctttattataagctattttcctaagccaacgcccttttctgttagtcatttctcattggtgttgacgatccaacattcagtgtgcaaatttgttaaacctctcaacattttaaatcaaaatcctaataaaaatttagttgaatttctccgcctcttatttgtgcaaaattttcgaaaaagtaattttctatttaaaattaaaaaattcagaagcaaattcaagaatttttttatttttaaatgcattttttaccacatgaattatgattaaatttttgctgactctgccaatgcagcagttgaccatttttaccactatttttctctcactcatcgtctgctcgtctctcctttattataagctattttcctaagccaacgcccttttctccctcttttctgttagtcatttctcattggtgttgacgatccaacattcagtgtaaaatttgttaaacctctcaacattttaaatcaaaatcctaataaaaatttcgttgaatttctccgccttctntatttgtg

SEQ ID NO: 42122 - DNA, 1188 bp, Heterodera glycines
tgccaaacggattttatttatttttaagaattaggaattggctgccgatatgcgttgtcgggagaaaatttgaaaaattaacgaaaataacctttttatggtacattaaattttgataaattcattgaactttttgttgtttggcggtgcttaagtcaccgccagggaaaaattattaaatttgtagattgttattaaaaacggtcattatgtgaaaatccatttcttatcaattaatttttattagccattcttagaaatttacggaaagcgggttaaggtgttccaaaatttttttcactttttctcggaaaaatatagttttcgattagatattttttttagctaattttcttaacatttttaataaatttttgtaaattatctttttataaagcaagcttatattttaaaaccaaatgcattttattattacatttttgtaacctaatttttgcaatacgaatattcattttggcgtactttagttcaaccttaaaagtgctttatggctttgctttattgggcatatggtctgggaaataaccaaattttgtaattttttgctgttttcatataccttttgcattctttaaaggcatatgatgctgcacttacgatgctagaagaggaccagccggtgcccgaagaaatcaaaattgttttaactgctctcgaacaaatttcacaaggggaagaagaagaagagtgacaaatttttaaaattgcttacagggatatgaaaaattttaaagaaaaaatgggaaattttttcatattttaccattatttcattaaatgtcttttaaatttttcccagcgggcttaacggaaccgcagtttaccttagtttttgaaaagattagcctcaaaattacaaaaatttgagatttttaggcgcaaaatcgctacaagtccctgttttttgcctcagcgcataagttttaaaataacactgaaaaaaaaatttttgacccgaaaagcaaaaaaaggtcttcgaattcccctctccgagatttttttttctggcttgggcttaatagattatacttatgtatgcctctttccaaactaaatccattttgtttccttgaattgttgaaaatattctccttttttcatatttttcgttgttcaactctccgggccgaaagttgtcgcatatttttaatgtattccttcttttcc

SEQ ID NO: 42123 - DNA, 914 bp, Heterodera glycines
gtatatttataattaaattcgcgccactagttgcagtttttataatttcgttaaaaaataatggaaggtgataaagagaccacggaattaccgaaaataattgacttattgtgacaaaaaattctgtaaactaaaaaggtgcctcccgcttgggtttcagtaaaattttaaagcaactgttgcaatgatctgcttcaaatgacttgtatttctcactcgatcatcaagcaatttgttggccgttagtttttgtgcagcaatgaaaatgccatcgggagctcgaattccaagacaagtcccagcctgaccaattgcttccattgcatattcaacttggtagagacggccttctggagagaagattgtcgtacgagtatcatagcgacgggccatcttaaaaagcttatacaattttaaaaattggattactaaaaataaccgggaagaataattaaattctcatccttttgtaaacttccttttgaaaaaacataacgccaaaatattataaaaaaagaaaagaacaaaacccggaatagacttttttgaggcactttcaaacaatgtcagatacaaacactcaactttattatataagataaaagcaacaatttatccaaaaatttcctcaaatgcatcgacgttacctcgcttacaatcctcgcgcaaaacaaacacataaataggagtccacatattttgaaaattgtttttcccttcaaaacaggaaagtaccaaaatgtttttgcgggacgagacccagtagcattaataggcatttaaaatttgcgggacccatgcaggattgctggattcttggaattttcgttaaaacaattcataaaattggggggttttattggtcacaatacttttttgcagccggcgcttatcaaaaaaaaaatttttttttt

SEQ ID NO: 42124 - DNA, 911 bp, Heterodera glycines
aaagtattttttataaataaaatactacaaaaatccgccattttttgctctattttataaattttattttagctttttatcacttttttgaaaaaagttatagaaataaaagtgattttggaatttgggaccacaggggtgtgtgtgaccatgatttttgagtggaaaatttttttcaccaaaaatcttccaaaaatatgattttaggggatatttgggccgctgatcacgaatatgcaatcatattttactttagacatggttaagagctcagaatccctgtgtgattggggattctgaggggtggggcggcatgttcggacccaggccgtgtttattattttttaatttattaaaaaacgggcgcgaagcgcccgtcctgaggccgcgaagcggccgaatttccccctaaaaattaaaagacgggcgcgaagcgccctcttgaggccgcgaagcggccgaatttccccctaaaaattaaaagacgggcgcgaagcgcccgtcttcgtcttgaggccgcgaagcggccgaattccccccaaaaattaaaaacctggcgcgaagcgcccgtttggccccacaaaattaaaaaacgggcgcgaagcgcccgtcttgaggccgcgaagcggccgaatgttcccccaaaaaattaaaaaacggacgcgaagcgcccgtcctgaggccgcgaagcggccgaattccccccaaaaaattaaaaaacggacgcgaagggcccgtcctgaggccgcgaagcggccgaattcccccaaaaaattaaaagacgggcgcgaagcgcccgtcctgaggccgcgaagcgggcgaattccccccaaaaaattaaaagacggacgccaagggcccgtcctgaggccgcgaagcggccgaatttcccccaaaaaattaaaaaacgg

SEQ ID NO: 42125 - DNA, 798 bp, Heterodera glycines
aatttatttaatctgtttttgaaaacttgaaaaaacatcggtcacttgaaaaaataaattctaaaattttgtccaggaaaatccaggttttttcctgttttgcctggacctggattttttttcacatttgacctggaccttgatttcctggacaaaaatccaggtccaggaaaaatccaggttgccgaaaaatggcttggacctggatccaggaaaaatccaggttgccgaaaaatggcttggacctggatccaggaaaaatccaggcctggatccaggtccaggtcgatctctacccctcatgctatccaaagtccatccccattgtgccagtatataagtccactcaatttccccctcgggggctgcgagatgtctgcggtgggtcagtctgtgccgttccttgcctttggcaatcctttcccaaataaccaattgcactgacccacccaaaatgctctgaggttgttgttgactcaactattcccggtttttaacatataattatttgtcaatgctttttccttaaataaattgctctctcttaaaatggtaatttgaaatggcttgaagccttaaacccggggacacaacacgttgcatatcggcatcgccagacccaaaaactcatttttttgtaataaatttgtataaaatcacaaaagatggacaatttttgggtaaattctggttacaaattacatttcaaattttcaaaattttcccaggaggcgcctatcggcaccgccggcctcccccttttcccaaagaattttgaaaaaattcgttgcaaaaaat

SEQ ID NO: 42126 - DNA, 994 bp, Heterodera glycines
tttagtaggcaaaatttgttattatattattttccgtgccaccatccattttttaaatttaaatatttatatattattttaattttaattccgggtaaaggtatatttctgtaaaattcaattttaaatttccaaattttatttgtttttaaatactaggaaacccaatattttaatactactttcttattaaattttttattttttactaaattatttgaaatttttatagaaacctcccgaatttattttttgctgggatttttaaaatttttacaggcctttctggctttttactaccctcgcggcttcattttaacacccaaaatttaaaaaaaaatttttaaatgctaaaaattatttttaattctaaaatagaaaaaaaatgtttcaattttcctcttaaactttcattgttctcatttccgaatttaatttgttatattgccccataaaattttacagcgcattaattgcccaattaacgcgctgcaaaattgcaagaaaattgatgagctgcgaatttgcgtgttgcgtgtgacttttattgacttcccactaattattaattaacaaattgactaattattattaatttgtttcgttgattggaatttttttttataaaatcatttcacttaacctaattaagggcattacgtcaattaaggagttggattatctctgttctttttaaaattgttcttcttattccgtcatgctccataaaaattgtcataattatgttttttttatgaaattagcaaagaaattaattactatttttcccaaggcattttcagtgtattttggtgccgtagggaaaaaataataatcattttcggcacttaattatatgttttaagaaaattttacctaaggccatttgggcgaaattgccccaggaaaaattgacaaattgaaggttcaaatttatgcttttccaaatgaaagaaattaaaaattaagactttggattttggattttttaaat

SEQ ID NO: 42127 - DNA, 927 bp, Heterodera glycines
cctgtactttaattctgcgttggatttttgctcccctcattgtttgagtaccccaaacggacacttgaaaaaatcgattcttttgttttcggggcagtccccccgagccgatgcgcccagatttatggggagaccgaatccttccggaatagcttccctatagcctgtactttaattctgcgttggatttttgctccccataattgtttgagtaccccaaacggacacttgaaaaaatcgatttttttgttttcggggcagtccccccgaaccgatgcgcccagatttatggggagaccgaatccttccggaatagcttccctatagcctgtactttaattctgcgttggatttttgctccccataattgtttgagtaccccaaacggacacttgaaaaaatcgatttttttgttttcggggcagtccccccgaaccgatgcgcccagatttatggggagaccgaatccttcgggaatagcttccctatagcctgtactttaattctgcgttggatttttgctccccataaatgtttgagtaccccaaacggacacttgaaaaaatcgatttttttgtttcataaatatttttttcagaaagtcatgcgcacccgtccgatctggcaagttaagcaacgattgctgactagccaaaaggttcggtgccgtgatgaaacgaaccagcactgcttaccccgcggcacccggcacggtcccccgaaggaatggatttaattgtattctctccttcggggatttttttccattaggtcgtccgatagcgttcgattgctctattcaatttttcaaaatttttgttgaaatatttgtctgctgggaccataatgcgggggcgggggcgaaggcccaccacgaggccgcgaagaggccgagtgagtaccttcggtgcaggaaaattattaagg

SEQ ID NO: 42128 - DNA, 829 bp, Heterodera glycines
gcatcgttatttttgcattttttaaatttaatttgctttcccttccttccctctaattgcttttttccctaattaattgcccctttttgccctcttcccttgcgcagttgtccatttggtcggcggtgtggcggggctcgccgccacgctttacctgcggccgcggcaggcgcggttcggcgagcgcggcaccgcgcacatgtcaaagtgaggcggacaaattttttttgaataaaatgaatttaaatttcaacgattttaatgcatttttgctatgcttttctttcagtccgaccaatgctttgctcggcactttcatgctctggtggggttggttggccttcaacaccggcaccacaatgggcgtggccaggggccgttggcgtctcgcggcgaggcaaaaaattaattcaaaaataataaatcactgaaaaatagagtgccacgggaccgggaccgggaccgcgccgggaattcccggtcatccgaggtcccggtcccgcgttccggtatggacgtgagtatgcactcccaatacacgaccacacgattcactcgggcccggatgtattccatccgctttgcgtcgcgctcccgaacctgccccgctgtctttccgtcgggcaacaacatgttatcgattggataacatttcttgcatccgtgccaaggacagccttaaaatattaattttttatggaataacaataataatcaataccgtgcacttcaattgcacgcccctctgcctcaatcccacccgtccagcgagtaggggccgatccgtttctctcctccgggagagaggccggcctgcactttccacacc

SEQ ID NO: 42129 - DNA, 942 bp, Heterodera glycines
tatatgcaaattagagccaaatccgacttttgtcggccatttatgcctccttttcgcattaatgtatatggccgcgatcctgtcaagtgagtcagaaggaataatacaaagacaatatgtgccaaattggcaatggcagcatttaaattataataaattttatattaaaaacgtttttatattttaatttttataaatgaatttgaaactaaatgaaaaagaacattgctaattttgtaaactgaaaaaaacattatttaaagcattcagagaaaaaaaaactaaaatttaaaattaaaaaaaaactgcctattttttaaacattaaaagcattaacggttcatttaatgagtttaaatcaaaaaactgctaattaaaataaaaattagaggcaattaatgttcgaattgcgtgaaatttttcaaaaattggtcggaaaatttaattgttttatgtaaatcaactttttttttcattttgaaaaaatctctgcctaaacaaacaaacgaaatgagaatgtatttgcagtattcattatgcttttgtgtttattaggctgccggcaccgctgctcttcattattagccccattaatgaaggacattaacactaatgaatggaaattttaccgtttttatgccattcatcccttttttttcttattctccctctcttctcatctcataatgcaacaaaaaaagaagcacgagcgaatgaaaaatgagcacttctcttcacccctcacacaaaaaagaagaagaagaaggaagaaaaagaagcacatcggattacaaaaaaggaaagcgcaaaaaaaaataatgagaaaaacaaacaaaacaaaaagaaaaaatcggaatttattttattttttcatctagctgaaaatgtaaaacaaaaacaaaaaaaaaaaattaaaaacaaaaaaattttcatgatgttttt

SEQ ID NO: 42130 - DNA, 1307 bp, Heterodera glycines
  unsure (1)..(1307): unsure at all n locations
tcagagactagtcaaaaaaaataataataggcttggactactatactaattagaaattttagaatgtgtctgttaaatgcaaaactgttgtgaaaaattgttataactcctttcagagaagagatagaaaaaaaataaaaatagggttagagagcccgtgaacagctgcatcggatgcaagtgccgccgttgctgtacgcctaacagttggtgagcaatgacggaaaattgcttaaaaaagaaaccaaacaaactcatcaattgttagctcccgttgacaaaccgaagggtacattggggcaatggatgttgggctaccgtatcagttattaaaatttttgtttttcaaaaaggatactaaaactgggataaccccattcagagactagtcaaaaaaaataataataggcttggactactatactaattagaaattttagaatgtgtctgttaaatgcaaaactgttgtgaaaaattgttataactcctttcagagaagagatagaaaaaaaataaaaatagggttagagagcccgtgaacagctgcatcggatgcaagtgccgccgttgctgtacgcctaacagttggtgagcaatgacggaaaattgcttaaaaaagaaaccaaacaaactcatcaattgttagctcccgttggcaaaccgaagggtacattggggcaatggatgttgggctaccgtatcagttattaaaatttttgtttttcaaaaaggatactaaaactgggataaccccattcagagactagtcaaaaaaaataataataggcttggactaccatactaattagaaattttagaatgtgtctgttaaatgcaaaactgttgtgaaaaattgttataactcctttcagagaagagatagaaaaatcaattgttagctcccgttggcaaaccgaagggtacattggggcaatggatgttgggctaccgtatcagttattaaaatttttgtttttcaaaaaggatactaaaactgggataaccccattcagagactagtcaaaaaaaataataataggcttggactaccatactaattagaaattttagaatgtgtctgttaaatgcaaaactgttgtgaaaaattgttataactcctttcagagaagagatagaaaaaaataaaaatagggttagagagcccgtgaacagctgcatcggatgcaagtgccgccgttgctgtacgcctaacagttggtgagcaatgacgngaaattgcttaaaaaagaaaccaaacaaactcatcaattgttagctcccgttgacaacccgaagggtacattggg

SEQ ID NO: 42131 - DNA, 1407 bp, Heterodera glycines
tttgaaaagaatgaataagaccaaaatgccataaaaaccccaccagaggcctagaataatgttttaatactttaatttaacctttagataacaaggtgacatttaaaaaaatattttttgaattttttatttaaaaaatatgtaaaaaaagtgggaaatatttaaaaatatgtaaataaaagaaccattcacaaacacctattcagagcacttagaaatcagaaaatataatatcttaatttacaacgcaaataattatttttcacaaaaagtttgttaaaaaaagcaaaattaataatttttttaaaaagttttaattggcttttacaaaaaattttagattattaaaaataatatttttaaaaattttattttacaatatttttcagaaaaaataattttaaatttagaatatattttaaaaaggtgatgttctcaggctgtttttttaataaaatatttgacttttttaaaaactttgttatttcacaaaataaatttttactttttttaaattttttattaaaataaaattttaacgtttgaaaattaaggaaattattttttcaaaacgatttttaggacaactttacagcacacatacgtataatccggtgaagtagccatccgagtcgcggaatgcgcggtacactttgtcccatccgcgcggtttgtatgccaacaattttccgagccgtttccatcgcgcaaattcttgcaatgtttgcaactagagaccggcgcgggacgggatcccgcgcgggattttgcgggatcccagtccgcaatcccgcattttttggaaaatgcgggatttgcgggatttgcgggattaatcccgcgggatcccgtcccccgcaaagaaattgagttccaatcccgcagcgggatccgcaaatttgattttttgtgcgggattatgcgggattttattgattttttgaaatttttctaagacagaatgccaaatatttttaaataaatttaattaaagttaactcatttttcatcgcaaatttcattcaaaatttgtgaaattttcccggcggcgcctatcggcaccgccggataggcttttacttaataatcctgtagaaattgagtcaaaaactgcgtcatttggtcaattttagacaaaatctgtaaacaaatcgcattaaatttcataaaattcctcgcagatgtcgataggcaccaggtatggcacggaaagacttccgatttccgacatttttggggtcggaattccgacttcccaaaatttttggggcctcggaatgccatccctgataaggaccgccggaccccctgttcctagttttttgaaaaattgcaccgcaaaaaagtgggttgaaaagaaaaaaatagataaatttatgaaccgttaataatttgatttccgatcaa

SEQ ID NO: 42132 - DNA, 808 bp, Heterodera glycines
caagtgtccgtttggggtactcaaacaattatggggagcaaaaatccaacgcagaattaaagtacaggctatagggaagctactcccgaaggattcggtctccccataaatctgggcgcatcggttcggggggactgccccgaaaacaaaaaaaatcgattttttcaagtgtccgtttggggtactcaaacaattatggggagcaaaaatccaacgcagaattaaagtacaggctatagggaagctactcccgaaggattcggtctccccataaatctgggcgcatcggttcggggggactgccccgaaaacaaaaaaatcgattttttcaagtgtccgtttggggtactcaaacaattatggggagcaaaaatccaacgcagaattaaagtacaggctatagggaagctactcccgaaggattcggtctccccataaatctgggcgcatcggttcggggggactgccccgaaaacaaaaaaatctattttttcaagtgtccgtttggggtactcgatacatttatggggagcaaaaatccaacgcagaattaaagtaaaggctatagtgaagctattccggaaggattcggtctccccataaatctgggcgcatcggttcagggggactgccccgaaaacccaaaaaaaaattttttggataaaaattatttaaatgaactgactagataatatttaaaataggttatttctcttcctttcagtatccctgcaaagtttggtgcgcttctgatcagtttctcaaaaaagagttaagcctaaactttttggcctgtttaaaaaggaat

SEQ ID NO: 42133 - DNA, 1181 bp, Heterodera glycines
  unsure (1)..(1181): unsure at all n locations
agacaaaagaaaagacaaaaccagaaacatgaccagaaaaacaaccataaagttaccaatacaaaacaaatgagacgaaaccatgttcagttaatttctggttttccacagtcgttctgattagacaaaagaaaagagccaaaccagaaactgttcagtttaatttctggttttccaccgttgttctggttagaaaaataatgagcctaaccagaaactgttcagtttaatttctggttttccaccgttgttatgattagacaaaagaaatgagccaaaaccagaaacatgaccagaaaaacaaccataaagttaccaatactaaacaaatgagacgaaaccatgttcagtttaatttctggttttccacagttgttctgattagacaaaagaaatgagccaaaccagaaactgttcaatttaatttctggttttccaccgttgttctggttaacaaagaaatgagccgaaccagaaactgttcagtttaatttctggttttccaccgttgttctggttagaaaaataatgagcctaaccagaaactgttcagtttaatttctggttttccaccgttgttatgattagacaaaagaaatgagccaaaaccagaaacatgaccagaaaaacaaccataaagttaccaatacaaaacaaatgagacgaaaccatgttcagtttaatttctgggtttccacagttgttctgattagacaaaagaaatgagccaaaccagaaactgttcagtttaatttctggttttccaccgttgttctggttagaaaaataatgagcctaaccagaaactgttcagtttaatttctggttttccaccgttgttatgattagacaaaagaaatgagccaaaaccagaaacatgaccagaaaaacaaccataaagttaccaatacaaaacaaatgagacgaaaccatgttcagtttaatttctgggtttccacagttgttctgattagacaaaagaaatgagccaaaccagaaactgttcagtttaatttctggtntccaccgttgttctggttagacaaagaatgagcctaaaccagaaactgttcagttttaatttctggttttccacagttgttatgattagacaaaagaaaagacaaaaccagaaacatgaccagaaaaacaaccataaagttaccaatactaaacaaatg

SEQ ID NO: 42134 - DNA, 1630 bp, Heterodera glycines
  unsure (1)..(1630): unsure at all n locations
ccggaatagcttcactatagcctgtactttaattctgcgttggatttttgctccccataattgtttgagtaccccaaacggacacttgaaaaaatcgatttatttttgttttcggggcagtccccccgaaccgatgcgcccagatttatggggagaccgaatccttcgggaatagcttccctatagcctgtactttaattctgcgttggatttttgctccccataattgtttgagtaccccaaacggacacttgaaaaaatcgatttttttgttttcggggcagtccccccgaaccgatgcgcccagatttatggggagaccgaatccttcgggaatagcttccctatagcctgtactttaattctgcgttggatttttactccccataattgtttgagtaccccaaacggacacttgaaaaaatcgatttttttgttttcggggcagtccccccgagccgatgcgcccagatttatggggagaccgaatccttccggaatagcttccctatagcctgtactttaattctgcgttggatttttgctccacataattgtttgagtaccccaaacggacacttgaaaaaatcgatttttttgttttcggggcagtccccccgaaccgatgcgcccagatttatggggagaccgaatccttccggaatagcttccctatagcctgtactttaattctgcgttggatttttgctccccataattgtttgagtaccccaaacggacacttgaaaaaatcgatttttttgttttcggggcagtccccccgaaccgatgcgcccagatttatggggagaccgaatccttcgggaatagcttccctatagcctgtactttaattctgcngtggatttttgctccccataaatgtttgagtaccccaaacggacacttgaaaaatcgatttttttggtttcataaatatttttttcagaaagtcatgcgcacccgtccgatctggcaagttaagcaacgattgctgactagccaaaaggtttggtgccgtgatgaaacgaaccagcactgcttaccccgcggcacccggcacggtcccccgaaggaatggatttaattaaattctctccttcggggatttttttccattaggtcgtccgttagcgttcgattgctctagtcaatttttcaaaatttttgttgaaatatttgtcgtgctctgaagggcgtgggaggggggggggggggcgaaggcccaccacgaggccgcgaagaggccgagtgagtaccttcggtgcaggaaaattattaaattttaaaaattttttaattgctttttaaatatgccaaaaaatgtaggcttaacttttttagtgaaaattcgatcactcatattttttgctaattgagcagaagcgtaccaaactttgcagggatactccccggtaaaggactaacttacactgaaatgagcgccgagctagctggctcaaaaaaattttcgaaaatctgagtctttcgtttttatttgttttttgcataattaattcataaatatttttttcagaaaatgctctgaaacgcaccaaattttatttacatgctagtttaggcactctgatgctttttctatcaaaaagggagatgaataaatttttaa

SEQ ID NO: 42135 - DNA, 927 bp, Heterodera glycines
  unsure (1)..(927): unsure at all n locations
tctatgccagaaaaatggttatctcttttttgtgagaaaattttgtaccataaaaatgttcccagcatgggcagaggggcgcggagagcaatggccattctattctacagggaatttttaaatttattctctatgccagaaaaatggttatctcttttttgcgagaaattttgtaccatacaaatgttcccagcatgggcagaggggcgcggagagcaatggccattctattctacagggaatttttaaatttattctctatgccagaaaaatggttatctcttttttgtgagaaattttgtaccatacaaatgttcccagcatgggcagaggggcgcggagagcaatggccattctattctacagggaatttttaaatttattctctatgccagaaaaatggttatctcttttttgtgagaaattttgtaccatacaaatgttcccagcatgggcagaggggcgcggagagcaatggccattctattctacagggaatttttaaatttattctctatgccagaaaaatggttatctcttttttgcgagaaattttgtaccatacaaatgttcccagcatgggcagaggggcgcggagagcaatggccattctattctacagggaatttttaaatttattctctatgccagaaaaatggttatctcttttttgtgagaaattttgtaccatacaaatgttcccagcatgggcagaggggcgcggagagcaatggccattctattctacagggaatttttatatttattctctatgccagaaaaatggttatctcttttttgtgagaaattttgtaccatacaaatgttcccagcatgggcagaggggcgcggagagcaatggccattctattctacagggaatttttanatttattctctatgccagaaaaatgggtatctcttttt

SEQ ID NO: 42136 - DNA, 1364 bp, Heterodera glycines
  unsure (1)..(1364): unsure at all n locations
tttggctagtcagcaatcgttgcttaacttgccagatcggacgggtgcgcatgattccactgttccaagcaccccaccaaaagcaaaacgatataaccaaaatataaggaaaaattttttaaaaaattttttctccatcttcctttttgatactaaagcatcagagtgctaaaattaagttgtaaataaaatttggtgcgctttagagcactttctgaaaaaaatatttatgaaacaaaaaaatcgattttttcaagtgtccgtttggggtactcaaacatttatggggagcaaaaatccaacgcagaattaaagtacaggctatagggaagctactcccgaaggattcggtctccccataaatctgggcgcatcggttcggggggactgccccgaaaacaaaaaaatcgattttttcaagtgtccgtttggggtactcaaacatttatggggagcaaaaatccaacgcagaattaaagtacagactatagggaagctattcccgaaggattcggtctccccataaatctgggcgcatcggttcggggggactgccccgaaaacaaaaaaatcgattttttcaagtgtccgtttggggtactcaaacatttatggggagcaaaaatccaacgcagaattaaagtacagactatagggaagctattcccgaaggattcggtctccccataaatctgggcgcatcggttcagggggactgccccgaaaacccaaaaaaaaattttttggataaaaattatttanatgaactgactagataatatttaaaataggttatntctcttcctttcagtatccctgncaagtttggtgcgcttctgatcagtttctgaaaaaaaagttaagcctaaactttttgggcctgttaaaaaggaattaaaaatttttaaaaattttatcatctccctttttgatagaaaaagcatcagagtgcctaaactaacatgtaaaataaatttggtgcgtttcagaccctttctgaaaaaattattaggaataattttgcaaaaattaaataaaacgaagactcagatgtcagaaaattttttgagccagctagctcgacgctcatttcagtgtaagttagtccttaaccggggagtatccctgcaaaagtttggtacgcttctgctcaattagcaaaaaatatgagtgatcgaattttcactaaaaagttaagcctaaactttttggcctgtttaaaaaggaattaaaaatttttaaaaattttattcatctccctttttgatagaaaaagcatcagagtgcctaaactaacatgtaaataaaatttggtgcgtaaggagaaccctttctgaaaaaatatgtaagagggggtcgtagcg

SEQ ID NO: 42137 - DNA, 822 bp, Heterodera glycines
ctttcctatcgacaaaatatgattactcataggtttattttaattgtcacattttttttaaatgaaaatccgtacaaattgttgagcctattaatcccgaaaaccagccttttttgttgaaaatctgttaacaaattacactcaaattttcaaaattcctccggcggtgccgataggcgcagccggacccccttcttcaccaaaagttttttggaaaaagcgcgccgaaaaaatttatgtgaaacgtaaatctgaatttctaataatattcgatcacttagtccaaaaatgattaactcaataaattctgtccatcatttatggtcaaatttatttaagttataatttaattaacaatattagtaataaatattttttttatttaatagcacatttgaagagtgagttttttttctccctcatgattttgttaattttaaaaattatttttttttcattttttgtttgaaaacaattaaagctttcggtttttgggtttgcttatttttatctcatgtagtccacgtttttttcctttttcttcgtacacctaatctatttgtatttaaataaatatttttaaatattgaataaattaaaattggatttttatttattaatttaaaaattgtttttttccattaattttaattgcttgataaaagtaaaaataaattatttataattcactatgtttattaaagttttacatttcaaatatttatttgtttagagggatataaagacaattttggtaaatttattaaaagttcaattttctaaataaagtttcacttattatttttaataattgtttgtata

SEQ ID NO: 42138 - DNA, 1050 bp, Heterodera glycines
ttctgtactgtttgtgttgtggagggcgcattttgttgctttattgcctgggtgagcttttcgaaaatatcggcgagagttttgtccatcttgattgacgatttgaaattgttgacgaattaaaaccacagatagtggaaccgcaaccgcataggtatcttggttttttgatgattccgcgaaatttaaaaatcagcacgagatttctaaatttcccaaaacaagcaattcaacacgagaattgcttgaaaattgatgagttcgggcgtcgccaatgttgtgcgtttagggtcacaaataatttgaagtcgaacacaagatatttattaaaacaacaataaaataaaatgcagaatttggagaataatttggggtcaataaatttagcggagcacaatatttaggcgagtgcagaggagggtgtacggacatttcgcctactcgacatctcgcctaccgacatctcgcctaatagccaaaaacattcatttcgcctactaagccaaattgtacaagattggatagattttagctttttctacataaagaattttttctatgtttttttaaaatagaatttacaaaaattggcaaaaaacttagaaatccgtggcctgctaatggcttcagctgatgccaccccgtatttatgcagtccatctggcattgtacaagattggatagattttagctttttctacataaagaattttttctatgtttttttaaatagaatttacaaaaattggcaaaaaacttagaaatccgtggcctgctaatggcttcagctgatgccaccccgtatttatgcagtccatctggcattgtacaagattggatagattttagctttttctacataaagaattttttctatgtttttttaaatagaatttacaaaaattggcaaaaaacttagaaatccgtggcctgctaatggcttctgcttatgccaccccgtatttatgcagtccatctggcattgtttgacattcattttgacgttgattatgccaacccttagacacatgaggagtttatcttgctgaa

SEQ ID NO: 42139 - DNA, 1245 bp, Heterodera glycines
  unsure (1)..(1245): unsure at all n locations
aaaataaaaatgataaatcatttgatcatttttagcgcactttaagcaccgcgtttagcnagcgcagttccaaaattatttccatgccacagatattatgggcaggacacgccaagtacctcaaacttgggtaattaaaccgaagaaagaagtgcagtggggaagaatgacgcctaaaatgaaggaaatattcgatgctgtgcgaactctttgtgacccctctctgactctgccaatgcagcagttgaccatttttaccactatttttctctcactcatcgtctgctcgtctctcctttattataagctattttcctaagccaacgcccttttctccctcttttctgttagtcatttctcattggtgttgacgatccaacattcagtgtacaaatttgttaaacctgtcaacattttaaatcaaaatcctaataaaaatttcgttgaatttctccgcctcttatttgtgcaaaattttcgaaaaagtaattttctatttaaaattaaaaaattcagaagcaaattcaagaatttttttatttttaaatgcattttttaccacatgaattatgattaaatttttgcgtttcgaattcattttggaattaagaaaaataaaaattgataatcatttgatcatttttagcgcactttaagcaccgccgttaggcagcgcagttccaaaatttattccatgccacagatattatgggcaggacacgccaagtacctcaaacttgggtaattaaaccgaagaaagaagtgcagtggggaagaatgacgcccaaaatgaaggaaatattcgatgctgtgcgaactctttgtgacccctctctgactctgccaatgcagcagttgaccatttttaccactatttttctctcactcatcgtctgctcgtctctcctttattataagctattttcctaagccaacgcccttttctccctcttttctgttagtcatttctcattggtgttgacgatccaacattcagagtacaaatttgttaaacctctcaacattttaaagtcaaatcctaataaaaatttcgttgaatttctccgcctcttatttgtgcaaaattcttctagaaagtaattttctatttaacactaaaaaattcagaagcaaattcaagaattttttttattgttaaatgcattttttaccacatgaattatgattaaatttttgcgtgtcgaattcattttggaattatgnaaataaaaatgataatcattt

SEQ ID NO: 42140 - DNA, 1093 bp, Heterodera glycines
attttctggaaataagcttaatagggcctagttaagctgtaaaaaaaatttggagcgatttgaatgagaatagaaagagccaggttcgatgaagttttggtaagccaaaaaaaaatccaaacatttaaaaatctataaaaaatttaaaaatgagaattcatgcgagattttctggaaataagcttaatatggcctagttaagctgtaaaaaaaatttggggcgatttgaatgagaatagaaagagccaggttcgatgaagttttggtaagccaaaaaaaaatccaaacatttaaatttataaaaaatttaaaaatgagaattcatgcgagattttctggaaataagcttaatagggcctagttaagctgtaaaaaaaatttggagcgatttgaatgagaatagaaagagccaggttcgatgaagttttggtaagccaaaaaaaatccaaacatttaaaaatctataaaaaatttaaaaatgagaattcatgcgagattttctggaaataagcttaatagggcctagttaagctgtaaaaaaatttggggcgatttgaatgagaatagaaagagccaggttcgatgaagttttggtaagccaaaaaaaaatccaaacattttttataaaaaatttaaaaatgagaattcatgcgagattttctggaaataagcttaatatggcctagttaagctgtaaaaaaaatttggggcgatttgaatgagaatagaaagagccaggttcgatgaagttttggtaagccaaaaaaaaatccaaacatttaaaaatctataaaaaatttaaaaatgagaattcatgcgagattttctggaaataagcttaatagggcctagttaagctgtaaaaaaatttggggcgatttgaatgagaatagaaagagccaggttcgatgaagttttggtaagccaaaaaaaaatccaaacattttttataaaaaatttaaaaatgagaattcatgcgagattttctggaaagaagcttaatatggcctagttaagctgtaaaaaaaatttggggcgatttgaatgagaatagaaagagccaggttcgatgaagttttggaagccaaaaaaa

SEQ ID NO: 42141 - DNA, 1057 bp, Heterodera glycines
  unsure (1)..(1057): unsure at all n locations
ttaaaaaactgaacaaaaaattgttcttatgcgggccggtccgggttccggatcaggcacttttggtgcctgaaagtggtgcgataggcttccggaaaatgaccaatcaattttttgtggatcgactgcgttttttgtggatcgcccacactgagttttttgtggatcgcccacactgagttttttgtggatcgcccacactgagttttttgtggatcgcccacactgagttttttgtggatcgcccacactgagttttttgtggatcgcccacactgagtttttttgtgcatcgactcagcacgtttttaattgacaatgccctccgtcgacgactttctttcctaatgattaactttatttaatgattttatttttttaataacaaaaatatttattttttccaattaaaagaaaacttttaatttttaatgtaactaaacgtggtggtaaaattgccgagtgcgggttatttagccaaaatgcaaataattaataaatcttggagagaatttttaagaaaaaattcatgtacaaactataattattttaataagaaaagttgttttattttactgtcgataaataatcattttaatattatttaccaaaacacatttcaaaaattactttattcttatttaaatttaatattgattaatcctttttttaggtttgcggtttttgaaatttataaaattctaggattattaagatgacaaatttaaatgtataagtgatacaataattctttattaaaagtttaattataaattgatattataggaaaatatcatagtaatccacttctttaggctttatttatgttgttttgatccccatcataagcattatgcaaataaataatacttcattcgtttctttttaattaaaataattatattgcaaagaattttatttttacatttataattttattgatatattgaattttanattattatttccttccngtcttaataaactacagtagcgtttgtttctttgatgaagaaacatagtattgtaattntttattgctacagatttctacctt

SEQ ID NO: 42142 - DNA, 1508 bp, Heterodera glycines
ggaggaggaaggaaaccctcgtcctggaggcctcgacgttctccaaacggatgacgcgcctcacttgacttgccccttctttattccggcatcggcacaacggagggggggaattaagtcgattgaccatcacttaccgaaaagcgaatttgctcttggaaacaaacaaatttcgaattaatatgtatacataaaagatatttataatttttaaaaaggactcgaaaatgaaccctttttagtgacaaaaacctaaacaaaaattttttgaactgggactcatgagtgtagatagatttaccagcatttatgggcttggccttttacatacataaatggttataaaagattgatgggaaagacattgatgaagcacaaaaactgctttcccgctaataaatttggttaaccaaaatttggacttaaaggacgacgaaggacacaccacagacaaagatggggcacaaattggatgatttgggggtgcgcaatggccaaattggcacataaattgcgttctctgtcctaaaattggttaagcaaaacaacgcgacttacaattagagggaccaaaaaggggaagggaggggagatgaaagaaatacataaataaatggtgggaatgagagagaacattggcaaaggacaaacaaaaaaggaattaacaaagtttgtcattaaaaacgaaaattaaataaagagaagaaaaagggcacagaattttgtttgtggcacatccatcacattcttccttttgtggtaaaaaaaaaagggaagaagcgacggacgggcagcaaagttaattaatttggctcaaaaagctatggaagcacagcaaaatgaaattgaaaatttactatttcaaacatccatcaatgtaaaaaataaaatcactgacattttcaagaaaaaaaaataataagaaaattttaaaaaacaaaatgccaaagatatataattggaaattaaaaaaaaagttgtttgtttaattttaccgtttatctgagcctggtcattgatgcggtaatttaggtaattaatttagaaaatattcgattgaaaagaatgagagagaaattccatttttgcattatttattcataaagggcgatttgatgaatcatttggcggatgatttgcatgtcattcacaatgcagcaggacagcgacaggaatcattttctgctgtccttttaattacatttgatatttgagaatgaaaatattggggaaggggtcggcggaaagaccgagggaggagggggggggggggtgcattacgcttcagcaagtcacgaattaattaatcattggttattagagctaaacaaagattggaaatatctttcaaaacttttctctctctaagatttggattaaaaggcaaagctttgccatttgaccaaaagtaaatccaatttttccattcatttatttcccaaacaaattctctcccattcccccaaatgttcgccttctccaccttcccctccctaatctgggccatt

SEQ ID NO: 42143 - DNA, 1146 bp, Heterodera glycines
ttttcgaaaatctgagtctttcgtttttatttatttttgcaaaattaattcttaaatatttttcagaaagggttctgaaacgcaccagattttatttacatgttagtttaggcactctgatgctttttctatcaaaaagggagatgaataaaatttttaaaaatttttaattcctttttaaacaggccaaaaagtttaggcttaacttttttttcagaaactgatcagaagcgcaccaaactttgcagggatactgaaaggaagagaaataacctattttaaatattatctagtcagttcatttaaataatttttatccaaaaaatttttttttgggttttcggggcagtccccctgaaccgatgcgcccagatttatggggagaccgaatccttcgggaatagcttccctatagtctgtactttaattctgcgttggagttttgctccccataaatgtttgagtatcccaaacggacacttgaaaaaatcgatttttttgttttcggggcagtccccccgaaccgatgcgcccagatttatggggagaccgaatccttccggaatagcttccctatagcctgtactttaattctgcgttggatttttgctccccataattgtttgagtaccccaaacggacacttgaaaaaatcgatttttttgttttcggggcagtccccccgaaccgatgcgcccagatttatggggagaccgaatccttccggaatagcttccctatagcctgtactttaattctgcgttggatttttgctccccataattgtttgagtaccccaaacggacacttgaaaaaatcgatttttttgttttcggggcagtccccccgaaccgatgcgcccagatttatggggagaccgaatccttcgggaatagcttccctatagcctgtactttaattctgcgttggatttttgctccccataaatgtttgagtaccccaaacggacacttgaaaaaatcgatttttttgtttcataaatatttttttcagaaagtgctctaaagcgcaccaaattttatttacaacttaattttagcactctgatgctttagtatcaaaaaggaagatgcagaaaaaattttttaaaaaatttttccttatatttttgttatatcgttttgc

SEQ ID NO: 42144 - DNA, 867 bp, Heterodera glycines
ggctttttaatgtttttagcttaaattctttccctggcaaaatgtgccaattaaacatttggtgatcaatggctgctgttttctctccacagatgaattggattacttcttttcttctcacgaatcggtcaatgaaatgaaaaagtgtgtattttgaataagaattcaaaataaattttaaaaaatcgaaggtaattaaaacacagaaaagttttttctagaaaaaattttgaatttaggtggaaacatttgtaattttgacgaattgtgttttcatttatataaaataaatagggttgtcaaaaaaaaaaaatttttttttaaattaaataatttaatttacaattgaaaaatagctaaaatttttttttttttgattaagttttttgttgttttgctacctaaaaaggttaataataataataaaaaaatttttgccttttttagtgcctattcgaggatttttgtgcctatttaatgcctattttgcgattttttgtgcctaaaaaacgcacccctaaaaataaaattaataaaattggccattttatttatgctcgaacatgaaaggtacgggctcgcatgcgttgacagcttaagagtgatcgagtcacgtttaaagccgcttaatttgtccgaacttgagctgagcgcattgaacggaattcaactatggaattgcagtaagtccggcacaaaaagctggcattttgccaaaaattttaattttctattgtttttttatttgttatttttgctacaatatttatcgtctttctttcattagttgagcgtttttgtgcattgtctgatcaacaaaaagcgcatcggaatacatttttttgtggaattacacgcaatggccgc

SEQ ID NO: 42145 - DNA, 942 bp, Heterodera glycines
ggtaaattagatataattaataaatagagtaccagcaagttttatcagaatatgtcaggcagcgtggaagatagtcttgttgtgtcttggccaatagaaggtgaaagaacaaactgtttttagcataaattgcaaaatccaggatgctgaacaccgcaactaatgagttggcacttaccattattgtcagacaatcttaaatatattttttaaattgattatataaatttaaattacattttttcaagtttgtcagcatgcatgtccatgtcttgtgcagtttttgtgcaataacagccacactcaaataatccataaccaatattttttttacagcatgagcatttaattatagtattttttttgcatctttggttggggcatcgtttaaactgtccaccagaaaccctgaatttaaatatattgtaaataataatttaatatttttaatatttttggtttatcattgtcaaaattactctattctttaattatataatttatatttttaccatttagcatattcttcttcccagtgacatttatgtccacagttaaggatggaataccccatttctttggacacgttatttttgcattttggcgctaagcagcataaatcgctcgtttcaattgttccatctttctttcgccgtagatttgagcgacctataattttttaataaaatgttttgaattattttgtaacgaataaatttagttatatcataaataaagattttttttcctatttttttattagatattttttattaaatatttttattacttcttatatctatgcctaaatcgttagcagtatcttgtgtcatttcatcaaatgcactcttttcagtagggtcataatcctcaggctcggataacaattcatcattaattggtgagagagcatcaactataaattattggattaattttaaa

SEQ ID NO: 42146 - DNA, 1042 bp, Heterodera glycines
taaatgaatttaatcttgttgccttttatgttagtaattttttatttgaactttttctttatacattaaacatatttaaaattaattgaaagctttcattctgattaccaaatattaatttttggttttactattattacaagccaaaattaatgcatgcccatcgctgtaaatgtgatgtagtgtataaattggaatgcctttgtgaaaaaagtggatcaacaaaaaatccattaggcataagttaatgagtgatccattgaaaaatcagtgtagctcatagaaattattaaataaataatgataagaaatttaataggttattttagcaatttttgagataaaaaaattatttttgcagctttggtatcaaggttattataacaaatattttgattaggttttatttttgttattgtgtagttttgaagttgcgtgcttgattagaaaaacagaattataataatatttgtataatgttaatgttatataaaatacttttttgatatttatatttccgatcaatttatgtttaattttctttaaattaaaaacttcaaatttgaatatatgcataaattcggttctaatttttttattaaatctaaaattaacttttcaatcaacaaacatttaatattaattttattatgatatatctatttatgctaatgttattttaaccatttaacatctattttaaatgatttattattattttttattaaatgaaaaatatttggtatttatttttttacccagaacagttgatataaatacttaagaggcatgatgaaaaaatattaaaaagaaataaaataatttactcccagaataaaacttgcagaaataattgtgattatgtaaacaaatattagcaaataatttaagaaagtcaaaatattaagtaaaaataataacaaaatataaacattaaaataaattctcataaaaatatatgatttgtttattgtggaattattttattctcaataaagaaaatattaaagaagatataaaattatatattaaaagagcagaa

SEQ ID NO: 42147 - DNA, 674 bp, Heterodera glycines
  unsure (1)..(674): unsure at all n locations
aacatgtaaataaaatttgggtgcgtttcagaacccttttctgaaaaaatatttaagaattaattttgcaaaaaataaataaaaacgaaagactcagattttcgaaaaattttttagagcaagctagctcggcgctcatttcagtgtaagttagtcctttaccggggagtatccctgcaaagtttggtatgcttctgctcaattagcaaaaaatatgagtgatcaaactttcactaaaaagttaagcctaaattttttggcatatttaaaaagcaattaaaaaatttttaaaattttattcacctccattattgatagaaaaagcatcagagagccttattaacttgtaaataaaatttggtgcgtttcagaaccctttctgaaaaaatatttatgaattaattttgcaaaaaataaataaaaacgaaagactcagattttcgaaaattttttttgagccagctagctcggcgctcatttcagtgtaagttagtcctttaccggggagtatccctgcatagtttggtacgcttctgctcaattagcaaaaaatatgagtgatcgaattttcactanaaaagttaagcctacattttttggcatatttaaaaagcaattaaaaaattttaaaatttaataattttcctgcaccgaaggtactcactcggcctctt

SEQ ID NO: 42148 - DNA, 695 bp, Heterodera glycines
aaaacgaattctgactgagaattaattattttcatacctttggctgggctatttttattaaatttatttattttcgggcataaagaaggtttctatgccgctttgatggattttatagaaatcacccataaaaaagaattatgatgtggcaattttaaattttttctttagttgtatttttatcggtgttttttctaccagtagttttttctttattttttaaaattcaaatcgagggaatcatttcggtattttttgtttaaataaaacatacaatacgaaattcagcatttcagtcttaatctggtcgataatttcataattaatttattatttttattaatcttcagtttaatctttttaaaatggaataattcgtaattctcaagtaaaaacgaattctgactgagaattaattattttcatacctttggctgggctatttttattaaatttatttattttcgggcataaagaaggtttctatgccgctttgatggattttatagaaatcacccataaaaaagaattatgatgtggcaattttaaattttttctttagttgtatttttatcggtgtttttctaccagtagttttttctttatttttttaaatccaaatcgagggaatcatttcggtattttttgcttaaataaaacatacaatacgaaattcagcatttcagtcttaatct

SEQ ID NO: 42149 - DNA, 1211 bp, Heterodera glycines
tttagaggctcaaattgtttcgctaagcgagaaggtaacaaacttagaggaacaaagaaatgactggccttcggatgacgaaagtgtagactcaactgacttaggcggaaaaccaaaaaaaagtggcaataaccaaaacacctcactggtaatggttgaaccgtttgcggtaaatgatcctgttgaacaaatacgagagcgtctggtagaagagtttcttgaccgtttgaagcctaatattaattgtgtcatacatcaatctaaaaagatagaaaaatttaattatattttcaaaatgatgtacaagtattttatataatgaagaaattagtaaaatagtttgactattatgtttgaaataataagttaagaacaaaagacaaaaaaacatttaacatttatttaaaagatttgacaaaataaagctcaaagaattgactgcaaaagttaaattacataaatgtttgactcttttaaataaaaacctacgaaaaatgctttattaaaatgataattttgaaacgatttcaaatgagcacttaaactaaagaaataattaaattgtacatatctattcttttattaaaatgtctaataaagaatttaaattcaaagtcaaacaaaaaaactaaaataataaaattttatcaatcaatgaatatataaaaaccagttggtaaatgtagcaaaacattattttcatcaaaaaacttaaatcaaataaaaagttgacgaaagtaatttaaaaataaattaccacaaaatagaagctaagatatggcaaaaataattgcgtatcagttcaagggaagtaagtaattcagaagaaattttcaaaactctcaagaagaaatacgcaaaaagaaattctggtatttcttttccttatgctaatttttatgcaaaattagaagcagttcttataacaatgaacagagttacaaaccacacaacataatacaaattttttttctatttattcatagagataacttgattaagtttaaaaagtatatttttatcataataaaaattgctctcttaaaatgaaattaaatacaacgaaataaaagaataaagaagaaaatgaagaaccgtccgtctcgtgagatgttataataattttaaataattcatatatattaaccgtggttatcgttgggcacgcccggttcgaattttactcaaataatataaaatttacaatgaaa

SEQ ID NO: 42150 - DNA, 932 bp, Heterodera glycines
ttaatttttttattaccctaatgccatatttgttttgtcatttaaaaaataaaataaatgaaaatatttttaactaaattattttatagtagcaatgcaaatctctcaaaggactttttttacaattgaataaaattaaaatttaatcttttaattgtttaattttttaattatttactttttttttaataaaagcttgtttattataataaatttcatatttttcataattatttattattttatatttttaagagtgttttggttctatatttttctatatctcatgttcagatggtcattccgaactgatcattcaagcggaaattgctaaaattatatgatatattttataaatgcatttaatagtttattagtgaattaaataattttaataatttttttaatattgaccagtacatcttttgacgaccaactcagataccatgaagaaaaagtgcacaagcatctttattcctttcatttttattaatttgcgttttgttataataattttcaaaattgtctataaattcattcttatcattttatttttgagaattgattaataattttgttttaatgtatgaaattttatgtacaacataaacattgggttttaaaatcaatgaatgatttttttacaatattttaaataaaagtttcttttcttgtgttttcatgttcatatattttaaacacagcatttttttatttaaatttttgaatatttataaacgagaaatttataaaattataattgatagaccacaaatagtgtgaaagaaagagagagagagagagagaaaaaagaaagagagaaagggggaaatgggtgaatccccaacaaaaaaaactagggttcggaccccctggtcgggggtggcttttcgcggaggcgggggatggcgggggtcagagtctcgggggcg

SEQ ID NO: 42151 - DNA, 669 bp, Heterodera glycines
  unsure (1)..(669): unsure at all n locations
gacacatggcaaaatgactttaagggcaaattggcaaaatgtggggggggggggaagggaaagtgccaagggcaattggtggcacacggacccacctgcaatttgcactccaactcgttgagcattgtctcgcggaaatactgcgcaaccatttcgtatccctccgtcccatccgccaaattggctaccgtagcgatttccaccgtaatctgaaggaacgccgcgtcgcccacttcagtactgaattgggcagcggtcaaaaaggcggaatctttgggaattctgaacctttggaagaaagtcgtttcggtgaaatttccaccgacggccccaaaaagcgaaggcacacgcgcgaaaatgccatgtttgtgggggttggtgttgctgtgaagcatcacaaagggcgaaaagttgaaacggacccgcgggcgaaggcgccgttcccacgcgattttgcctaaacaccggcggattggccaaagcgaatacaatcaaagattaattagcaaagtggccaaaacgacaaagcagaggtccgttccttcgaattcgaatcgcaaagatggattttgtccccggcggaaaatgcgtcagtgaaagaaaattatttaaatatnaaataactntctacagcattaatttatagaggaactacgttttgaattcatc

SEQ ID NO: 42152 - DNA, 954 bp, Heterodera glycines
ttattccgtaaatggggttggaattgtctagagtgttgagctgaaaaagagataggcgtttttccaaaattttcacaatcaaactcgcccagaaagaaattccggaaaaattagggttggcgctatcattccgtaaatggggttggaattgtctagagtgttgagcagaaaaagagataggcgtttttccaaaattttcacaatcaaactcgcccagaaagaaattccggaaaaattagggttggcgctattattccgtaaatggggttggaattgtctagagtgttgagcagaaaaagagataggcgtttttccaaaattttcacaatcaaactcgcccagaaagaaattccggaaaaattagggttggcgctattattccgtaaatggggttggaattgtctagagtgttgagcagaaaaagagataggcgtttttccaaaattttcaaaatcaaactcgcccagaaagaaattccgttccggaaaaattagggttggcgctatcattccgtaaatggggttggaattgtctagagtgttgagcagaaaaagagataggcgtttttccaaaattttcacaatcaaactcgcccagaaagaaattccggaaaaattagggttggcgctattattccgtaaatggggttggaattgtctagagtgttgagcagaaaaagagataggcgtttttccaaaattttcacaatcaaactcgcccagaaagaaattccggaaaaattagggttggcgctattattccgtaaatggggttggaattgtctagagtgttgagcagaaaaagagataggcgtttttccaaaattttcacaatcaaactcgcccagaaagaaattccggaaaaatagggttggcgctatcattccgtacatgggggttggaattgtctagagtgttgagcagaaaaagagataagcgtttttccaaattttca

SEQ ID NO: 42153 - DNA, 936 bp, Heterodera glycines
acaattagtatcgtcgtaattattctgagaatgcagttggaatacctattactgtggagcagaaaaagagatagccaatattccaaatttttctcaaacaaccgcgcagagaagcaaattccagaacaattagtatcggcgtaattattctgagaatgcggttggaattcctattactgttgagcagaaaaagagatagccaattttccaaatttttcccaaacaaacgcgcagagaaacaaattccagaacaattagtatcggcgtaattattctgagaatgcggttggaattcctattactgttgagcagaaaaagagatagccaattttccaaatttttcccaaacaaacgcgccgagaaacaaattccagaacaattagtatcggcgtaattattctgagaatgcggttggaattcctattactgttgagcagaaaaagagatagccaattttccaaatttttcccaaacaaacgcgccgagaaacaaattccagaacaattagtatcggcgtaattattctgagaatgcggttggaattcctattactgttgagcagaaaaagagatagccaattttccaaatttttcccaaacaaacgcgccgagaaacaaattccagaacaattagtatcggcgtaattattctgagaatgcagttggaattcctattactgttgagcagaaaaagagatagccaattttccaaatttttcacaaacaaacgcgcagagaaacaaattccagaacaattagtatcggcgtaattattctgagaatgcggttggaattcctattactgttgagcagaaaaagagatagccaattttccaaatttttcccaaacaaacgcgccgagaaacaaattccagaacaattagtatcggcgtaattattctgagaatgcggttggaattcctattactgttgagca

SEQ ID NO: 42154 - DNA, 956 bp, Heterodera glycines
acaaaaaggcgatagttaagcattgagatataaaaaatcgtctagaataattatctcaacaatttgtcgggaaagctgaataaatttctgttgcaataggcatattggcacaagacataaatgtagagcaggcacaaaatagaggaaataccaaagattaaaaaattcttgtttatgccccactctgctttggctggccataccttgccagagagtggagatagaccctttgttgatacatttggaaatgtcgagcccgcctagcgcattcgaataacacaaaatttgtttgcatttgccaccaaacaatccgcttatgacgcgccgaatgaaaattcacaaaaatttggcaccggaaaaactgcattttttcatgggccagcataataaagtaaacccaaaatgtaaggaaatttaaattggtcatgagagatgtttagttttttatttgtcccatcctttttctgggaaaaaacttttcgagaaaagctgaaaaattttccacttgcatcagaagcagactcaaattcttcaacacacaatataaaaatattacgcaagaacttatttttacatcctttttagaaatgctacataaatttttattgtaaatagttacaaacaaactttttttcactgccaatttctaccagttgccaaacaaaaaggcgatagttaagcattgagatataaaaaaatcgtctagaataattatctcaacaatttgtcgggaaagctgaataaatttctgttgcaataggcatattggcacaagacataaatgtagagcaggcacaaaatagaggaaataccaaagattaaaaaattcttgtttatgccccactctgctttggctggccataccttgccagagagtggagatagaccctttgttgatacatttggaaatgtcgagaccgcctagcgcattcgaataacacaaaatttgtttgcat

SEQ ID NO: 42155 - DNA, 1855 bp, Heterodera glycines
  unsure (1)..(1855): unsure at all n locations
aaaatttaaaaatgagaattcatgcgagattttctgaaaataagcttaattggncctagttaagctgtaaaaaaaatttggggcgatttgaaagagaatagaaagaaccaggttcgatgaagttttggtaagccaaaaaaaatccaaacatntaaaaatctataaaaaatttaaaaatgagaattcatgcgagattttctggaaataagcttaattgggcctagttaagctgtaaaaaaaatttggggcgatttgaaagagaatagaaagaaccaggttcgatgaagttttgttaagccaaaaaaaatccaaacatttaaaaatctataaaaaatttaaaaatgagaattcatgcgagattttctggaaataagcttaattgggcctagttaagctgtaaaaaaaatttggagcgatttgaatgagaatagaaagagccaggttcgatgaagttttggtaagccaaaaaaaatccaaatatttaaaaatctataaaaaatttaaaaatgagaattcatgcgagattttctggaaataagcttaattgggcctagttaagctgtaaaaaaaatttggggcgatttgaaagagaatagaaagaaccaggttcgatgaagttttgttaagccaaaaaaaaatccaaacatttaaaaatctataaaaaatttaaaaatgagaattcatgcgagattttctggaaataagcttaattgggcctagttaagctgtaaaaaaaatttggagcgatttgaatgagaatagaaagagccaggttcgatgaagtttcggtaagccaaaaaaatatccaaatatttaaaaatctgtaaaaaatttaaaaatgagaattcatgcgagattttctggaaataatcttaattgggccttgttaagctgtaagacacccaccacttttgcacttaaaaaaatttcaaaaaatttgatcgtccataaataatttgtaattgatcagcggctcaccaaattttgcagagatacgtatcggaacactacaaaagcttactaattttcctagatttattaaacccggtgaaaattttttgcagacacccaccacttttgcacttaaaaaatttcaaaaaatttgatcgtccataaataatttgtaattgatcaggggctcaccaaattttgcagagatacgtatcggaacactacaaaagattactaattttcctagatttattaaacccggtgaaaattttttgcacacacccaccactttttcacttaaaaaaatttcaaaaaatttgatcgtccataaataatttgtaattgatcagcggctcaccaaattttgcagagatacgtatcggagcactacaaaagcttactaattttcctagatttattaaacccggtgaaaattttttgcagacacccaccacttttgcacttaaaaaaatttcaaaaaatttgatcgtccataaataatttgtaattgatcaggggctcaccaaattttgcagagatacgtatcggaacactacaaaaccttactaattttcctagatttattaaacccggtgaaaattttttgcagacacccaccactttttcacttaaaaaaatttcaaaaaatttgatcgtccataaataatttgtaattgatcagcggctcaccaaattttgcagggatacgtatcggaacactacaaatgcttactaattttcctagatttattaaacccggtgaaaattttttgcagacacccaccacttttgcacttaaaaaatttcnaaaaatttgatcgtcccataataatttgtaattgatcangngctcaccaaattttgcagagatacgtatcggaacactacaaaagcttactaattt

SEQ ID NO: 42156 - DNA, 886 bp, Heterodera glycines
acgcagattaataataaatttaaatataaatactttttaggtataaaatgattttaaatagaaagaattttttaatttaaaatgtatttttgagattcgatatttatctcacatattgacgcagattaataataaatttaaatataaataatttttaggtataaaatgattttaaatagaaagaattttttaatttaaaatgtatttttgtgattcgatatttatctcacatattgacgcagattaataataaatttaaatatatgatatgaattcgggagaattgagtcccagtgattaaaattctggtgaattgagtcccgttgattggaattttggtgggttgagtcccagtgattgaaatgctggagggttgagtcccagtgattaaaattctggtgaattgagtcccgttgattggaatgttggtgggttgagtcccagtgattgaaatacagaagaattgagtcccagtgattgaaatgcagaagaattgagtcccgttgattggaatgttggtgggttgagtcccagtgattgaaatgctgttgggttgagtgccagtgattgaaatgcaggagaattgagtcccagtgattgaaatgcaggagaattgagtcccagtgattggaatgctgttgggttgagtcccagtgattgaaatgctgttgggttgagtgccagtgattgaaatgcaggagaattgagtcccagtgattgaaatgcaggagaattgagtcccagtgattgaaatgcaggagaattgagtcccagtgattggaatgctgttgggttgagtcccgttgattggaatgttggtggattaagtcccagtgattgaaatgctggtggattgagtcccgttgatcggaatgttggtgggttg

SEQ ID NO: 42157 - DNA, 662 bp, Heterodera glycines
ttaacatattttttctgcgcatatgctatgaagaaaggggcttaaaaatagcatttctgcgttaaaattttttgatttggtgaaggtttttagtccatataaatccatattttgggggttttcgggaataaatccatatttcgccattttttggtttttagtccatattttggccattttttggaaattttcacaagaaaaatgaaaaaaaaacgaaaaatacacccctaaagatcaactttttggaaatttttaaaaattacaccccacaaaacacgaaaaatttgagttttcgtcgtcattttggcattttcaataaatattttcgtcatttttttgcgaacatttctttttttttaatgagaattttttcgaaatttggcaaacttggaggtgtttttgataaaacgaacaacaataaaaaatatgcatttttaagttttaaaccccattttttggttgtttattgtactttttaggtttatttaagcaaatattaaatatgcacaccttttttgggatatttggtgggtcacatcatatattctgggattttttatccatattttggtccatatttggccatttttggactttttagtccatatttcgggcttttttagtccatatttaatgcccatatttgtgtatctgtagtacat

SEQ ID NO: 42158 - DNA, 988 bp, Heterodera glycines
  unsure (1)..(988): unsure at all n locations
aaagtgggtcaatttgaataataagtgagtcaatcagagctttgctttttaatttgcatttttcagttggcacatagcggtggcatttattcccggccgatgtacggcacaacgaccgcagtgccggcacaaccgacccaatttgggcatcatcaacagcagcagtcccagcaaatgcagcagcagcattatgcggcgagtgcgggaccaatggggggacagtgccaatacggcgccggcggggggacggcgacacggcgattttaaaaaatgaaaacaaaaattaaaaaagtgtagcgtttaattgagcgatttcaaatgttagtgccatcagcaaaattaacatgaagaaaaaggggcagtgaaaaaaaagttaaggcatttggtcttaatgagaggactttttgcccattttctttgcattttcgaaatgccttttaaaccaaccgaaatcctcgtaaaatttgaaaatttgctcacttttcctttgctggggttgcgtcgaagttaactttttggactttaaatactcagaaatgaattttcattcattaaaattttggaaatttatcaataaacgaattgtaatcggaaacattttgacgcccctcagctcgcttcgtgcattcattcattcaaacactttgtttaaatttaattaattgttactttttaaatttcttttagtgccncaatttgtcttttgtgtttatctttggataattttttaactattaattggttatttgtgtattattaccgtattaattaccctacttaatttgttgttcaatggattcagaaatttctaatctcatcattcactctctntatgcctttgtgttctgtanatgtcaattgttttgtcattttccgtcttcccaccccctaattcacttttttgtacactttacacaacgaaaacaacatttanacagtaacaacaaacattttgaccatttagatcgggatttccaatgtgatttgc

SEQ ID NO: 42159 - DNA, 1129 bp, Heterodera glycines
atcactatcaatttgatagaatcactgatcagtccttccccccgaccgtctaatggtccaaaccaacaaaactacagcacacacgagaagtgccaacctgagcaccaaatggggctgcatcataaacggttttggcttgtccattaggtcgtctctgtttttcaaccgcactaattggccttcgcgcgtttgcgacatttcgtactgcagtggttcgcggaacaaatgcctcaccgtcgtttttgtgctcttactcttcttcctcttcttcctctccttctgctgttttggttgttcgacgggtgttgcctgaggcaaattcactttttttgttttatcatatttactgaaatagaacccacccctgaattagaagcccccccccccccagaaaagcccccattttgagggaggttgaaaaatagagtcccgagttttattccgtaagtacagtatctaattgtgttttttttaattttaaaattcgcataagctcgattgaatggatgccctccctaccatattcccgtcgctgttggtcaatgaggtggcggtggaggacagataggagcaatcgctggtgccgccggcgccgtcctccgccgcctttgcgctctgatcggcaccgccatcattttccttgggctgctggccctcagccgcccatttgtgcattccccacgagtacagcttgttgtccaatgttccggccattgtgaagccgtcgccacagaccaaatgctaattgtaaattataaaactgcaattaattaattaatcggtaattaatcagttaattatttgtctctaaccacgcaagcctttgacagaagcgccttgaccggacacgtgcaccctgcgggcatttcctggcaattgccgtgggccaattcggcggacaaattgcgcccaaacaaatggacgtgtccattctccaaaagcactgtaagaaaaatgattttgtgtggcggttttctgtcccgctgaaagatggaatgcctaattagacaatttgcaatggctaataagccaattaattgacattgatcagacagtctttgagccgtaccgccactgtgccaaaggacaagcgaggcgttgaccacgcgccgaggggaacggtttgaca

SEQ ID NO: 42160 - DNA, 814 bp, Heterodera glycines
  unsure (1)..(814): unsure at all n locations
caaacaatttgtaacaaattgaattaaaatgataacagtatggagtttgggactgcatttgccattcatgtcactgaatttggcaccatttgcccaattttaggtactgattgatggcaagacaaggccgaaaaaagtgattggaattaaattgcaggtttgataatcatgattcagtcgtaagtcgcaacaaatggtaagtgatcggcatattatagagacccagggattatgcgaaaggttccaacaattttgtctcaatgtcaatcataaataacataaaccgaatgatgtggataatgatatctctctaaggatttaggacttttggcatcgcttgccaataagtgctgatcagagacacaatgtcaaaagcgactgatcaggagaaagctgattagtgaatgagtgatcaaacgcattattagtgggaaatatggccgtgaatatgaaattaaaatataataaggcattcttatttaaatgtaagctgataaagggatgggatgggacgcgaattttccatctgggataaacttgtcatgcgaaatttgacaccaaaatcaaatttttataaaaaaatattaaatcaaattaattaaatcgcagtgaatgtgccgcgccatagtaaaaatcgcttttcttctgtgcctaaaacaaaacatcattttgtttataaaagtgggcggctggtttaagccagccgcttattgtgtgtgggtcggctggcagaaaggcggaaacgtgaagacaaaaatgaacacaaatccatcccatcccccngggggtggggttagcatttggccaaggcggg

SEQ ID NO: 42161 - DNA, 1700 bp, Heterodera glycines
gggatcagatgcaatttaaaaattcattaaaaaataaaagggccattacgcaccgccctccctctcatgatcgagagtatttgtattatagaaaattacccaaaaaagagaaagccatttttttgggatacagatgcaatttaaaaattcattaaaaaataaaagggccattacgcaccgtcctccctctcatgatcgagagtatttgtattatagaaaattatccaaaaaagagaaagccatttttttgggatacagatgcaatttaaaaattcattaaaaaataaaagggccattacgcaccgccctccctctcatgatcgagagtatttgtattatagaaaattacccaaaaaagagaaagccatttttttgggatacagatgcaatttaaaaattcattaaaaaataaaagggccattacgcaccgccctccctctcatgatcgagagtatttgtattatagaaaattatccaaaaaagagatagccatttttttgggatacagatgcaatttaaaaattcattaaaaaataaaagggccattacgcaccgtcctccctctcatgatcgagagtatttgtattatagaaaattatccaaaaaagagaaagccatttttttgggatacagatgcaatttaaaaattcattaaaaaataaaagggccattacgcaccgccctccctctcatgatcgagagtatttgtttaaacaggcgcttgcgagaacgaaaaatatttcgtaaacgaaaataaaacaaaatattaatttctcacgaaaccaatttaatttttgaattgttattcatttatattatttaatagttttgattattttttatttttatatgattatttttcatttatattgttaaaaattttattttactaatataaatggtttttaaatcaattaattactttgtcatttacgtcatttcaagcgattatgatgctcaaaataacaattaaattggtgttatcccgcgcgatcccgatcccatacggtctatattctacgctaagttaagttaactaactataagcaggcaaaaacatgtgcaaatcggttcaccaaattaaaattttaaatatcaaaaaaaatcattagaaatcgaataaaagtgtaaaaaatggttcgttatttcgatttttcaaattcctacacaagttttgcaatttataaattctatttatatttattctttttcatttaaaatttgtttgattaatagtccaaatttaaaggttttaagttttattatagtgaatgcctttatgatgtgtttaatattcctttttaaagcgataaattaggttattttatggacattttttaatatatatttttgcaaaattcaggacaatctaaaaatcaggacacttgtgaacttttgtcaactaaaaagcaaaagtaattaattaatattttttaatgcaattcacttataaagcaataagaaaatgataagaaatataaaaaagaaaaattaaataaaggaagaaacaaaacaaaattaacattaaattattcaaaaatgaacaattaaaaatattatcttaattttataattattttagaagattaaggagaagatgttggtggagacgcgggaggcagttagatttaattataattcattaataataatagttataaagaataaataatgaaatatcaaacaaataataaaataca

SEQ ID NO: 42162 - DNA, 1458 bp, Heterodera glycines
cctaacttttggcctgttaaaaaggaataaaatttttaaaatttatcatctccctttttgatagaaaaagcatcagagtgcctaaactagcatgtaaataaaatttggtgcgtttcagagcattttctgaaaaaaatatttatgaattaattatgcaaaaataaataaaaatttctaaaaatttgatcgtccataaataatttgtaattgatcaggggctcaccaaattttgcagggatacgtatcggaacactacaaatgcttactaattttcctagattttttaaacccggtgaaaattttttgcagacaccaccacttttgcacttaaaaactaaactttttggcatgtttaaaaagcaattaaaaattttattcatctccctttttgatagtaaaagcatcagagagccttatttaacttgtacataaaatttgatgcgtttcagagcactttctgaaaaaatatttatgaattaattttgcaaaaaataataaacagtgaaaaactcagaatttctaaaaaaatttaaaaccaattacaattgtcattttttcaggttaagttagtcctgttccggggagtatgcctataaaatttggtacgattttattgcttattgaaagagctagagccgaagaaaatttttttaatttaagcctaaactttttggcatgtttaaagcaattaaaaattttattcatctccctttttgatagtaaaagcatcagagagccttattcaacttgtaaataaatttggtgcgtttcagaaccctttctgaaaaaaatatttatgaattaattatgcaaaaaacaaataaataatgaactctcttccttaataattttcctgcaccgaaggtactcactcggcctcttcgcggactcgggctgggccttcctccacaggtcaaagcccatgtttggggcgatggtaatggacgaaccgctagggcggtaagaaatattgttttggagaaatgccaacagcaccaagtgtcgtttgaaaccgttccgcatgccgagtacatgcgagctgttggcgatgcgctggacggaaacccccaaaatttcgaaaatctgctggacgggttgttgcgcgctgctgaggacgcatatatgactgcggtacacgggaaaccagggccaagtgggcatcagaccggctgagggcagcgaatcaacagttcggaaaatgagcgaagcgaacgaatgggaaataaactgacaacgacctgaacttttggcgtgtgatgtttgacacccgacaaaatacatttttcaataaaaaaatgagcaaaatgttttttgtttagtgtttttgataaacaaatttttccatgcttcctggcaaagaatttcatttttgggataaatttaaaaattcttgtgaatatttttaacatttttccgtccaatttttggctttttggacccccaattttatacataaaa

SEQ ID NO: 42163 - DNA, 926 bp, Heterodera glycines
attagaatttataatgtatgaagtcaccatttggcagatgaggatcataaaagagcactctgaagccaaatgctttgcgcgaagagccttttcgacaattaaaaatgtagttaaatttgaattggccaaattcccaccacggcagtgccaactcggcccaggccaatcagtcctagcacactgccgttgatccttgctgagccggacatcaggtcacgtaactgctcgacactcccgggctaaaaaacaaaaataaattaggtacgtacgatcggccttttttgaattagcaacactaattatggcaaattaaacgcacctgttttcccgcttgaaccgttctcgcggcccaaaatgttcgcctgaacatgttcaaaatcagcgacattgtcgagtccgccgtttcctccacacattcggcgggcgaatggcaaatggcaatgcctgagggggggggggggggatgcatttaaaataaattaataacaaaaacaaaatttaattaccctatctttggcatacccccacccctcaccagggatttatcaatctctttgagaaaatcgtggcaatcctaacaagcattgtcacaaattcatattccgctgatccattagcgactgtcagaattcattagctttggcattatgccagattttactccaaagatgcttgccaaggtcagtcgctgcttgcatgtccacattgtgcacgcccgagccaattcggacaacaactttgagcgccttgaacttcaccaaatcctcgcggcccaaactgatcgaatggtaaagcagcgcagcagtggcctcgttcaaaacctttcattggaatttgaaaaaaagggaaaataaaacaaatttttaatttcattctgttggacagagaggggtaacttaacaaaaaatccaagggcgaaggcaggg

SEQ ID NO: 42164 - DNA, 810 bp, Heterodera glycines
  unsure (1)..(810): unsure at all n locations
cgatttgaattacccaaacggtaaatttgttcgtccattcaatgacatgaatgaagcggtggggttttcgaattcatcagagagtaatgggattactttcgcccaatatagaagaactcattgcatttacgtcttcaatatgactaacagcggggacgatcaggaggcattgtttgatctgataaagaatgggaccaccgcggtgagcatcaaatttaaccactcagtatctgatggaggaataatgttggtggtaatgggagagtgtgactctcaggtgatgttagacaaaaacagatcaataagcaccgacaccactatttaaaccaccccgcattgtcatttcattaaaataaatatgttatcaaaaaagtttcctctaattttacttttccttcgcatttcgattcccgtaactgcatatagagaagaggactcttcatattcagaatatttaagaagaaggacattatctaggtttactagcacaacaacaacaacaacaacaacaacaacaacaacaacaacaattactcccaataccacaccaaatgtgacaacgcctgtactaccaaagcaagaaaaactaattgatgaacatgtctctgctgttctcccaccacttattcgattgtgcaaggacacgccggaggaaagcagcatattccatcaagctatttgttgngcccttttcactctctatttaatgttgatcatcagtttggtgttgcatcaactctgttncattttttggctaaagtatggacagcgtacaaatcacaaagattttgagcgaaaatcgtcggacag

SEQ ID NO: 42165 - DNA, 1387 bp, Heterodera glycines
  unsure (1)..(1387): unsure at all n locations
ttggacgaatntacgatggacctgtgttcggctttcacttcggcaaacattccatttttcaaattggaaaatcagaaatttcgaggtctgtttttgggatggcccatcaaaaaaatttatttaggctttctggaaaagtattgcaagcgtatggttctcatagggatgtgttgcagcaacgttatttgtcagcatgttttaagcaggtttatccactctacatattcaaaaacttggtcataattcagaaaatggctgaggttaaaaatgatttcaaaacccaaaaaatctgggcatcagtagacgagactactgattctaaaggtagatatgtcgcaaatttgatcattggcattttggatggaaaattgcacaacccgcatttggttgccgtcaaatttctggacaaaactaaccatgaaacagtcgctcgatttgtcaacgacaatctgagggagttgattttggctgatgacctttggttgcttgtcactgacgctgcgcgttacatggttaaggcagcacaggttaaataaaaaatttacagaaaagtggtacaaaaaacatttttaagggcctaaaaattttctacccaaacctcattcatctaacatgcctatttcacgggctcaatcgtgtgtgcgaggaaattcgtggcctctatccgagtgttgacaaattggttgcgagtaccaagaaaactttttcaaaagcgccgtcgcgtgtggccaaattccgcgaactttgtgatctccccctcccaccgcgtccaatcatcacgcgttgggggacttggctcaacgcagcggattattactgccaaaattttaaccaagtcggagcgattattcgagacttcaacccatccgattctgatgcaatacggcaatcacaaattgccttcgactctcctggtattcgcggagatttggccttcataaaatcacattttgatattttgcctggagcgattggaaaattggaataacgcaacctcacactcattgaaagttaataaaaaaaaactcgaaaattttttattcttattttctaggtttggacatagtaagcgatgtcggaaataaattgaaactggtaccgggcagtgtcggcaaattggttcaagaaaagtttaacaccgttttgcgaaacaatccgggatttgacagaaatttttggttgggtttagaaaaagttttaaactcatattttttctaggaaaatgggtatggttttgcgcggcgaacacgttcaaacgcattaaccctccggatgtcatcgcaatgttcaaatacgcacccattcaatcatgcgaanngtgagcgttcctttttcggcatacaaaaatatactggcagacaatcgggatgcgttttacgccggaaaa

SEQ ID NO: 42166 - DNA, 937 bp, Heterodera glycines
  unsure (1)..(937): unsure at all n locations
catttgtatggtacaaatttctcgcaaaaaagagatagtcatttttctcggatagagaataaatttaaaaattccctcgtagaatagaacggccatcgctctccgcgcccctccgcccacgccgggaacatttgtatggtacaaaatttctcgcaaaaaagagatagccatttttctggcatagagaataaatttaaaaattccccgtagaatagaatcggccatcgctctccgcgcccctccgcccatgctgggaacatttgtatggtacaaaatttctcgcaaaaaagagatagccatttttctggcatagagaataaatttaaaaattccctgtagaatagaatggccattgctctccgcgcccctatgcccatgctgggaacatttgtatggtacaaaatttctcgcaaaaaagagatagccatttttctggcatagagaataaatttaaaaattccctgtagaatagaatgcccattgctctccgcgcccctctgcccatgctgggaacatttgtatggtacaaaatttctcgcaaaaaagagatagccatttttctggcatagagaataaatttaaaaattccctgtagaatagaatggccattgctctccgcgcccctctgcccatgctgggaacatttgtatggtacaaaatttctcgcaaaaaagagatagccatttttctggcatagagaataaatttaaaaattccctgtagaatagaatggccatggctctccgcgcccctctgcccatgctgggaacatttgtatggtacaaaatttctcgcaaaaaagagatagccatttttctggcatagagaatagatttanaaattccctggtagatagaatgggcattgctctccgcgcccctctgcccatgctgngaacatttgtatggtacaaaatttctcgcaaaaaagagatagc

SEQ ID NO: 42167 - DNA, 1099 bp, Heterodera glycines
ttttttttttttcggggcagtcccccccgaaccgatgcgcccagattttttgggggagaccgattccttcgggaatagctttccctatagcctgtactttaattctgcggtgggattttgctccccataaaggttgagtaccccacacgcgcactcgaaaaaatcgattttttttgttttcggggcagtccccccgaaccgatacgcgcagatttatggggagagcgaatctttccggaatagcttccctatatcctgtgctctaattctgcgttggatttttgctctccacaatagtgtgagtgccccacacggacactcgaaaaaatagatttttttttgttttcggggcagtccccccgaaccgatgcgcccagatttatggggagaccgaatccttccggaatagcttccctatagcctgtactttaattctgcgttggatttttgctccccataattgtttgagtaccccaaacggacacttgaaaaaatcgatttttttgttttcggggcagtccccccgaaccgatgcgcccagatttatggggagaccgaatccttccggaatagcttccctatagcctgtactttaattctgcgttggatttttgctccccataattgtttgagtaccccaaacggacacttgaaaaaatcgatttatttttgttttcggggcagtccccccgaaccgatgcgcccagatttatggggagaccgaatccttcgggaatagcttccctatagcctgtactttaattctgcgttggatttttgctccccataattgtttgagtaccccaaacggacacttgaaaaaatcgatttttttgttttcggggcagtccccccgaaccgatgcgcccagatttatggggagaccgaatccttccggaatagcttccctatagcctgtactttaattctgcgttggatttttgctccccataattgtttgagtaccccaaacggacacttgaaaaaaatcgatttttttgttttcggggcagtcccccccgagccgatgcgcccagattttatgggggagaccgaatccttccggaatagctttccctataggcctgtactttaattc

SEQ ID NO: 42168 - DNA, 762 bp, Heterodera glycines
tgatagaccgtctagcaggcacattcatttctttctcaccaaatgtaataaaaaacaatatttagctagttcgatatttttagcgtaaatttaacgaatcaaaaaaattgagaaattttattgtaatttggataatttaggtgaatatttttaacgttttatgtgtatttttcactcattattattttttagcaattaaattaaaaatgttttttgttttttccgttgttgaataaaaaatatttggtcatttctaaaatttttttaaagttattttgtggtaattttttgggttttttcacattctgtgccactttttttgcaccataaaacaatgaaattttcttccccgtcaaaaaaaatttttttgctttttctgttctctctggcgacataaaaatgggaaaatttttgcatttccatctcgctgatttcaatgcacaccaaaagttcacagacgtaacgctgggattcataaaagttaaagcttgaaaactcttaaacagggcattaatgccatttattagctcttaattaatgaaatggccttatttaatggtggcaaaacttaaagaaaatgattttgtctgttgcttggcaaccaatttcacactttttatgttaattaatcagacaaacagagcatagaatgaaagtcaaaagacttgccaatttatcctcggcactttttccacttttggcattatttttcctcttcttcgtcttctccaatttgaccaattcctctctgctcattagcat

SEQ ID NO: 42169 - DNA, 141 bp, Heterodera glycines
gatctggttcaaaccgactaccacgccgcgcaccagcggcagcaaggcatagagcaccagcgcaatcagtgcgggtgtcattccggttcctgctatgccgagcgtccccagccacggaaaggccgtaaccagcgcggcaag

SEQ ID NO: 42170 - DNA, 583 bp, Heterodera glycines
gcgcattactcaaattggtctcgtccccaaatggtgccatccgtttcccatggccttttttcagcgccaaaattcccgacgacgataatgatgattataatattgatgaagatgatggatacgtggatacctttcagcgaatacatacatcgttgaaccccttcacctcaccacaatttgtggcgcttgaacgggcctcggaaggggcgggggcgggggcgcgcgggcgggaggcggcggcgatggaatgaacggcgcgggcggtggcaaaatgaaaaaattgggggacggttcgcccgcggggggggggtggcgggcggacgcacaattacacgtgggggggggcgaggtgagaaaattaaagcaaaagcaaccaccaaattggggggggggacgacggacggaagcgaaatattgtgaagaaagggaatgaatggaatgtgcctggggggggaagggacggcaaaagaagtgccaaaaatggacgacaaaaagtggaaggttccgcagaggaaaagtaaaagcacagaaaaacaaataataattttatgtttttttggtgggcgaggggcaaaaaaaaata

SEQ ID NO: 42171 - DNA, 468 bp, Heterodera glycines
tgtgtggcgccgagtctgcttgagaaacttggtgggtgggacagagggaaagggaggggcgggggagttgaaccgctgctctcttcgacaatttcagtcccaaatttccaaattcccttcccttggcagatgacgtcgactctgtccgtcttgtgcccgaattggtcattttccttgtgcggcaggcgcccgcactgctcgacggctttctggaggatgggccccttctgttccatcacccccaccagcagttcgccccctcctccgcctcctccgtcggtccctctccgtcgtcgttgcatcagtccaccgattcgggcctttccgaagtcggagcaaacgcaagtgtagcaacgacgacgacggcacatgcgatgggctcaaaacgacgggtccacgggggagcagcagaagggagagaaaggggaggaggagggattttggtgagggatttggggggggggataa

SEQ ID NO: 42172 - DNA, 815 bp, Heterodera glycines
tattgttcaacccctcaaatctcggaaattttttttgcgggtcaaaaaggggtgaaaaccatttttctaaacagttttatagtgcagagcatgaatatgagtattatttaacgttacacaaatttttgaatttttaaaaaattttgaaaatttttcattttggccctcgggaatctggactcgtatttgaaaattcataactcatttcaaagtgggtcaatttaagtacaataaagctttaaaaataaagaaaaataaggggaattttatgaattttattttaaatttctatcatcaaaatgaaaaattttttccagaaattctggaaaaattcgaattttcagacaaaaaatcagaactcggttcttaaaggaggttttcgaaaattaatatactcaaaaaacccgcaattttttgctctatagaattgtatttatttcatatttctactatttttttggaaaagattataaaaataaattgatttgggaatttgggaccataggggggagggaccacatggtttctgagtgggaaaaattttttcacccaaatttagctgaaaaatactttttagtggtattttagggtgttgatataacgaatctgtaatcagatttcgctttcggcatcgtcaaagcccagaatccctgcggatatactcgatccctcctgctggaggggggcattttattggagaggggcattctacaagggaggggcattgtattgttcaacccctcccaaaacgggcatttaattggagggggcattctaccagagaggggcattcaaatagcggatttacggtatgt

SEQ ID NO: 42173 - DNA, 960 bp, Heterodera glycines
ccaaattcatttataaggaatgcatcggaaaaccaatttcattaacatcaattatttattgatttcattcccataaatttgagtcaagaaaattcgaaattgatgccattgaatgagttttaatcagctgtacagagtttaaagcatttaacagagtttaaagcatttacatctccataggaaacatgaaaatcttctgtaaaatttttgaattaaaatattttaggaaaataattattttttaccaggtccaattttccaatttgaccataaatttgctaatcatttgcgttgccgcctggaccatgagtcacgaaatccgaatcctttatacggcaattttcttgacccgccggcaaccctttgagcgaaataatgtcatgcaaaatggaaaaattaagtaaaatagaatcattcagtagcaatgattgttctcaattagaaaaacttaataatttttttggcgaaatgtcttttatttaaaattttgaagatggaatttgggatttgggatttttgaaaatttatacgatttaaattattaaaaagatcataaaatctacctaaaattattcaaaattaggtctaatatagcaatttttggtgaaaattacttaatatgaatgtaaaaaaatattaaaaaatttcccgccggcccataaaaatccttattctcttaaaaaaagacggaatgccaaaatttttgaataaatttataataaaatcaatcaaaataaattcaattttcatctcaaatttcacctagaatttacaaaaaaatttcccggcggcgcctatcgacaccactggatcgacattaatcctgtagaattgagtcaaaaggtgtgacatttggtcatttttttgttcaaatcaggtaattaattgataaaaattttcaaaaaaaatttcagacggcgcctatctgcatagaacggaccccattggttcctatttttt

SEQ ID NO: 42174 - DNA, 1085 bp, Heterodera glycines
  unsure (1)..(1085): unsure at all n locations
tcagatgcttcnactatcaaaaagggagatgaataaaaaatctaaaaattnttaattgcttttnaaatatgcgaaaaattttaggcttaactttttttttataaactggtcagaagcgaaccagattttgcgagagcatcaaaaagacaaggaaaagcactgctatgatgctaactccagtaattctgaatttaaaattttttattaatttttaaagcttcacttttttatttttttagcaaaattaattcataaatattttttcagaaactgctctgaaacgcaccaaatgttaattaaaagttaaataaggctctctgatgctttttctatcaaaagggagatgaataaaaattttaaaaatttttaattcctttttaaacaggccaaaaagtttaggcttatattttaaaaagtttcatcgaacctagcgcactaaaatcgatataatctctccaaattttgcaggccttctccattgtaaaggactaacttaacctgaaaaaatgccaacgcttgttgtttttaaaatttttcgaaattctgactttttcattaattatttattattttgcaaaattaattcataaatattttttcagaaagtgctctgaaacgcaccaaatgttaattaaaagttaaataaggctctctgatgctttcactatcaaaaagggagatgaataaaaaatctaaaaatttttaattcctttttaaacaggccaaaaagtttaggcttatattttaaaaagtttcatcgaacctagcgcactaaaatcgatataatctctccaaattttgcaggccttctccattgtaaaggactaacttaacctgaaaaaatgccaacgcttgttgtttttaaaatttttcgaaattctgactttttcattacttatttattattttgcaaaattaattcataaatattttttagaacgtgctctgaaacgcaccaaatgttaattaaaagttaaataaggctctctgatgctttcactatcaaaaagggagatgaataaaaaatctaaaaatttttaattgctttttaaatttgcgaaaaattttaggcttaactttttttt

SEQ ID NO: 42175 - DNA, 885 bp, Heterodera glycines
ccctccattcccaaatactgcattgcctgtgccagcggtgctggcaatatcacctgcacaattattgtgattgaaacataacagcaacaaatgaacacccacatttggttggccgaaattaagcctccccttaggaatgagaaaagtccatttgagacaatatttgtggccatatgatcactcttttcagaagtaaattcccatgcattcggtcgggtcaaccgaacaatttcttgtgctattttagcaacctcaattgtttccgcaaaattatccggtgagtacaactcggacaaatttgcgatcactttatttctgaaaaattggattggcatttctgggaaatcgatttttccttgacgtgagagataatgtatcgattccgaagaaatttctttaacatccccagttatttggtcatactgagaatgtatcccttttgtctgcacatataagtatcggaaatccttgcaactattttccctcgcatttgagtgtataattagcgtttttgggtctaaaaatccatgtttcgttttttcatagcttccaaaaagccgaaatgtaaccggaagtctctcaaaacatcttccattttgccaatgaaaatgcagttccctctcatttactgcaaaacatggtctgatttccaacatatcttttgtcaccaatcgggccgttaaataagggtttgctaggaaaaaccgggccaaaagtgttggatttgcctccgccaaagtcaacgtctgatcggcgaggaatcgcaggctagtgcatattttatgcactgtttcagcaaacaatttttgtgtatttgctgtaactttgacacttaacgctgtaagctgtgctgccagctgcgaggaatacaccagcccaaccttt

SEQ ID NO: 42176 - DNA, 1306 bp, Heterodera glycines
  unsure (1)..(1306): unsure at all n locations
tgaaagtccgatgtcacctggaatttttttatgtttatgtggaatttgaacaaatcttttctaaaaaagaccaaatttactttatttgtttatcagtgccgctggcgaaagtgccattttcgaatattttgagtttcctttancccccccccccccccgttttcagttgaattgaacgtcgaagccgacgacccacttcaaagttacaaagagcgatttgagcggtcgtacatcgaagggactgaacaattttacaaatgtcgcacagcgcaacttttggagcacgacggtgttctgaattacatggtttacgtggacgggaaactggccgaagaggaggaaagggccaaaagatatttggactcttcgtcgccggaatccatcgcaaaggcaaacattggtcattttgtcgactcatttaaacgtttagttggtggaccaatgcgttcaagtgctggtgatcgaatatcaagaccaacttttggccgttggtccgactctgatcaaaaacaacgaggtaaacaggctgaagacgctctaccgactgatcaatcggacacccgacggaattcccaatttgctcaacgtcttgcacaaacacatcacggcagaaggactcgccgccatgcatgaacacgcggcggaaattgtgacggtacatttttggaattcgatttagaaaaaatattagaaaaaatcatcgaaatttgaatttaggacagcgaaaggtacgtggaacagttgctcaacattgtactcagtgttctccgaactcgtccgagatgctttttacaacgactcgcgctttttgaccgtcagagacaaagcatttcaagaagtggtgaacaacacggaagtgttcagattggagttggacccaaaccgaacgaaaaggttgaaaatgcgcaaaagcaattttaaaaataaatactaaacagtggacgcccagcgaacatcgagtcaaagtgcccggaattgctagcaaattattgcgatttgttgctcagaaagtcggcccttacgaaaaagttttcttctgaagagatcgacgagagactgaacaacgtggtgagttagggcagggcggtccaatggttattttacatttgaagtacaaaacggaaaagaaatttgacttctttttggtgttgttacgtattccgcatatttcgccacttcgttttttagcttttggtgctgaaatatgtcacagctaaagatgtgttcatgcgttatcataagacgcacttgagccgaagactggattctcgagttggtggccgaccaagaaaaggaggaaatgctc

SEQ ID NO: 42177 - DNA, 901 bp, Heterodera glycines
gtaaattcttttttcccccaataaacttgtcaaaccccattttttcgcaccgtgaatgttatttttattgaattctgaaccggtttgagtagattagactagaaaaaataaaaaattttgaaatcatgtttcccactcccttctcccaggggtattattttgtaaagtcttttttccccaataaacttgtcaaaccccatttttcgcaccgtgaatgttatttttattgaattctgagccgttttgagtagattagactagaaaaaattgaaaattttgaaatcatgtttcccactcccttctcccaggggtattattttgtaaagtctttttttccccaataaacttttcataccccatttttcgcaccgtgaatgttatttttattgaattctgaaccggtttgagtagattagactagaaaaaattgaaaattttgaaatcatgtttcccactcccttctcccaggggtattattttgtaagtctttttttccccaataaacttttcaaaccccatttttcgcaccgtgaatgttatttttattgaattctgaaccgttttgagtagattagactagaaaaaattgaaaattttgaaatcatgtttcccactcccttctcccaggggtattattttgtaaagtctttttttcaaaataaacttttcaaaccccatttttcgcaccgtgaatgttatttttattgaattctgaaccggtttgagtagattagactagaaaaaattgaaaattttgaaatcatgtttcccactcccttctcccaggggtattattttgtaaagtcttttttcccccaataaacttgtcaaaccccatttttcgcaccgtgaatgttatttatattgaattctgagccgttttgagtagattagactagaa

SEQ ID NO: 42178 - DNA, 740 bp, Heterodera glycines
tgttagacctgtcaaaaaaagtctaaaccgtttaaaacccctctttcctatgctccgaaccataaaaaagcaaaaaaaattcatatttcccaccaaaaaaaatttcgacattttgtcggacttgtcgacactttgtcccacccaccccgaacattgttagacctgttaaaaaaaagtctaaaccacttaaaaccccattttccctgctccccgcacccatttacccccaaaaccccgcactcccagccaaatccgccaattttgaccagttttccggacaaatgacctactcaacctggggctaggggtccaaatttttttttaaatgttcgcctcggcgagctctacaataatagccaatagcgccgggcctcccgattcattaaccccacacttcccccggttctaacttttttagaccccgacccaccccaggggctaaaaggggtccggcccttcaacttagtgctggcgcgccaatttttttttaaatgtgcacaacacatagacgcatcttttcataagcaacattcaaaccctgcggataacttaaacacacgcaaaaagcgaaaaagtgccaaaaaaaagtaaattcaaaaaatcgatcataattttttcattatggtgatcacgaaatttttccggccggtcagttttgaagagcttgagctcagctatctttttaaaaaaaacgacccgctagctcaacggcatccattagcacatggaccatttaggtt

SEQ ID NO: 42179 - DNA, 1117 bp, Heterodera glycines
  unsure (1)..(1117): unsure at all n locations
gagatttcacaaaaaaattattagtaaaactgtgtccaatattagttataaataaattattatagatgtatttaaaaaaaaatattttttgaatctccttaattttattttcatccttaatacggatttggaagtttttgatgcatatttttttttttttaatttaaatttgtttttttttcaaaagtaacttttttggcacccaaattcttggtaaaatgttgaaaaaaaatttataagccaatttttaatttataaaaaagattctaaggttttttattgaaaataaaaatatttgtttgtgtgttattttgattatttatgctaaatagggtaaaaaattgaaaactttttttaatggaatgcaattttcatataattagtcctaaatcggccaatgatccctttcaaatatgggtcaattaattaaagacaacaaatttttttagctttttttggagccaattgttgcggcacaagactttgacgtgtttgtgccgatgatgatgcgtaaaaacattgaattgcaattacaagcactgaaaatgattgaggtagtaattcattaaatttaatcgttgattaattaaatgatactaattaattaattattgaagcatttgaacggacttttgcccaattcgctgaagcttggtcaggaggaagcggatatgtggaattcgttgactgatgaggatgatagtgaacgattcatcatgatctcagtgctcaagtaaaagatttattttaaaattaaaaaaaaaagtatataaatatttaattttgtaattaaataattatttaaaaatcatcatttgtatataattccacatcaaattcgcataattttcatgaaaatttttgcaaaaaaaaaaaaaaaaatcaaatttagaatcttactcagttatttgaaattttgtaggactttttaaaatcagtatcatatcccggaaaattttagggagggcgtggacgcctgtttaaacttatttatatcaaaaattgtccatttttaagaaaacaaagaaaaatttgtggtcaaacagatgcagaaaggagcccaacagaaaaatttgaaaatttaattgaaattattgantgcaaattgtttccattt

SEQ ID NO: 42180 - DNA, 799 bp, Heterodera glycines
agcaccccaaaagcatggatcggggaggcagccgccccgtaattgttgggcagcgtccacaagtcatctcgaacgacccgtgcccatcagcggacgggggcatttgggtggtgccaacgctagcccaacaggacagcaggtaggtgggtgaataggaatcacttggggtaatcgatccagcagcaggttcacctacagctaccttgttacgacttttgcccggttcaagccactcgcgattaaatcggttccagtctgcataccgaccgaagccggaacactaaccgtccccgaatttctcgaaatggctcagtcccgggcagcgacgggcggtgtgtacaaagggcagggacgtattcagagcgagttgatgactcgcccctacaaggaattcctcgttcacggacaataattgcaatgtccgatcccaatcacggcaaattttcaccggtttaccaacccctttcggggaaggacaagcacgctgattttgccagtgtagcgcgcgtgcagccccggacatctaagggcatcacagacctgttattgctcaatttcgtgcggctgaacaccgaaaatccctctaagaagttgtgcccacagaagcaatgagccaactatttagtaggctagagtctcgctcgttatcggaataaaccagacaaatcgctccacgaactaagaacggccatgcaccaccatccaccgaatcatgaaaaagctatcaatctgtcaatccttacggtgtccaagacacggtgaggtttccccgtgttgagtcaaattaagccgcaggctc

SEQ ID NO: 42181 - DNA, 851 bp, Heterodera glycines
tttcaattcatagttgtgtattttctgaaatttttttggggtcatttcttaggagtgtatttttccaatttattgcatttttaatggaatttttcggaaaaaacgccaaattttatttacaaatgatcatttttttgatatgatccgcaccttttttattttccttttttttcgtccgtcggataatcgaagagcggacaaagagtgagtgaggtgagcgatggaatccttttctaatttatatttataatcgaaaataaaaatatttaggtatatatttatttattgcttctcgggaatttcctcatacactataaattaatcgcgcgatattaggattccgattttggggaggccattcgtccaatgctcggaccattggtttttaaattttatggcataatgtaaatctttttttatctaaaaattttaattaatgcaaatttcatcatgttttgagataaaaatttgataaaaaaattagccaaagttcaaagaaaaattcggcgactcctttcggcaccgccggaccataaaaatccatttttgatcccaattgcactgaaatataccatttgctaatgtacgccccaaaaattgattgttcaaatccataatgtgagatgaaaatattatttttgatttattttggtacaaaaattgtaaaaataactgatttgcagcaattccaaaaaaaattctgtttttttaaccccaatcctgttttttaagcctgatgactacttttagaaaaatttcggtagaagccctgtttttatccattttccccctaaattaaatcccttctctcttcgtccatcgtcatcatctggtggggctggactttcatc

SEQ ID NO: 42182 - DNA, 911 bp, Heterodera glycines
ggactcaatccaccagcattcaatctctgggactcaattcttttgcatttcaattactggggactcaatccaccaacatttcaataactgggactcaacccaccaacattccaatcaacgggactcaatccaccaacatttcaatcactgggactcaacccaccaacattccaatcactgggactcaacccaccagcatttcaatcaacgggactcaatccaccagcatttcaatcactgggactcaacccaccaacattccaatcaacgggactcaatccaccagcatttcaatcactgggactcaatccaccaacatttcaatcactgggactcaacccaccaacatttcaatcaatgggactcaacccaccagcatttcaatcaacgggactcaatccaccagcattcaatcactgggactcaattcttctgcatttcaattactgggactcaattctccgacatttcaatcactgggactcaacccaccaacattccaatcactgggactcaacccaccagcatttcaatcaacgggactcaatccaccagcattcaatcactgggactcaattcttctgcatttcaattactgggactcaattctccgacattccaatcaacgggactcaatccaccagcatttcaatcactgggactcaatccaccaacatttcaatcactgggactcaacccaccaacatttcaatcactgggactcaacccaccagcatttcaatcaacgggactcaatccaccagcattcaatcactgggactcaattcttcagcatttcaattactgggactcaatccaccaacatttcaatcactgggactcaacccaccaacatttcaatcactgggactcaaccaccaacattccatcactgggactcacccaccagc

SEQ ID NO: 42183 - DNA, 935 bp, Heterodera glycines
tatatctctgcgaaattccagatccaaaaaaatcagctatccattcgaaagctgctttcaggcgctctcagaaaacagtaaaaacgctcctattcatgcactaggcgctgagatatatgcacttgactttctgcatataattgccattctccgcagcaaacttcgcgttctcaagcgtgaatagttaatttttttgtgctgaactgtgttagggttctccttgcagtgcgctcaactaagtctcttggagttagagcatttttcatggtattttcaagaaaattgtgcaatgtgggcgacccggaacattttagacagtttccaaaccaaacactcatagtaaaaaattatttcgttagaatacgagaaataatttgaaacgaaacactggttactaatttgcatatatctctgcgaaaattccagatccaaaaaaatcagctataccattcgaaagctgctttcaggcgctctcagaaaacagtaaaaacgctcctattcatgcactaggcgctgagatatatgcacttgactttctgcatataattgccattctccgcagcaaacttcgcgttctcaagcgtgaatagttaatttttttgtgctgaactgtgttagggttctccttgcagtgcgctcaactaagtctcttggagttagagcatttttcatggtattttcaagaaaattgtgcaatgtgggcgacccggaacattttagacagtttccaaaccaaacactcatagtaaaaaattatttcgttagaatacgagaaataatttgaaacgaaacactggttactaatttgcatatatctctgcgaaaattccagatccaaaaaaatcagctataccattcgaaagctgctttcaggcgctctcagaaaacagtaaaaacgctcctattcatgcactaggcgctgagatatatgcact

SEQ ID NO: 42184 - DNA, 110 bp, Heterodera glycines
gataaccagagcggttttccctcctgggaatgcttcccttcgtggcggcttcttcctggttccgaaccctggccggcttaaccgggataacctcggtccggccttttctt

SEQ ID NO: 42185 - DNA, 705 bp, Heterodera glycines
aatttattgaaccgacaaatgaatataagcaaaaaagaaaatattcaacaaaagaacggaaacaaaattataccgaaatttgtaagaaaatcggagttaacgaaagaacaattaacagatggaagaagcaatttggcattcgcggtaaaataacggatgaagaaaaaatgggaaagatgaaaatttattggaaaataaaaaaagaaaatccaaaaatgagtgaaaaggaaattgcaaaaatgatgaatatccatcaaaataccattttaaaatggaaaaaacaatttggagaagaaatgtttcagaaaacaggagaataagaagaaaagtgatttgcttgtgctttttcaatttaaaataataattttgttcttttttcattattaattatgctaattataacaaatgaagcaaaaatttgccattcactgtaaaataacggataaagaaaaaaaatgtaactaattatgctaatttcctaaattcttgataaaaagtctgaaattttcggaaatttctattttggagttttattttttgaattacgtaaatgttttagcaattcaaaaagattcactaaggggagccaatcagggatgggcgaaacttcgagcttcgagctttgaaaacttcgccttttttgggctttgaacttcgagcttcgggtaatttacgcgaagtttcgggaaaaatacaccccctaaa

SEQ ID NO: 42186 - DNA, 1744 bp, Heterodera glycines
ttctccatgattctgcttgaaattaatttccgtcccatcatttgaattgctgaacagtgtttgaattgtaacattagtggactatgaatagagaatagggatgaataaatttattggaaaaaatgaacgaaatttaacaatgttaaaaaccccaaaaaggaaaagaatcaatcgattttaatcaaatttaaattttcagtcaaataaaccacccgcaaaacaacggttgtcattcgctcgttgttggcccttaagcaagccaagataaaaaaatgattgcaaaaattaagcagaaccattggagaaaaaattaagttgaatggaaatatattatgtatagatttttgaaattattaatattaatttaaaaaaatattgctttaaaattaaatatttttactttaaaatatttaaatttaaatatttttattcacactaattgtaagaatattttcggttcgcccacactgagaccattttcggttcgtctcagcacgctctccttacactgcaatattgaggacttttttgacagattttatcaaaaaatgctttaaatttttaaacgtaaatattttttttccacgcagctaaggcaatgggttgagctgtcgttggatgagcaggtgccgccctcactggttgttgttgacccgtgccatgtacttccctgaggacgtggacttcactgctcgcattcgttccattgttggctcgctgcccaaggaaattggtgacttcaaagcgatcactctcaaagagtgggagggcggctctgacccgcaggtaaagaaaaaaaaattcaaaactttcgtataaaacaggcccccatcatccagaaaaaactgaaaaatttaatggctgtaactatgatgcaaatttttgcattgccaaaaatggcgccaatttgtgcattttttagtcgcatttttaaacgacgtccattttgcaggcaaaaatcgaactgttgcgcagcattgaggcggacctgaaggcggagcgcaagctgcgcgaggagcgcaatgaaataaaaaagaaatcaaaggggaaatgatcttttcgggttgaatattttttttgtcaaaaattgcaaaaacaaaatacctacggtttcgctttcctgaaacaaatccattcctaaatccctactagcccaaaattcgaaaaaaaaaatttgatctgttccttaaggttatgatgacaggtcaaacaaacacggccatgaatggcttaaaaaatgaaattttttttatttgccttacggtttgcccttcatttacagtatttgctttaattatccccagtctacgaggcgtttgaaaaataatccataatccctctgtcttaatcccccagtctacgaggaggttgaaaaataatcccccatggggaataattagagctaatacggtaggtatactaatttttataaattttaatcaacaaaaattgttaaaaaaaagttttgcataaaaccgcaacaataattcgtcatcattttgttgttgccgcctttcccggcctcttccatttgttgtttcctgcaccggtctttgttctttttgccattccgacacctttctttttcgtccttttctgcttcggctgatcattgttttcgtccaattgagcgggaaagaatggcggcaaattctgttgctgatcacttcgctgttggctgcacacaatgagaaattgtttaccgtatttattgaaataaagccaccgggggctgtaattcagg

SEQ ID NO: 42187 - DNA, 698 bp, Heterodera glycines
  unsure (1)..(698): unsure at all n locations
atttaaaattcagaccaaaattgtttttccccccctggcgacttttttaattgttaaaattatttgactatccccttttcatataaatttttcgtaatttatttttaattaataaaataatatttaacattttgtaggccaataaaaatttttgaatttaaattctttaagcttttctctttgtttttttaagaatttaacaattttttcatcgaaatttggtaaaagttcttttaaaaattgctttcttggcattttgtctaccgcctctttcaggcccactcgaacgcgatcaccaagctggacaagacgggcaatgacatgatccaacatgatcactacgaaaaggaaaccattcgaaaacggttggaccgtcttcatgacctgtgggaccgactgttcgccatgctggagaacaagggcatcaagctgcagcagactctgaaactgctccaatttgtgcgaaaatgtgacgagatgctctactggatcaaggataaggtgagggcgaaaggggggatttgaccaatccaaggagcttgatcaggcagaactgatcagattaaggctgtgatgcctgaaggaacggagtgtgggagaaagtgggataaaggacctgagagaacctctaaaagaggcngcccgtagctcagttggttagagcacggcacggattgctgnnggtcgtgggttcgagt

SEQ ID NO: 42188 - DNA, 1033 bp, Heterodera glycines
gccttttttgcattggtgggcacttgcaaaaaaatatctaaatttgtttttttatattaactaatatttcaaaataattatcaaacttttttggcattcgtcgtttgaaactttttgcccggtcgcaaaatgaattagagcaataaacagaaacggacagatggattttagcattgttaaaggcattggtatacgaatagtaaataccgtaaatatttttataataaattgaaaaaaaaattggaatatgcaatagatttattatattatatttttatgaatgttaaaattttggagtattgaagtaaaaatcgattaaataatgttggcatttatttctataatttacatagcatatctaaaaatttaatacccagcagaaagtttttgatgctgactaaatacatttatataacttataaaatattaaatatgcgaaatctctaatttgatattattctcagttaaataaattcaacattttaaaattctttctacattttacagtttcattcgttaaaataacaatttgaagaaaaaatgttagcaaattttccttaaaataaataattaaaatgacttaaataaaataaattaatgatattattaaattttatatttttcccaaaatttccgatttccggcttccgacatttttggggtcggaattccgatttccaaaaattttgggcctcagaattccgatttccaaaaattttgggtctcggaatgccatccctaatctccactgataataggataactcattgcttcaatatgtgtaaaaacgagacgacttaataaataaatatattattataacaaatatttaaaaaaaaatgcaaaagatcaggaaaaattaatcaataggtttaaaaaattagttgcctattttttgtgcctatttaatgcttattttgcgatttttcatacaactttagccgatttaaatcatttaaaccaataggctaattatcagttttatttaagagaagtttacatttaaaaaattggtgcgataaaaattaaagaa

SEQ ID NO: 42189 - DNA, 979 bp, Heterodera glycines
  unsure (1)..(979): unsure at all n locations
aaaataagtcaaatcagtatttgcgttacattattnttttttctatttcaaaaaattgtccaaaaaaatttttaaagacgatttttgataaaattttcattgcttaggcgatttattttcagaaatttttgaatcctctgcttaggggtgtatttttaaattccaaaaaaatcgattcttaggggtgtatttttttgtttttattgcatttttgttaacaaattttcggcaaaacgccaaaataggcaaaaataggctttttcaaaattttttaggctttttaggcgctaaaaataaaagcctagaaaataggcactaataactcgaaaagtagcttaacaacagcccaaaaaagcatgtttttcgtacgtttaaggccacggggagctcaggaaaaaatagccttttgcctaaaaattggagccctaataataatataactaactctattcaactgactttgcttcgaattgtgtgcccatcgaatgcgttgtgcaaaattcggccgttcgactggtcaccgatcagtgagccgtaaatgcccatttcgctcacaacatcctccaactcagccggctttgcttctcgcatcaaataattctttaaaataaaaataaactaataatgggtcgtttcataattatttttcaacctataaaaagtatgccaaattttaaaagtaaaaacaaattatttgtatttggtatcattcggtgcagaataccgaatttgaatcaaatgaagctaattttaactcaaatagttaaaatttaaaaaagttattgccaaagaaataataaaaccaaagattgacataatcaccgttttttaggatgcaaataattatgagataaactaataatagctttatttaacttaattttttttcttaaattatttaacagattccgattttttaaaattattttcaatttnaaaatcacaaatttatatctttgntcaccttgaccactaacgg

SEQ ID NO: 42190 - DNA, 1099 bp, Heterodera glycines
tcggtctaatggtttcggttaaaaaccgaaaaaatcgaaaaactcaaaaatttctcggtcgaacggtttcggtataaaaaccgaaatcggtaaaccaaagaaaaattttcgatttatttcggttttttgaatttgtttatttatttttccaaaagtgcaagaaactatttttataaacagaaacggctaaaaatcaactctgagcaaatagtagagctattgaagctctatcgaattgattgtttactataagtataagttggaaaaattttaaaaaatttcgagctaggtcccttagaaaatttttaattttttggccccttgggattttagtaattgaaattttgcatacatttgtagcttgggacggcgcatccgggaaaattataatttttgatccatgggccaactgatcgccagtgactgaattcgcatttttgcttgcagtttaggacccgtaactctttttcaaatacacgaatcaaaaaggggaacctcacagttcagcgccaacactttcggcaccgttgctaatatattttattttattaaccaaattaaatatttttggtagtattcgatagctcttaatgttttctatcaacctgcaaaatttaaaatttttttgtcagtttacaaaaaagttatggacaaaaaagctcaaaaaataacattttcacattaaaatttatatttcaataagaaaagaatttattaacaaacaaaaaatggttgcattaaattaccgctttcaaaaaaaaatatgaatgttaatcaaacaaaaaatagattttaaaggttttaaaaaaagacgaaagagacctggaatgcaaggagttgctatgatggtcaagttggattgatttagaaacgaaagctaaaattgtaagaaaattttttaaatgtaaaaagaaatgcaaaattaaattactaaaaaattattttattttaaattttataaaggaatgatgatatatgatttatatactgagtttgaaattaaaattttatattttatttaatttcgattaaattaaagagatctaaaaattaatataaagaacttaattactattttaaaagtgaatttcaaaattag

SEQ ID NO: 42191 - DNA, 1064 bp, Heterodera glycines
aaaaatggcgagcgatgcaatgaccagacgacggaccatttcgggtctcgaatacgaggatttttcgcagaacgaggggaaaatgctcctggaagaggaggacgagggtggtgaaggaggaggcgaactgcttggaggagtagtgggccgaagaaatgtggtccaagtcgaacacgagcatcatctgctcgaagggtcggcccgtctgaagggacagagaaaagggaaaagcgacggacggagcaccgatggccaatggcaccgattgccaattcgttacctgcagggcgcgttccctgcacaatgtgatgcctttctcaattgccgcgagcgaaaatttgatgtaatccttcgattggacagatcgcaacatcccttgacaaagtcgggatgatcactcagccattgttctcccgtggtgcatcgatttgtctctaatgcacttttaagcccaaacatcgctacgttctaaaagcatcccatcattgccctccccaaccattcgcttttccatcaaagtttttgtgctttgcggatagaagtgaagaagagagtggggggggggggagaagccaaaggaaaagcgaatccatcgcaatgcccaaaaagcaatgataaagaaagcattgatttggaataatgggaccaattaagcatgttaggcttccttttcggcattgtgcaccttctacgtcagtatttccgagcagagacatcagaatgggattgccgtcgtggtcagagaggaagccgtagccgcagtatttttccaaaatctgcgtaagattgtccaaatgcattttgactgagtgtgtatcggcactcacttccggcgcttcccaatttacaattttgtccagtccccatgcttttcggaacaccaaatccttccgaatgccctgaataaagatcttttaagcgttttcccccctaagccctcacatcggccgcctcgtcaaatttgccttcctttgacctcagccatctgagaagataagcttcgtccacctcttgcttcagaagctgatgtccaaaatttggcgtaagtcgtttatctgatgttg

SEQ ID NO: 42192 - DNA, 931 bp, Heterodera glycines
  unsure (1)..(931): unsure at all n locations
ataaatctgggcacatcgattgggggggcctgcccagaaaaaaaaaaaatcgattttttcaagtgtctgttgggggtactcaaacaattagggggagcaaaaatccaacgcagaattaaagtacagtatatagggaagattctccggaaggattcggtctccccataaatcggggcgcatcggttcggggggtctgccccgaaagacaaaaaaatcgattttttcaagtgtccgtttggggtactcaaacaattatggggagcaaaaatccaacgcagaattaaagtacaggctatagggaagctattcccgaaggattcggtctccccataaatctgggcgcatcggttcagggggactgccccgaaaacaaaaataaatcgattttttcaagtgtccgtttggggtactcaaacaattatggggagcaaaaatccaacccagaattatagttcagaatagagggaagctattgcggaaggattcgacaaaaacagagagaagaaaacatagggggggggtttctgttttggggggaaagaaaaaaaaaaaaaaaaaccttaaggggaaaaaaaaaaaaagtttggggggcgaaaatttttcccaangaattaaagtacaggctatagggaagctattcccgaaggattcggtctccccataaatctgggcgcatcggttcggggggactgccccgaaaacaaaaaaatcgattttttcgagtgtccgtttggggtactcaagcaattaataaaaatttttagatttttattcatctccctttttgatagtgaaagcatctgagtgcctaaaataacttgtaaataaaatttggttcgtttcagagcagttttgaaaaaatagttatgaattaagtgggctaaaaaaatagaatagtaaagggataaaatttaataaaaaattttaaatt

SEQ ID NO: 42193 - DNA, 937 bp, Heterodera glycines
  unsure (1)..(937): unsure at all n locations
aatattatacttgttaattataatttctaaaatttttcttaatgaataaaattttatttgcttcgaggttattctttaatcaggaagattagagaattgaataaatcatggtttacacggcttgcttaaggcctaacaagcagattcgacaaggttaaaattgaatttacaaaatataatcccttatacaaatgttgactttttatattattctttttaaatttatatttaaaatattaatcgtattaaattcatggacatcaattcattaattaatttaattattttatcaatcattaagttttttcgcatcgtctcagcacgggcaaatctatcattgagctaccgaggcacatccactctttatttaattggccttagcaaccctcgtttccgagttataaacgcccagacagcttcttccttgcattaccttttgggcacagttggacagactcttccgtcgagaatacctccgaccccgtccattccgctaccattttgacatttaattttttttgcccattcaatccattaaaaatctcaattaaaggaacttcttcggaaatatttctcacaatgctaaattttcccnnnncnaaaacncnnctnttaaaactnatnnncnncantaaanaaatattnnacnaattnnannacnaacatnnccaattnaanaacanattttatnaaananactntnnnaananaantcaaaataattaaacaaatttaaatntaaaatcaaanaaattaattaattaannnatcttttaaatacaaattaatcaattttnatcaaattaaaantcaattannaaaatatcnntcataaaatcaaaactcaaaattccacaaagcactcacaatcnatntaaaaatnttcnaaatggctggtaagtgaattaggggcgcgcttgcccttattcaggctgag

SEQ ID NO: 42194 - DNA, 932 bp, Heterodera glycines
  unsure (1)..(932): unsure at all n locations
cgacaagattaagtgcaacgcactgtaattggtgatgtccttcaactgaacacgtgctgcaatatttattccttttattgtatggatatattggaatagaactatacgaccgttggaatatcacttttctatctttattagtttcacctaattcttttatttacacagcacactcgctttcatacattaagcacgctcgtaattagataaacgttcatatacaatagttgagtcggttaccttcacgcacacgccgcaatcaatcgttccacctcgtttccacggagtggttctcgtgtcgggtgtggctcgacttcgtcggggacgctcgagcaaccgaaggaaagggaccaacttccacccataaccatatgtaaaccaaaactagccactcgaaggacggcgaatctcaaacgaagggggcgcaatactcacaatcaacttgtggtgtggccaacaaccgatgggatgttgaaggggaccggaataccctcgctcacttctctcataactcggaagagcatcgaatttcatttcaattttccatttcttacctaatatggttgtccattgcgagagtcgtctgcttgacttatgctggccagtctgcactcattttggaaataggtaaacaaaaataaattacaaaaatgtttttttttaatttaggtttaaggcgttttgctttgtttggtggtgaccacctgcagctcactaaaagcgtaaaattttaaaaactggaaaggtcagcttttcaagctcggctcattcgcagcacaaccgaattcttcttaatttcctataaaggttcgtatcttttatcgtaaaatacttaaaaaatgtttttagctttctcaaatcattcagcgacattatttcgaaatgactgcaaatttggcatggncattggacgaatcatcaaaacccaggtc

SEQ ID NO: 42195 - DNA, 1193 bp, Heterodera glycines
  unsure (1)..(1193): unsure at all n locations
atagaaaaagtggcggaggaggggcagcaggggaaaatggccaatgattgatcaggtaaagagaaaaagcggatgcttcagggtattcagatgtttgtaatttttatttgattattttcgacgtcatggttttgatgtgccgttttttgattgtgccacgtggcacaaaataataaaatacctttttattaaattgagattatagagagtttaatagattaattaatttcttcaaaagtaatttaaaaaaagaacagactcagaaagagagtcaaagaaaatacgtactcaaatatcgtccaaaaaaaaaaaaattaatttggcccaaaaacggaaaaaaacaaaacaaacaaaattataattactaatagagtaaatgtgcagtgtatgcactaaaaaagccaatgaaagatgtcctaaaaattgccaaaatggattccataaaaatgtaaaaacgtttatgtaaaaatatgaagatgacaaaaatagaagcaagacaatggctaaataacatatttaaaaaatcataaaaattttttacgaatgttctatgtactttagagtttttaatttaattatctgacaaatgcaaatattgaaaaaatatttgcaaaatttcctcccataaaactaaaaattatcttaacgcagaaatgccctttttgagccccgttttatgcgtaggagcagaaaaaaaatgcaaaatcatatatttagaaccttagttacctaattaatatctttattgcttttaattgattttttattgttagagaataaaaaactgataaaatttagaggaaaaaccaattaacgatcagagagagcaattgacattatcaaaaatttgccactttttatggattttcaaagcgaaaagctcacgtgaaaagggcaaaaaataaatcggagaaaaatatgttaaaaattcatgaattggatgaggttgttatggattgtggaagaagcaaattgcggagcgagaagaaggcggtaatattttttgttggaatttggcgcaacgaaagggaaagtgcggcgattgatcgcccccgcggngtgcacttggaggaaaagccaccaccaccagcagcacaagcagtaaagtaaaagcagcgatttggtggatgtttgtgctctcacagcacacccattgatgnngctgattaatcattggcgtcagttacagaaaa

SEQ ID NO: 42196 - DNA, 1335 bp, Heterodera glycines
acctatatgaaatgtttttacgacttttaaaaacttactttttttttgtcaaaaaggtgtggcaccatctaaactattacccaaaatccgacataatttctccatttcgcccgtccagtaagctccactttactcggggatagcactcgcacatcgatcgaatacttaatcgctttttaagaatcgttccgtcggacgtcaaccctcttacaacgggcatcgaaaccgtcggtggagtgatcgacaaaaccgatcactcgcaacaccgtcattccgaccaaaaagtctcagatattttctaccgcggcggacaatcagccaaccgtgactattcaggtattacaactacgataattattacaacgctgactatagtcgccagaaaaaagaacatttacattcgatcgagttttaatatttcccacgggttgtccaagcattggcttcgtccctatttaagcaatttttcgtagcattttgtgcttccaaagagaaggaaaaatgggcggaaatctaagcataatagtagttaagacgcatttagtacaaagtgttttaaatgactggattgccaatttgtatctatattaaaatcccttttaaggttttaatttaaaaataattctcattaaaatgaaaaaattaacaggtcttcgaaggagaaaggccgatgacgaaagacaatcatttgttggggaaattcgacttgaccggcattcctcctgctccccgaggcgttcctcaaatcgaagtcacttttgagatcgatgtcaatggaattttgcacgtgactgccgaggacaaagggactggcaataagaacaaaattacgatcaccaatgatcacaaccgactgtcgccggaagagattgagcgaatgatcaacgacgcggaaaagttcgcagaggaggacaagaaaaccaaggaagtggtcgaagcgaggaacgagtttgagtcgtacgcctactcactgaagaaccaggtgaaacggttgtcctttgctagagttcattacgacaatttagctcggagacagtgaaaagttgggaggaaaactcagtgcggaggacaaaacgaccatcgaaggggctgtggatgaggccatttcgtggttggactccaacaaggacgcgccacctgaggagcttaaggagcggaagaaggacctcgaggccaaagtgcagccgatcatcagcaaactctacgcagggcagtcgcctccgcccggcagcgaaacgccgccgactgaggagaaggacgagctgtgaacggtggaatcaccaagtgctaactgtgacaactttccctggtctatcccccttccttccccactat

SEQ ID NO: 42197 - DNA, 985 bp, Heterodera glycines
ctaaaaattgggttattatcaatgatggattagtgtgcacctttattctttgtacttatttttaaacttaaacaagaagagtcttaaagctcataattaaaatattattatttcgtttttaatttgctatttttatccaacagatccggacagaaaaggacgttatcggtggcaccgccgactttcattatttcggcaacaaaagcgaagcggtggataatagcaaatcgcattcgtcggcttagcgtcacaaaacggattaagcaccaattccgaggttaccaactttagtaagtcctaaaaagaaatccattattgagaaataaaataaaatttcatttattcttaatccaaatttaaaagaaataatcagaacaaatgagaatggtcaccagaaaaattgagagagcatttcttgaaactgaaaaacgaaatccgaaacatttttaatcaaaattttggctgaaagcctgggcattaaagcgagagttggggtacaactttggccttgagcctcggactatttgggctttaatagtgagtaatgacacacaataaatggtttaattgccctaaaaatgtttaaaaatatattaaattgcgcattttcagttattttgctgacgaattcactgagcacaaccattgcagaaacattgacctgaccatttacacgccgaacccgaagctgtccaacgcaagtgcgcacctttttcttggctacgacgagcaaattgcgaaggggccgtggtgctatgtggagaaggtatacggtagcaatttattcggtaggtaaccttgacttcgggtaggtactgtatgcatcgtaatgggaatttgactctattcttaacagaatttacaaaaaaattgaccatttgtgattggaccaatttaataatttatgaaaaaatagtaaacgggcaaagccacaaaacagagggaaatgcccgagtttcagcccatagaaaaattttcattataa

SEQ ID NO: 42198 - DNA, 636 bp, Heterodera glycines
taacctaagtaattggagttgcctctgtacaacagtgtacttgttgccttttgtgcaagttgtcatgatacctctaaatcacaattgctgttttactgtctgtacggcaggggtggggcacgcacagaaaaatcccgcggtcacggatcgctcatttaaaaactcaaaattttccaactttttaaacatacatttttttaaacttttttaaaatttccttattataaaaaaaattaattaaatcccggtgcatataagatttgcgacgggactgaaaaagggggggagggagggacaaaatgacctattttgtgatttagagccaatttttttaaagaaaaattaaaggttttgtcagctctgacgaggaaaaattggaattttgaaacgaattttttaagaaaaataatccaagttttcaaaactttttcattaaaattttgaatattcaaaaaagacaatcgcttcaaaaaaatttctttataaaaattttgccccaaaaaaatgagcggcgcgcaaaaaaaaaatcccgcagtcgcggattcaaattgccgcggtcgcggtccgcgcaaaaaaaaatgccgcgaatcgcagtcgcgtcccagccctgctgtacggtaatattctgttatgaaa

SEQ ID NO: 42199 - DNA, 1232 bp, Heterodera glycines
ttttatgtaagaaaaatctcgaaatatgtataaaaaatgctaaaatatgtacgaaatatgaccccaaatatgtactaaaatatgtaaataaaattttttaaaggcctattttttggataaaattcttcgtaaaaagtgaaaaggcataaaatgccataaaaatgaccaaaataggttagaatcacattttagtatttaaaaaattaaatttttgatatatcattttttaaaaaatctattttgaagggatacattttataaaaaatttttaaatttttcaaaaaaattctattaattctccaaaatcctccaaatatgggaaaaaaatgaaaatatgtacgaaaaattgcgaaatatgtacgaaaaagtccaaaatatgtacatatgtaatatgtagaaaaaccccgaaatatgtaaaaacatatgtaaataaaagtcccaatttttgtttgcaaacccaaaaaaagaaagtgtttttcctactaattaggctatggagaatccaggaaaaaatgtgttttacataaaattgacatccctactgattacaaatattttaaagttgaaaccacttttcttaaaaacccaggggtgctctatctacctataaaatttgattccgatttttccattttttctataatttggttcacttttaaattttagcaccaattgtaatggacttttaaattaaaaatatttaaaaaattcaaagctatgattctatttaatattaagttaatcttaattatttttattcgagatataaaaactaatagaagaatgttcatttgagcattaatatacataattaaattttaatatattataattttaaaaatttgataaaaattataggaaaaacttgatttttgatttttgcacgtttctaggaatcgcccatttttgcacttttagcaacgacataacaccctcccccgagtcgcaggatttcatgttggggagggggttgaaagtggcgcgtggtcggggatatcccgaaaaaggctaaaaatgtcggattttcacaaccctaccacgaaacaataaattaatagaaatatcattttaagcgaaacaacacttacgagggcaaacaatcgttcaccttcgaaccggcgttggcatttgacgacgatttcaccctgaaaagttcgttcaaaaaccattttgaatacaatttatacaccaacgattccaacatatttgtgtacgaaaataacaaaatgcct

SEQ ID NO: 42200 - DNA, 776 bp, Heterodera glycines
  unsure (1)..(776): unsure at all n locations
attttgatagngntaaaattttagaaaattngaattttttttttgtaatgaattnaagatgtttnagattatattgagaaatttttttgtgaaaattttggatgaggtggaatagatatttgtgaanttgattagaattgattanattttattatntgtaanattaaanataaaataaagtganttntaattgatgataagtatngaattattgaaaatattttttgtattgtngaaatatattagaaagatttttagaaaatttttggtaaggaaatgaaataaataagttggtaaggagtgaggaaaatgagggaagagggagggccgttggggctcgggtttgggtttttgcagggtttggttcacttagtcaattggcgatggacttggagaataattatttatttgggaacaagtaggaaataatatatatttatttggaggagggacggattgggaaaggagagaacatggagaaaataataaaacaattacgaatgaatatgggaaacgggcgggggaatatgttgactgggtcaaaggttaaatcgataaatgggatatgaatggacaatgaacatcagacggaacgccaaatttaaatcaaatcccttcttctcacatgcccccgtccattcaagaatcggcccccaattctgatcagtctcccccgggcccacagatgcgacgtcccggcgcatggcgatgaaagatggcgatcagttgacgtccggcttgaatttctgaaaaaatggcaaaaacgggagggaaat

SEQ ID NO: 42201 - DNA, 419 bp, Heterodera glycines
  unsure (1)..(419): unsure at all n locations
cggtaacaaactcaaaatttaanttgccacaaacaaatgtctttgtagtttttaatttgtatagataagacttgagagaagcttttatgacagggtaattttggtaacagatcatttaaaagcataagaaacctaaatacgccgaaggcggattatttgcgtgagcatggcaaaagcatgaattcttggaggaggggggggggtgtttctaatgctgcttaaaaaagctgaaattgtatttcgcctcgggcgtcattccccgcgaatctctgctacgggaatttgtgaaggcggaaggagagaaatagcgggagaactttcatatcgcccgcagcaaaatacgtaaaagggctaaaagcttgaaaatgataggagaataagtgaaggaagaaacgattggaaagccaagcgcaaaaaac

SEQ ID NO: 42202 - DNA, 925 bp, Heterodera glycines
tgggcatgcgtggcacccgtgctcagttggaacccgagggcttggcgaatgggcatgcgtggcacccgtgagcagttggaatggacatgtgtgacacccgtaagcagttggaatgggcatgcgtgcacccgtgaacagttggaacccgaggccttggcgaatggcatgcgtggcacccgtgaacagttggaatgggtatgcgtgccacccgtgagcagtcggaaagcgagggcttggcgaatgggcatgcgtggcacccgtgctcagttggaatgggcatgcgtggcacccgtgctcagttggaacccgcgggcttggcgaatgggcatgcgtggcacccgtgagcagttggaatgggcatgcgtggcacccgtgctcagttggaatgggcatgcgtggcacccgtgctcagttggaacccgagggcttggcgaatgggcatgcatggcgcccgtgagcagttggaacccaagggcttggcgaatgggcatgcgtggcacccgtgagcagttggaatgggcatgcgtggcacccgtgagcagttggaatgggcatgcgtggcacccgtgctcagttggaatgggcatgcgtgcacccgtgaacagttggaacccgagggcttggcgaatgggcatgcgtggcacccgtgaacagttggaacatgcgaggcttggcagtgaatgggcatgcgtggcacccgtgaacagttggaacccgagggcttggcgaatgggcatgcgtggcacccgtgagcagttggaatgggtatgcgtggcacccgtgagcagtcggaaagcgagggcttggcgaatgggcatgcgtggcacccgtgctcagttggaatgggcatgcgtggcacccgtgctcagttggaacccgagggattggcgaatgggcatgcgtggcacccgtgagcagttggaat

SEQ ID NO: 42203 - DNA, 843 bp, Heterodera glycines
tgactttaattttcatcactaatttttcactcagactcccattcttaccagtgcttgtttttcccggttccggttgccctaccgggaccgggacctgagcttttcaaaatccggggccgggaattcccggcccggtcccgcttcactctattaaaaagttaaatctgattttaagataggtaccatccaaaaataaaataccttcatacataaatcattcttttattcttttttgttatctgtttttcctttgcatttattaactctttttcagccagccatgcttagcaactttttttgcggcgaaattaaaaagttacctgttccgactgccgccagtctgattctgctccttgtccttctttccgtcattgcattagttgtcatcgtcacactggtgatttgttttatacaagaaaatgaattgcgtttcgccccttttagggagtgcttttctacaaaaaatataaacagacgcgccgcacaaaggctgtctcttcaaacaaaagtgaaactccggaagtgccttcggacttggctgacgaagcggcggagtcttcggactctgatgaaggccgtggtggagtttcgacggcccctcccgacatggaatcagtagtggctgacgaagcggcggagtttttggactttgatgagggccgtggtggagtttcgacggcccctcccgacttggaatcaggacgcaaataatgccatgatggaatttaggcagtcaatattgtattgttgtatatattaagtggaagtggaaactatctataactgtctgtgactgttcctagcatcataattctgactgtatcgcccgaataaaatgctttt

SEQ ID NO: 42204 - DNA, 99 bp, Heterodera glycines
cccaggcggaggcgagcggtctgatcgtgccgatgaccagcctgctgatggaggaggtggctcgcgagctgagcatggagcgtgacctggtgcccgacg

SEQ ID NO: 42205 - DNA, 1035 bp, Heterodera glycines
gtcatcagttgttatgctttaaaaatgattttcgggccggttgagttatatgtgaggtatgagcggtccaaaaaaaatggctatctctttttttggcaatctggtaatagaaatctctttggaaacaatgacagtggctgtcatcagttgttatgctctaaaaatgattttcgggccgtttgagtatatgtgaggtatggacggtccaaaaaaatggctatctctttttttggcaatctggtaatagaaatctctttggaaacaatgacagtggctgtcatcagttgttatgctctaaaaatgattttcgggccgtttgagtatatgtgaggtatggacggtccaaaaaaatggctatctctttttttggcaatctggtaatagaaatctctttggaaacaatgacagtggctgtcatcagttgttatgctctaaaaatgattttcgggccgtttgagtatatgtgaggtatggacggtccaaaaaaatggctatctctttttttggcaatctggtaatagaaatctctttggaaacaatgacagtggctgtcatcagttgttatgctctaaaaatgattttcgggccgtttgagtatatgtgaggtatggacggtccaaaaaaatggctatctctttttttggcaatctggtaatagaaatctctttggaaacaatgacagtggctgtcatcagttgttatgctctaaaaatgattttcgggccgtttgagtatatgtgaggtatggacggtccaaaaaaatggctatctctttttttggcaatctggtaatagaaatctctttggaaacaatgacagtggctgtcatcagttgttatgctctaaaaatgattttcgggccgtttgagtatatgtgaggtatggacggtccaaaaaaatggctatctctttttttggcaatctggtaatagaaatctctttggaaacaatgacagtggctgtcatcagttgttatgctctaaaaatgattttcgggccgtttgagtatatgtgaggtatggacggtccaaaaaa

SEQ ID NO: 42206 - DNA, 1217 bp, Heterodera glycines
tgctttcaaattaaatctgatcagatctgaatgaattccttttttgaatttattttttcaaaattaaatctgatcagatccttttgaattgctaatttcaatttattttttcaaaattaaatctgatcagatatgaattaattgctactttctatttatgctttcacaattaaatctggatctgatctgtatatgttttgataattaattaaagctaatcttaattaattgctaatttaaatttatgccaaattaaatctgatctgaattaattgctcatttcaattatgctttcaaaattaaatctgatcagatctgaatgaaatgctaatttcaatttattttttcaaaattaaatctgatcagatatgaattaattgctaatttcaatttatgctttcacaattaaatctggatctgatctgtatatgttttgataattaattaaagctaatcttaattaattgctaatctcaatttatgctaaataaatctgatctgaatgaattgctaatttaaatttatgccaaattaaatcttatctgaattaattgcttatttaaatattcaaatctgatctgatctgaatttgctaatttcaaattttttcgtaataaatttcaattttgctttcaaaaaataaaattttactgcccaaatgtctgccaacaacggaacattatttgacaatcagctgaccattcaaaaggtggtaatggaaaaataaaaatattattttaaattaatttattttcctaaaatttagaacgattcctccgcctccacgtttgtaagcacattaaataatataaatttttatattttaaatttccataaatttcacagctgattattggactctccgtggttggcattgtgatattgattgccattgccgttttattatgctggctgattttgatcattcgccggaaatgtaggatattaaattaattaaaatttcatgacatttttgggcaattgggcagaaatattcccattcggaacggattccgatgtcgggatcccgaatttaatcactcgggatcacgattccgaccggtttctattgggtataagggatgagtcgatcatcactcagttttaggactatgtaaaaaaaaatttttagtttcaactgaatcaaataatttttttttaatttttaaaaaattagtttatattccattagtagtgtacccccccccccccctccg

SEQ ID NO: 42207 - DNA, 486 bp, Heterodera glycines
  unsure (1)..(486): unsure at all n locations
ttcgcttctgtagtgcatgccgaatgataactctcccttaagggcccnnnnnacncnnnnaannnnnnngaannncctttctcggcagcnacnacgaacggacncngacggcgagagccggacagagaaaggagagagagggcaaaatttcttcgaaggctgatgactcacccaaactttatcccattcgccgctgccaatcccatcgccaattgtccctgtcgacgattttttatgatttgctgacagacggaagcgtaaggaaatactacaaggggacaaacacccgatgctttcgatggtgtacacattttgctgttgagtgtcgtccgattaatgggaaaagcaacggaaaaaagcaaagaaaagggttaataatcgtcggagggaatcacttttcgtctgaccccccccccccagggcattaaatttgttttgctccttaaaattataatgttttgttggattggtaattttaaacttcgg

SEQ ID NO: 42208 - DNA, 855 bp, Heterodera glycines
atgcaaaattgtataacttccgtctcgaaaaaacggaatggtttgcccttcaacgatgcacaagtaattttgtgtttgtagtctgccttaaattaccaaaaaatttgaattagcggggtttttggtccgaggtcccggttccgggttttgaaaagctcaggtcccggtcccggtagggcaaccgggaaaaacgcactggtaagaatggggtctgagtgaaaaattagtgaagaaaattggagtcaaagggaaaaataaaaaataataattaatatattctttaaaagtaacactgcccaactgtgcaaatggcctaatggctagtctccttgactttaccttcttctttcccctggttcaatccctctacagaaattagattattttcaatttttttttttttgtatactcgtgggtttcctataaagaaaatatgattcctcatagttgttttttaaattgatacatattttatcattttttaaatgaaaatcctaccaattgagcttaataatcgcaaaaaccaaccttttttgttgaaaatgtgttaacaaattgcacccaaatttttaaaatttcccccggcggcgcctatcggcaccgccggaccccttctttcccaaaagttttttgaaaaagcgctccgaaaaaaagtgatgtgaaaatcaaaatctgaatttctattaatattcgatgatttagtccaaaaatgattaattgtttgaaataattgaagaaaatttgtttgaaaattttcatttaatttaatttattttaaaaaaccaaataattttgtattattttcccttgatataaattaaaatttgaattttttttaaaatttgtaaatttttt

SEQ ID NO: 42209 - DNA, 296 bp, Heterodera glycines
aaaaatcacgcattccgtttgcttttacttatgttttcgttttttaaaatttttgtgtgttacctatattgtttgtatagtataacattgcgtttttagatcttgaattgtttgagaatgtttttgtcactgtaaatgcggcggacggtgcgcatttgttggtgttcgacgacatcgaacggtcgggtggtagtcgggcggaacaccgattgcacattggtgaccattacaccaccgccgatgcacactcaccagcggatgaacagcgaaaacatcacggaatacggaggacctct

SEQ ID NO: 42210 - DNA, 861 bp, Heterodera glycines
gagtcccagagattgaaatgctggtgggttgagtcctagagattgaatgtcatgaaaagttgggggttgagtcccagtgtttagaatgccgcagatttgagtcccagtgtttggaatgccggagatttgagtcgcagtgtttggaatgccggagatttgagtcccagtgattggaatgccggagatttgagtcccagtgtttggaatgccggagaattgagtcccagagattgaaatgctggtgggttgagtcccaatgtttagaatgccgcagatttgagtcccagtgtttggaatgccggagatttgagtcccagtgtttggaatgccgcagatttgagtcccagtgtttagaatgccgcagatttgagtcccagtgtttggaatgccggagatttgagtcccagtgtttggaatgccggagatttgagtcccagtgtttggaatgccggagatttgagtcccagtgtttggaatgccgcagatttgagtcccagtgtttagaatgccgcagatttgagtcccagtgtttggaatgccggagatttgagtcccagtgtttggaatgccgcagatttgagtcccagtgtttagaatgccgcagatttgagtcccagtgtttggaatgccggagatttgagtcccagtgtttggaatgccggagatttgagtcccagtgtttggaatgccggagatttgagtcccagtgtttggaatgccgcagatttgagtcccagtgtttagaatgccgcagatttgagtcccagtgtttggaatgccggagatttgagtcccagtgtttggaatgccgcagatttgagtcccagtgtttagaatgccgcacatttgagtcccagtgtt

SEQ ID NO: 42211 - DNA, 351 bp, Heterodera glycines
attataattagagtgctcaattttcagcacaataaatcaccgattaagcactggaaacagcaccaaatttttccaaaataagcatgaaaatagcacaaaaaaggcaaatcagcataaaaaattggaaaaaagcataaaaattaagagattaaaggcatcaataatttaaaaaagtcgtcaaaaaaggtttatttgctccctgattataaaaaacctccaaaatagaagctaagaatggttatgaggtacctaattttaaaaaatcaaaattttatctaaaaaataaattaaataattttggagatgaattatttttgataaaatttttcatttcttagggatatatttttc

SEQ ID NO: 42212 - DNA, 947 bp, Heterodera glycines
  unsure (1)..(947): unsure at all n locations
aatccgggaacaaattttcagctacctatgcccctgtttatcctcttttaaagattaaaaaaacacaaattttgtatccaattttaaacatagaaagcaaatgtcgggtggtaaatgtccatgagcggcattttttggcattaaaatttaatttccgtatgttgattctacctattgttgagagatttttgtacggatttggagtgcgccccaataccattgaaattgggtttgaattggaattaggaaattttggctcaaattccttgaaacacatcgaatggcacacacctttttcttcaccatcattatttatgttcatctttagacctgtttcaattgcggcaaggttggccatgagctgtccaagtgtccggagccgcgcgatgcgcgccgtatttcacagaatcggaacagtttcggcagccggcgacgagaaaggtgcgggggagggggaggggaggcggcactttgaactgagacaggaacacgaccgacaaatcattttctaattatgttccggcattttaaaaaatccggacactaactttaaattaatacattttctacgggttttcggaaagtcactcgcaaccgattttggcaaaaaaagggggagagggtcgaaacacaattttaaaaaatgcagtcctagaggcttgccttttttcggagcaccacctttagaaacaaataaaaacaaaaatttttgttattggtaccatttgtctcgaactttttgcgaaaatgaatgtccgtccccacttttgagtcagtttgaaccaaaaaaaaaatcaccaaaatctcagggtgtgcggtataaggttgctccaatttttccaaaattgccttttttaacctctaaggagtgccatttgaaagctcactntttcctctgaggtttccgccatattttccactacccattctatgncaaaatgttttcg

SEQ ID NO: 42213 - DNA, 977 bp, Heterodera glycines
  unsure (1)..(977): unsure at all n locations
aatttttcagttacattctcgcaatcctgacgcgtataaggttggaaaacatttaaattcgaaacatatttttgcataaggtggagtttcgctatgcgcaacacttcgccaatatgccaatcattggcgccgctttctccaacacacgcggcagtggctatctgatcacctcctatgagaacttcaatctgttgcactacaaaattacgcgccggccgagcccaaacccggcaggcggtgagggccaacagaaggaggcaggtgaagcggaaaaggaagtgccgatgttgggttgatcagcaacagtgggcgaaaaagcggcgccggcatgtgatcagtcaatttgaaagaaaacagtgatcagagaatctttagtatacaaaggaaatcgcacaataaggaaacgtataaaacatagagatagttgaatatagaccggcttgaaaccaatgatatctgttaaacagcattaaacctatcagaaaagtaacatttttttttgccaatcaaaagggttctccataaatatgaattactctcctcgttatttataaattcattttagccgttatttttattattatttcatttttaattttttatgtttttttgaaattaaattttgtgtctttattttgaaattttaaacgcagatttccaagcacaatctttgatagctatttatttgctatttctctgtcgaaccacttatcaccggtttctacagactttgaatccaatgaagaatctgatcccttaaataagggtaattattattttttttttgctgtgatattgtaatattaagcaattagttgacaaaagagtgattttaggttaattatagctaagaaattatgtttaataattttggcctttggtaaacttttcatcggtgaattnngttgntattanggtgaaattttcgttgntgcaaatgcttttactcgccaattnctttcatcttnttcttgaca

SEQ ID NO: 42214 - DNA, 808 bp, Heterodera glycines
  unsure (1)..(808): unsure at all n locations
cccccccttccgccccctggctacgggcctgcctcacattcctaactcagaataatccaaaagtaaccattttcactgttatttatgtctttctcattaatcacattctacctttccgttttacttttgcttttaaataaactttccaaaaaaaatcgctgttctgcgtgatccagtgaaaatcataattttattaaccaaatgcacaaatctcaaaagtaaattaatgccttttggtgggtgcatttctcgcgaaaaaacagcagaaaatattcattctaaggccttaccgataaataaccttttgaattatctcgaagaaagtaaagaaaaatgataaacattaatgttttttgaccattattaatttattacgataaaaaaatttcttccgctcattatctccaaatataatataaaaaatgatgggacggggcgagcgctgggggaggggcgaggttgcaaaatatgcatcaaatatgcacaaaaaaacttgaaaattaggggtgcaaatttattttnaaaaattttcttcactagtgcacttgccaatgagctgctacatttcttttataaaattctctttagcaaataatgacattttttaaatcaaaattttctcatgaaaaaaaaaatttgggggaagattttttgaaaaattttccaattctttaatggggtttttaaaatttttcggccgattccttaggggggattttttttgatttttttagggccgattcttaggggggttccggttttttttgaatttttttttaaaaaatttttccaaaaaattgcaaaaaat

SEQ ID NO: 42215 - DNA, 120 bp, Heterodera glycines
agtggaagtgcccgacgttgaagcagcagcattcaaagtgatgttaagcttcatctatgctgatgatttgagcgaattgagccgggacaacgcaatggcagtgctttacgctggtcggaa

SEQ ID NO: 42216 - DNA, 940 bp, Heterodera glycines
gttgaatgccaaaaaataatagttttttggggcatgaccagcagatttgtgatcagaataataattgctatgctgatcaatgcataaaatgccttggcaaattgtttggtgccattccattcaaagcatttcagtccaaattggtttttctgatgattatcattggagttgtgatgatcaagtaatattttgtagtgcaaacctaatttataaaataaattattaatgaaaatttattatttattttagttttaaaaaaaaataaataaacatttaaatgccaattaaatttaaatttttatatcattttcggtgaactcgtctatcatttttcagtttttaaatgataatttaaaataaaaaatttttacccgaacgtataactgccggcataaatatatttaatccgctaaaaaaaaaaaaaaaaataatttattaaaattaattatacaattcaagatgaactgaacggttaatatatatgaatgaatttgaatggttttgaaattgtgcaattagtgaaggaactttttttcttaattgtactattaaatgttgaatatttgaactatatttgcgccaaaaaagcacactagcgaagattcaattgtgcaatttaaaagatttctaataccgataaactcaattcaattaaatttgatgtatttacaagtaaataaattttgaaatattttttaagggcaaataaaaaagaaaaggcattctttaaaattagaaaaaaattttgaaaaaatttccaacaggttaggggttagagatttaaaatttaaagtaaattaaaaaaatatatttattcttctattaattattgccataatgtgtcattaaactaatgaaaaatcgacaaattaattcgtctaaatacacattgacatctttcaattttgcccagcccaattagccctctgtcattcttttt

SEQ ID NO: 42217 - DNA, 774 bp, Heterodera glycines
taattttttttctttgtcatccaaatccaacattattggagtcattcgaaaacttaatatgtttagaagctttttctaagccattacttcgcgattagacaattaccaaaaaaaggtatacacgaaaatcgaaaaaaagttcaaaaattttgaaattttttcataaaaacttttttatatgcacgaaagttgtttgttttataaggataatagagcatgctaaaagcttttcaatgataccaagatttttggatttggacaacaaaaaaaaactatagtggatcttacatatccattttatttaaatatcatgaaaattttattgacaataatattttattgttaacattcaaaaatgtgattagccaaattaaacctgaaaaaataaagcaagaaaaaagttttgataaaaatatttggccaaagatgaaacgatggaaaagaagaaaatctttgccaaattggtcaaataattcatggagaaacagttgatcagaataaccaacttgaacaaaatgggcaacaatttaaaaaaatttttgatgagaatttgggagtgaaagaagggaaagaaagtgaagaaatgtcaacaaattgtggtgatgaattggaacaattggcagaaaatagtggacaaatttgtgaaactttagatgataagaagaaaagagaaattattaaaaaattgcataaaattaaagaaaaaattaagcaaatgggaaagaaacattcagaaaaagaacggaagaaaattgaaagaaaaattgcaaaaaa

SEQ ID NO: 42218 - DNA, 871 bp, Heterodera glycines
tgggttgagtcccacgattggaaagcctgagaattgagtctcagagattggaatgctggtggcttgattttcagtgattgaaatgttggtgggttgagtgccagtgattgaaatgctggtgggttgagtcccagagattggagaaaaagccaagaaaatgatgcgaggccgcgaagcggccgagccagtcgattttatcattcataattctataacacaatcgtactgcctagcgggggatgcgccgaaggcgctgaccccgctagtgtaaggatattttcgactaaacataaccaattccgagtttcatgaggcatcaacttcattcttttcttgtcctgcccaattgtctcaaatgtatacctaaaaatgcgctaaaaatgatcaaacccgtttttagccgaatatcctgtcaatatttccctattagaaacgatactgtgaattctttcgcctctttaatattcattcgtgctttgcttcggattagtctaaaaatttctggacgccaattttacatattagccaatttttattttatttgtgaccgcaaatttttacatactagccattttttattttattgtgaccaagcatatctttcctcgtatttctgggatttttttcagaatgtggtcatagaataggtgggttgaattatttgtattttttatgagtatcatgtaagcatattttcgactaaacataaccaattccgagtttcatgagtcggattagtctaaaaatttctggacgccaattttacatattaggcaatttttattttatttgtgaccgcatattttacatactagccattttttattttattgtgacccagcatatctttcctcgtatttctgggattttt

SEQ ID NO: 42219 - DNA, 985 bp, Heterodera glycines
  unsure (1)..(985): unsure at all n locations
ggtccaacatttcgccataaaattttggcactatccccctacccttttaagggggatagacaccaataatttttggaacatggcctttgtatccatcctttaccggngactatggggatggtactcatcctcttattggaaaaaaaccggctgatgctttttaaattacgtcctcgcgtgttcaaacgttttcactggcggccgacattctgctggggctagaaaaaagaattatatatatacaacatggtttttcacgttttataaacgaaatttttttcaaaaaggggtcgtgccatagccagtagaatcgcaggaaaatattctttttgtcggagtttcggtcggcggagtttcggcgacggaatttcggcggtggatttgtcctgttccgctatagcccccccccccccccccccgaaaccgaaaatttttaaaacaaaaacgagaaaaattctgaaaagttataccatttcttaagaaatttcattaaaaatcccagttttcaaaattttgtcctaaaaatagtcgccattttttggaaaaacctgtttaaaaactggtcaaacatttgccacgtgatcattgccccctcccctccgtcctcaccacctgctgatgttcaatttgctggtgcggcctaagccgagctctgcagctgcgggtgccgctgctccctccggattgcttttgtcgggctcttgttcatctgacgaattggtgggtttggcgcgacggccactgaaagagacggtcaaagatgtatttttagggcaaacaattttcgttatatagaaaattaattaatttcttttaaaattgttccaggaatttaaataaggaatattattgaaaaaaattccgcttaatcattttaaaaaattgaataaatttttttcgaatttttttttcaatttatatatttttttaatttttagtttacttcttgcagcagcagcaataaataatcaacgcaataattgca

SEQ ID NO: 42220 - DNA, 1515 bp, Heterodera glycines
  unsure (1)..(1515): unsure at all n locations
tttggctttctgtgttgtgaccaacatcgtcgtttggttgcgcaaggtttgtgttttcattttttgtttgttccacgttatgaacataagtgttttgtcttcctgtgtcattttttgtttgttccacgttatgaacatttgtgttttgtcttcctgtgttttgaccaacatcgtcgtttggttgcgtattagtgatttggctttctgtgttttgaccaacatcgtcgtttggttgtgtattagtgatttggctttctgtgttgtgaccaacatcgtcgtttggttgcgcaaggtttgtgttttcattttttgtttgttccacgttatgaacataagtgttttgtcttcctgtgtcattttttgtttgttccacgttatgaacatttgtgttttgtcttcctgtgttttgaccaacatcgtcgtttggttgcgtattagtgttttgtcttcctgtgttttgaccaacatcgtcgttttgttgcgcaacatttatgtttccggtttttttctcttcccttttatgaacgtttatatttccaatttgcgatacttccccgttatgaacatctttattaaaatttgtttttttgctttcaattggcgattttaaattaaattttgtattttcctgttgcgtttgattgttgctctttcgtccttcaaatatttctgtttttattttctctgcattataaatgagggaaaagggtgtgggtgtaggtaggaagcaatttgctgataaggaaattagtcggcaatgaagtgggaaagcatttttgaaaaaaaaattgaattttgataattgttcgaatccgggttcggagttcgaaatgggccaaaacggacataatattcgggttctacgaccccgaaagcccatagaaacgactttttattaatttaaaatcaatttaacaaagagaaaaattttgttgacacaaaacccgaaagtaccattaatttttatcaataattttgaaaaaacctattttgacattttttatgaacaaaaaaatatttttttttgataaagaaagtgacttaattggaccgtaatgcatgccattgagtgatgaaaacttgcgcaagttaaaatttatttgctgtccgattctgctgtttgttgctaatgtttgctgttgttccattcgctaacaaaaatatttccaatttttctctccataatattttaattcatttacctgctgctgttttgaaattcgttctcgtccggtgtttgtatcattttcagaaataacatcgtttgtcgctttgttcattaaattcgcttctttaaataattagggcatcgtttacgtcttaattaacccattaatattgtcacaaaccttcaaaattttcttgctgattgttttgattaaaattttcacttttactttttttgaacttcactataagactttttaatttttggtagttttttcctgttttatcttttggctnttttggcaccaactccgacgccaattgcattgatgtattgtcatcactctc

SEQ ID NO: 42221 - DNA, 1039 bp, Heterodera glycines
aaaatccatcccaaaaaaagtaaatttttttgaaatttttattcaacagcaagaagacaatgtcccaaaaaagaaccatggacatatttacaaataaatgtatatatcacaagacagagacacaatctatcctcttttaaattggcagtcaatgttatcacggcggtctcgagaattcaatcctcctctcattgctgcgcagcagcagcaccgccaccctcctgacttccgctcgcgctcccttccgtactttcttcatcggagtcggactcgccacttccttccgatgattgctccacatccgattcgagctccggcagcacgcacacctcggcaagagagacgccagagaacagctgaaatgccaataattttgatgtgccgctgtctgtccttgtgccgcaaaacctctgccactcaatcactgaccttcctcaactcgtcgttatcgcgcgctgcagttcggatgtgaaatgcactgagacgcttcatgccttcggcctgcgtgatctcgccaattttcttgagcagctcgcccgtgatgtgttccagcacagcagtcatgtagaccggcactccgttcgcgagacgtttggcatacggacctgtggatgtgaacaggaaagggaatgtatgattcgattgtgaatgaaacaaaattgttgtcccaatttccgtcttcccaatgaaccgccgctgtctctccaattttgcatcgtttcattatccatcggttgtcccatccctttgctttggccaatgtcagcttttcctttgtccattcgttcaccaattcgaatggcaccattggcattgacggcgtacgaacataaaaatgaatttcgtaactgacggaagaaatggcattggcacggagaaaatgctaaacaatttggaaaacaaaaatcacaaaaatgttgggccacacctccttgaaattgttgatccaatcgaagttcgtttgttcgttgtaattatcgcaatgcaatcgcttgggttggccatcttttctcggagagtgcaaccatttggacaatgc

SEQ ID NO: 42222 - DNA, 1011 bp, Heterodera glycines
tcaatctgtcaatccttacggtgtccgggccgggtgagtttccccgtgttgagtcaaattaagccgcaggctccactcctggtggtgcccttccgtcaattcctttaagtttcagctttgcaaccatacttcccccggaaccggaagactttcgtttccgggaagctccccaccagggcgaataaatccgccggcggatcgctagttggcatcgtttacggtcagaactagggcggtatctgatcgccttcgaacctctgactttcgttcttgattaatgaagacattcttgccaaatgctttcgctgtagtccgtcttgctacggtccaagaatttcacctctcacgtagcaatacgaatggccccgtttgtctctgttaaccattatctcggtcagcaaaaccaataaaatcggaccgaaatcctcttctattattccatgcacgaacattcaagcgaaacgcctgtttgaagcactctgatttgttcaaagtaaactcgccagcccaccgacgccgaccggtaaaggccaacgccggggaaagaccggcagaaaagccaaccaaaccagtaacacacaaagtgtgcaccggacggctagcacagatccaactacgagctttttaaccgcagcaataattctatgcattttgagagctggaattaccgcggctgctggcaccagacttgccctctcatagatactcgttaaagggtttaaattgtacccattccgatgaccggcctcataagagatcggtctcgttatttctcgtcactacctcctcgcgttgagagtgggtaatttgcgcgcctgctgccatccttagacgtagtggccatttctcaggccccttctccggagtcgaacccttatcctccgttacccgtcatcaccatggtagtcagatacactaccatcgaaaggtgataaggcagacacttgaaagacacgtcgccggtacagaacgtgcgatcagcttagttgttctgagtcacactggacgccc

SEQ ID NO: 42223 - DNA, 829 bp, Heterodera glycines
gctatttctgcttttcgttgtgtcgaaatgctacggaggaaatagcgggaacaattgctaataatcatatttttgtttgtgccttagaaatgtttcggcgcttttcccttcgccggcactttcttgttttgctggcggccccaccgcgaacattagcgacatcgccggagggaaatgaccgaaatttgtggccaattgatggggggagggatgggcgagcggcgggggaggcaatggcaattggagaaggatgggaaagtgcgaagggatgagtgggtggaagagaagagggatgaatgccgaggcgggagaagaagccgggcccatcgcttcgctttctctggggtggctaaggggaaagtgctcttccccccacccccagcgaattcttctctctccctcatctcatctcttctctctctatctctccctctttctttctctgtcctactccctctcttcctctttcccttggtgtttttccttccttcttctgcttcttctctctctgcccattgcttctccgtctcccctcgagggtcaaatgcttttcctctcattatcacatccttttcgcttctccccacttattgattttgaccatctctctgttggtcctttgggtgatgagctttaccccccccccccccctattattcgtctgtccgttttaccaccccatcaattattattttaaagggtgacaaatgggctccaaaattggcttccttctgctggtggagaaggtgatgatggaaaaattaggaaagaatgtcaattttgagttatttacgaaggttggcaaaaatatgcacacacataccaggaa

SEQ ID NO: 42224 - DNA, 994 bp, Heterodera glycines
  unsure (1)..(994): unsure at all n locations
attcatctccctttttgatagaaaaagcatcaaagtgcctaatctaacatgtaaataaaatttggtgcgtttcagaaccctttctgaaaaaatatttaagaattaattttgcaaaaaataaataaaaacgaaagactcagattttcgaaaatttttttgagccagctagctcggcgctcatttcagtgtaagttagtcctttaccggggagtatccctgcaaagtttggtacgcttctgctcaattagcaaaaaatatgagtgatcgaattttcactaactccccataaatctgggcgcatcggttcggggggactgccccgaaaacaaaaaatcgattttttcaagtgtccgtttggggtactcaaacaattatggggagcaaaaatccaacgcagaattaaagtacaggctatagggaagctattcccgaaggattcggtctccccataaatctgggcgcatcggttcggggggactgcccctaaaacaaaaaaatcgattttttcaagtgtccgtttggggtactcaaacatttatggggaacaaaaatccaacgcagaattaaagtacaggctatagggaagctactcccgaaggattcggtctccccataaatctgggcgcatcggttcggggggactgccccgaaaacaaaaaaatcgattttttcaagtgtccgtttggggtactcaaacaattatggggagcaaaaatccaacgcagaattaaagtacaggctatagggaagctattccggaaggattcggtctccccataaatctgggcgcatcggttcggggggactgccccgaaaacaaaaaaatcgattttttcaagtgtccgtttggggtactcanacaattatgggcagcaaaaatccaacgcagaattaaagtacaggctatagggaagctacntccgaaaggattcggtctccccataaatctgggcgcatcggnttcggggggactgccccgaaaacaaaaaatcga

SEQ ID NO: 42225 - DNA, 1522 bp, Heterodera glycines
  unsure (1)..(1522): unsure at all n locations
aggtcaaactaggcattaaattcgatggggtatatttgaaagtaaatccttaaaaatgccggctnaagnngctnagccnggngcatattctttgaaaccgtaattaatttaaaagntaattaattttcaattaaataatattaattcttaagacattttatattttcttgatatcgctgtccaatgtgataattgtttgccgctgctttctcaatttgatgattatatattctccgattataataaccaattatgacaatcatctaaaaattcgatttgaaattgtctaatatatttttttaccaaatattccaacaagcttaaaattgtcgaaattgatgagctgatcaaattaaattgcgtaaatgtccccgaccactgctttattattgtgtttgtcaaagcgattgataattaaaaaattttaggctaattagtacgtactgtatttatttatcaattagagttccattaccgtaatactcaaccatgtacaaatgaatacgcattttggaactgtttcgtatgaatttgagcgcattgttgcaataaatcgttcaatgataagcacatgaccaataagtagccgaaaaaaaccgacaaaagccataatatccttgagaaaaacagagtataattgtatgaaaaaaggtttcaacacctaattaaagccaataaaaaattgaattttcgaaaatgagaaatattgtccagaaagaaaattacattattttacttttgtaattgtttattctatcctacaatttttaatttatactaattcctctttttattagttaaataaacaaaatttaattttaatgattttttatgagaaatttaaaataaaattactttttttgacataaaaaacaacaataatttttcagaccttaaggacgacatttgtcgatacaaattgattatttgataggaatttttcggcaataattcctgctcggccaaagaggtaaacgataagcgcaacactatgactgatcagaatgcttttcatgttgatatgtaaaattttggttggacaaataactgccaaattcaaaaaagcaatggccaacacaatgccataggtgaacagttcaaaaaaggaaaatatataagcaaaaacgtcgactgtgacggatgggaatgtcatttgaacaaaatctgttaaaagattttcacaatttattaatttctttgaattatacctacaatttgaattaaaaaataaatttggttaaaaaaagcaattaaaatttttgatggcactaatagagagagggatggatggcaggggtgttgctagagcataatcaaataccaaattcgataaaagcatttaaaacgctaccaaattaaaatacaagaaccagaatgcaagaacgagaagtccaaaaaaaatagcaagtaagcgataagcgagacttgcaacatccctggtgngtggcatattttttaatcatctaacatttgcngtggcattatagagggatgggtggaatattttttattgcattaaaat

SEQ ID NO: 42226 - DNA, 1349 bp, Heterodera glycines
  unsure (1)..(1349): unsure at all n locations
aaaaaatcgattttttcaagtgtccgtttggggtactcaacattnnatgggagcaaaaatccaacgcagaattaagtacaggctatagggaagctattcccgaaggattcggtctccccataaatctgggcgcatcggttcggggggactgccccgaaaacaaaaaaatcgattttttcaagtgtccgtttggggtactcaaacaattatggggagcaaaaatccaacgcagaattaaagtacaggctatagggaagctattcccgaaggattcggtctccccataaatctgggcgcatcggttcggggggactgccccgaaaacaaaaataaatcgattttttcaagtgtccgtttggggtactcaaacaattatggggagcaaaaatccaacgcagaattaaagtacaggctatagtgaagctattccggaaggattcggtctccccataaatctgggcgcatcggttcagggggactgccccgaaaacccaaaaaaaaattttttggataaaaattatttaaatgaactgactagataatatttaaaataggttatttctcttcctttcagtatccctgcaaagtttggtgcgcttctgatcagtttctgaaaaaaaagttaagcctaaactttttggcctgtttaaaaaggaattaaaaatttttaaaaattttattcacctccctttttgatagaaaaagcatcagagagcctaaactaacatgtaaataaaatttggtgcgtttcagaaccctttctgaaaaaatatttaagaattaattttgcaaaaaataaataaaaacgaaagactcagattttcgaaaattttttttgagccagctagctcggcgctcatttcagtgtaagttagtcctttaccggggagtatccctgcaaagtttggtacgcttctgctcaattagcaaaaaatatgagtgatcgaattttcactaaaaaagttaagcctacattttttggcatatttaaaaagcaattaaaaaattttaaaatttaataattttcctgcaccgaaggtactcactcggcctcttcgcggcctcgtggtgggccttcgcccccccccctcccacgcccttcagagcacgacaaatatttcaacaaaaattttgaaatcatgtttcccactcccttctcccaggggtattattttgtaaagtctttttttccccaataaacttgtcaaaccccatttttcgcaccgtgaatgttatttttattgaattctgaaccgttttgagtagattagactataaaaaattgaaaattttgaaatcatgtttcccactcccttctcccaggggtattattttgtaaagtctttttt

SEQ ID NO: 42227 - DNA, 1404 bp, Heterodera glycines
  unsure (1)..(1404): unsure at all n locations
aaacataataaatgtacacttaattgaattaaaataaaaaaagcnaaatttgttagacaaggcctcaaaaatttcatttttcaatttataaagaaaatnttaggaaagcaaaactttcagaattatacaaaaaaaaaataaataatttattttttgttcactaaaagccaatctttagggatgcaaaaaagtctcagtctgaaagaccgaaatcgaaaaaacacgagacttttctcgaggtccgagactctcgataaataaactttaatatttgtttaataatttatgttttttgttcattcaattttttgaatacttttaattacttttcatttttactggaattttaacattctttgttgttttttaaaacaataaattctttttaatttatttaaatgttcactttatttactatgaacgcggagattttcagataataataaatgaattctttaaataatcaatgttaataaataataataaaaaatttcaatgtttccaatttatttagtttttcttttgtacggtggcgggttaacggctgggcgaaattaaattattttaaattttctctgcttctttataaattgctattaaaaagaacttaattttataaacctttataatttggtttgtttttttgcagtggtgtgtttatggtaaggaccaaaacaaacatttgaaattattaaaaatcattttatcacaagaatcgtactgataaggcccgctatcttttcttaaaattgcacttttcgcgagacgccatttttgctattttcgcgcaatgacctagcaccatttaaaccggtcggcttcgcatttttcaatcatgcctccgtaggagtcagggatgtgacgagcatgccaacatctgattcggatcacatgcaggtttccgctttagtccaagcatcagattagaaagaatagcgactaggctcgggcagataccgaccaggttccacaatcagatgattgcgatgccgatagagatcaatattttgcagaagtttggaatgtaaccatccgcattaactttactgacacaataatatcgcatagataaagaagaccttggagttaattattggatctcggtacgatcagacagtgcgctttcaataatctatctcacatatctagggaaataaaagagatcaagagtcttctcagagaataatctgtagcggtcagagaagacatacattcttatatgggcggggacctggtcccggcgaaaacccccgggcgcagcgaagatgtttccgagatcaaccaagtggttggccgtgggttttcatgttcggcagggtgaacaccgcttttcccaacccccccccccccaattagtgttcctaattgggcaattatagcatagtttacctcaaattttcttag

SEQ ID NO: 42228 - DNA, 1215 bp, Heterodera glycines
  unsure (1)..(1215): unsure at all n locations
agaaagaagtccaaaactttttttttaatttttaaaaacctgtcgccgcacttccgctgtgccgtcggtcgccggctttgcttcctccagcagcgggggacccagatatttgggtgccaatgtgctggtccgttcgtccacaaaggcgggcaacgcgtacagcccggtctgtgccgactcgcccacgtagagggtggggaacagccggtcgggcagcttggccgggatgtgcagcagcgtgtcgacaccccgggggatgacggcattctgcaaaagttttaaaatttaataaaaattattctatagtttaaatttggtccatttttataaaataatattaaatatattttttaatttaaaattgcataataatttttgtgaaaatgtaattaattttaatttatcaaatttggacaatttctgtaaatgaatattaaaatattttgtagatttaaaataaaatattttaaaagttttaatgaaaatgctttaattttatcaattttgaagagaatcaaataaatttttgttatgagtttgttattttaaaatctttataaatatcacagatgtatcttttaattttgttaattttttcgtagaattttgacaataaatttttattttttattggcacatataattaatttatatttgttctatttttatttgtttttcttgcctcattcccattttatttaagattttgctaataaaattttccaatttcacaggaattgttgtttttttttggaaatttattaatcagtcctaattaatgaatgtggtgaatgtcaaataattatctttttttaacatttttttctcttttccacgaattaattcatttcttttttttaaagaatgccgctttttaatgcatcaattaattagcaccagtttttttttattacatattattccataggtaattaatccttttgattgattttctggcttttattttttatactatatatccaaaatgctgaaggaaggtgatgacgatgatgaattttttcttcaaaaattcctccattcaaccgacgacggcggacgacaaaacgccccgtcggcggaggggggcaacaaagcgggcggcggtgggggataacaattgtttgtgccgnccttaaaattgtttttgcccgggggatggagggccaaatgaaaaatgataatgtgatatgatgaagccgacctggataaatgact

SEQ ID NO: 42229 - DNA, 735 bp, Heterodera glycines
tgtattgggggtgtttgagtcgagagtcgagaaatctttagaatattatgcctaatgagtagtacaaaatttgatgaatttgaattttttgaattttgttcgaatccgagtttgaaatgggtcgaaatggatgttagaattggggtattcaaaacttcattgaaaaatcttataagaaatttcaggaaaaaaaatttatgaaaattttatgatgaattattgttttttcaaaattccccaaaaatcgctgaaaaatttttaatttttccataatgggtacttacttagttccttttccaatcaaatttttggaaaaaatggtaaaataatgcccgttttcatactgttcagcaacaacagtcttcccgtgaactgttggccttctggctgtccaatgcagccgagctgttgaacatgggccgtgccgacgcgcacctggcgcgtgccgtcggcaccgcactgctccacgaactgtcccgcactgttcaacgcctgttcacgctgttggtcgaccgatgcaagcagcaattgctcgcccacggcatacaaccgcttgtccaccatttgctttcggcacaacagacgaatggcaccattggtgccgtgccgtcgtcgtcgccaccggcgttgatcgccgtgctggacgagtgcctgcgcatggtgcgctgggcactgctcaatccggcactgaccatccaactgttctccccactcttccacttcgtcagcgccacg

SEQ ID NO: 42230 - DNA, 638 bp, Heterodera glycines
tagataaaaatcaatgattttcaaatctgagttcagattcgtgatcagcgcattttttaagcctagaaaaaatagatgcgaaatttttaacatttttttcgtcgggacatcaattcttgaccattgccaaaaatcttattgggatcgagagtccgagttacttttttgaaaacaatcaaactttctctgaacttgtttcttttactttaatcatttccgatttacaggttccatccaatgcgacaaacgatgcctttctgtgcctagaccagccgtcgtcattgttgaccgacttggacgacgtttcgtgcgaccctcagcagcagtgcccctcgctcactcccccccccattagcctgttttagcgttggcggagatcgctgctccgtccgtcgctgtccctcctccatccatccaacaggactggttgttgttgggcgaagaggaagagaggaggaggaggactaaatgaagaatgaatgtgaatgggtggtggtgctgtgtgagcgggggatggtcggacgttttggatgggtgtggttgagaagcgaaaagggaaagacgaatggatcgatgcgactctccaccaattgccaactctctcgccatcgtcgttcccttgccccccccccccatca

SEQ ID NO: 42231 - DNA, 1181 bp, Heterodera glycines
gaggcatcattttgaggggggggggcaggttcgaatccggacggtgtaacattatttttttgtgcatttttacgttattttcaatgattttaattaataaaatattttgttgagttaataaataaaaaattatatttaatttaatttttttttgataaataaattttataagtttaaattaattatttttttaattgatagaatttcatgtatttttttaattaaatttgttaaaaatattttcattttaatttaatgaatttactaatcactgttgtatcaatttatatttaaagatttgttgtaaattaataataaaagaatttatgtaaaaaataataattatcttttaataaagaatttcatattttttttaattgtttataaaaattaatttcatattaatttaaatattcaattattgtacatttcaaaattctctttttaattaataaaaggaataattaatttattttttaaaatttataataaattgcattcaatttttgtacctcttctaatcaatcacagttgtacctcttctaaacacttttgtacctcttctaacaattttgtacctcttctgatcacagttgtacctcttttgatcacagttgtacctcttctgatcactgttgtacctcttttaatcacagttgtacctcttcaatcacagttgtacctcttttaatcacagttgtacctcttctgatcactgtagtacctcttttaatcactgttgcacttcttctaatcattgttgcacctcttctgatcactgttgtacctcttttaatcacagttgtacctcttctgatcacagttgtacctcttttgatcacagttgtacctcttctgatcactgttgtacctcttttaatcacagttgtacctcttctgatcactgttgtacctcttttaatcactgttgcacttcttctgatcattgttgcacctcttttaatcactgttgcacttcttctgatcattgttgcacctcttctgatcactgttgtacctcttttaatcacgagttgtacctctttaatcacggttgtacctcttttatcacttttgtacctcttatcaaatttgtacctcttcaatctctgttgtacctcttctaatcactgttgcacctcttctaatcacttttgtatcactttgatcccttttgtacc

SEQ ID NO: 42232 - DNA, 860 bp, Heterodera glycines
agggagggcggtgcgcaatagaccttttatttttgcggtcatttttaaatttatactctatcccagaaaaatggctatctctttttttgagaaattttatacctcacaaaagcgcttgcgtatgagacggagggctgtgcacaatcgccattttatttcacagaggatttttatatttagaggttatcccagaaaaatggctatctctttttttgataaattttatacacatacaaatgctctcgagcatgatagggagggcggtgcgcaatagaccttttatttttgagggaatttttaaatttatactctatcccagaaaaatggctatctctttttttgagaaattttatacctcacaaaagcgcttgcgtatgagacggagggctgtgcacaatcgccattttatttcacagaggatttttatatttagaggttatcccagaaaaatggctatctctttttttgataaattttatacacatacaaatgctctcgagcatgatagggagggcggtgcgcaatagaccttttatttttgagggaatttttaaatttatactctatcccagaaaaatggctatctctttttttgagaaattttatacctcacaaaagggcttgcggaaagacgggggggtgggcgcaatcgacattttatttcacagaggaattttatatttagaggctatcccccaaaaaagggtatctctttttttgataaaatttatacacataccaatgctctctagcatgataaggagggcggtgggccatacaccatttatttttgaaggaatttttaaatttattctctatcccacaaaaatggctatctctcttttttgaaaaattttata

SEQ ID NO: 42233 - DNA, 1497 bp, Heterodera glycines
cgcagtcggttaagcgcctttcccagtgcatccatcagtttaaggtttgaacccatgaaactgcacctctatttttttccatatacaatataattcaatttttattttttgcatcaaattccaaaaaggaaaatgcgacacaaaattatttatgcgtctctaacttgaaagttaaaaaaatctgttaacaaattcactaaagtaaaatttcaaaattttcacggcggcgccaatcgacgccgccgccgtccccccccccccccggcgtttccccaaaagattttggcaatggtgcgccgtaaaaaagcgattttcgattttttaaatgcaaaaaaaaaagattttttcaattggttatcccataggcttcctaaaatttttggattttccaatttttatatatttccctttttgaaaaaatttagcccaaatactttttcgaataatgatcagaagctcatcaaactttgcaggatactgcagggtgacaaccgattttgtcggatgattttgtttagcagagaaaagtggcggggatggataaactgtgaaaaaagtgtagaaatcccatcccgttgatggaaaaagagaaaaaaaaataaaatgaataaattaattttataaataaataaacgaacgaaaatatttattaatttagaaagatattatacaaatgaattaaaatcaaatcaaaattgaaggtgttaaagtggacgagttatgtgtagggatatcaaaaatatgtacaaaaagtgctcaaaatatgtatttaatggttatttttttggaaaaaaattcttcggaagagggtgaactaggcacaaaatgccataaaaatgatcgaaatattttaattaatttttttttcttatgaaacgtgaattttgtcactgtgtggcattttagtgcccaaacgaaatttcgaaagaaaaactgataaccaaaggacaaagatcgcaacaaaatttcgggattttttgccggtgaaaatctcgaaacagaaccaaatgtgaagtacactaacatgatcgactatgaaacaatgccagaaaagccgatcaaataggaggggagagaaaggcaatattcttaccgtatttcttatcgaacaattacagtacatccacccaatactttcaaagccaaaaaggcacagattttcaattcaggtagcctttaacttaatcacttacacctactgtatttccttcacacatttcacaatacttcttcattttacttcaatcaaatgaatttcaagtccaaaaaaaaatatattactattttaattataatttgtctacaaatatttgcacaaataaaaaggaattgtacatccaaatcatccatcccgtgctgggcttttatcgctattagcgatcggttttcctctcgccaccgcggctaatttgaattggaatttttttttgtttttctggcctttctcccccgggggatctgcttccaattgtcgccaaatgatcatcataaacatca

SEQ ID NO: 42234 - DNA, 1036 bp, Heterodera glycines
ggatacaacccctacagtaatggatataacggtggatacaatccaatgaacaacggatataaccagtacagtaatggatacaacccctacagcaatggatataacggtggatacaatccaatgaacaacgcatataaccagtacagtaatggctacaacccctacagtaatggatacctgaacaacaacggatacaatcaaaacagcaacggtataaaaataaatgctaatatatttcaattaatatgtttttcaaattgatgacttctcctggttaacaaagcaattaagcttatattggattttcagattgcttcaccgcgtcaatggtacaggaccaaagagcatgcagcgcaatgcaaggacaatgctcaaacccggtgggtaattaattaattaacgaaacacaaaaaattgggttcattttcactatttttgcattttattaacacatttatatttgcacttttatggccgaaaaacaacgaagaattttgactttttgtgatagtttttggcgccgcgcgccataactttttacaattggagataaaaaaatatttaaaaaaagagattattacatttttaaatttggtggctctaaatgtcccattgtataattatatcgacccatttagtaattagcgcaaatttagaagacaataattgtcaaatttatattcgcaatttccagttgatcgcccaaacatgtcgccaaacgtgctgcaacatgcaattcgcgagtggtgttgcttttcctcaattcggcggctgatgatcaaatttatttatgttatttggtatttatttcgagcaaaaaagcatttaactttcgcttcctctttttctttctattcccctcctgtttctctttctgttcgtcttttgcttctcttcctcttcgctcccctcctcctatcttctcctcctgttcctcttttcctttctcttcctcttctgtccatccttctcctttcccccttcccctttttccccttcaatccccctccatggttcttttttctctttggatttt

SEQ ID NO: 42235 - DNA, 1366 bp, Heterodera glycines
  unsure (1)..(1366): unsure at all n locations
tttgggagattcaataacagattttcaagcaaaaactttttcttgnttgggccatcaaaattataaaaaaaactaattctttgtaaaaaaatagacaatattaagaaaatctaagggaaaacacttaagggggaaggccaaacgttaaaataaattttattaaaaaattaaaaaaataaataaataatgtaaaatttgaactaaaaaaaatctagtcgtgaattcggtgagtgttgaatgagaaaaataaacaattcaacaaatggaatatatatatttactttgataaataataagaaaattttacacataaaaattatcagtttaaacgatttgaaataaaaattaatgattaattgttaatgctttgtcacatcatcgaacgaagccaatgcaatcactcattataaataatgcttaaaatttctgctagattatacttgatttattaaatattagtacaaataaaattacaaaatgtccaagattaataacttcataaaaatattgaataaaataaataaagattaaaattaactgtatttttaaaaaagaaagagctaatgctaaaatagttaaatttttactaccaaatgtccaaagttaatattttcataaaaatattgaataagtggaaataaattatttaatttaacttttattttttcagaaacaggcgaattttaaatgaacattcattataaagtaaattattttatgaaaaattcaaataaaaagctggctttatattttataaatttgcggaatttttaaattcacgaaaatattggtattaattttgatttaaaataatgaattgtttttttgaggttttacttttcgactaaaatttaatcaaatataaaatttttgggggtgggggagggattgcaaaaaagcactcactcatggcccaatttttggaaagaccgacaacttttagtaaggacacaagattcaaattaatggaaaattaatttcgatgctagtataaaaataacaaattaaaataataaaatgttttaatgaattaatttaatatatatttaatttcaaattactacaaaaattggatgtaaaataaagaaaagttcgacattaaagaaaccaaaaaaaataaagaaaataagaaagaattattaagataaaaaaaccaaaacaaataaataatgtttaaaataattaccttaataaaaatatcatagaaatctaatactttattttattttagaaataattgaaaagaattttttttttgagaaatgaaattaaaaataaataaaacaaaacaattcaatggaaaatgaaaatancaaaatccaataaaaacgacactaaacgatgttgaaaaaccattagtcgtagg

SEQ ID NO: 42236 - DNA, 1716 bp, Heterodera glycines
  unsure (1)..(1716): unsure at all n locations
tgcgttggatttttgctccccataattgcgtgagtaccccaaacggacacttgaataaatcgatttttttatttcataaatattttttcagaaagtgctctaaagcgcaccaaattttatttacaagttaattttagcactctgatgctttagtatcaaaaaggaagatggagaaaaatttttttaaaaatttttccttatattttggttatatcgttttgcttttggtggggtgcttggaacagtggaatcatgcgcacccgtccgatctggcaagttaagcaacgattgctgactagccaaaaggttcggtgccgtgatgaaacgaaccagcactgcttaccccgcggcacccggcacggtcccccgaaggaatggatttaattaaattctctccttcggggatttttttccattaggtcgtccgttagcgttcgattgctctagtcaatttttcaaaatttttgttgaaatatttgtagtgctctgaagggcgtggggggggggggcgggggcccaccacgaggccgcgaagcggccgagtgagtaccttcggtgcaggaaaattattaaggaagagagttcattatttattttttttttgcataattaattcataaatatttttttcagaaaatgctctgaaacgcaccaaattttatttacatgttagtttaggcactctgatgctttttctatcaaaaagggagatgaataaattttaaaaaatttttaattcctttttaaacaggccaaaaagtttaggcttgtgtggtaagtgtgaagaactgtgttcctccaggcaaaaaattctaagaaaatttataagcatttgtagggttctcagcagtttccctgcaaaatttggtgagcttctgatcagtctagaacgttgggtgataaaatgaaaaaaataattaaaaaaaaataatgctggtgtgctaagtgtgaagaactgtgttcttccaggcaaaaaattctaagaaaatttataagcatttgtagggttctcagcagtttccctgcaaaatttggtgagcttctgatcagtctagaacgttgggtgataaaatgaaaaaaataattaaaaaaaataatgctggtgtgctaagtgtgaagaactgtgttcttccaggcaaaaaattctaagaaaatttataagcatttgtagggttctcagcagtttccctgcaaaatttggtgagcttccgatcagtctagaatgttgggtgatcaaatgaaaaaaataattttcgaaaaataatacttgtgtggtattaattcataaatatttttttcagaaaatgctctgaaacgcaccaaattttatttacatgttagtttaggcactctgatgctttttctatcaaaaagggagatgaataaattttaaaaaatttttaattcctttttaaacaggccaaaaagtttaggcttgtgtggtaagtgtgaagaactgtgttcctccaggcaaaaaattctaagaaaatttataagcatttgtagggttctcagcagtttccctgcaaaatttggtgagcttctgatcagtctagaacgttgggtgatannatgaaaaaaataattaaaaaaaataatgctggtgtgctaagtgtgaagaactgtgttcttccaggcaaaaaatctaagaaaatttatagcatttgtagggttctcagcagtttcctgcaaaatttggtgagctccgatcagtct

SEQ ID NO: 42237 - DNA, 757 bp, Heterodera glycines
tatcattgaaaaaaaagacggaatttgtacttttcacgtaacccccccccccccgaatagtctcgcccccccccccgcccaatagttgggcaacaagcagagtaaaagcggctggcacaaccgcggcccctttggctccgtacccccactcttaggccaattcatggccaacttaccccgccccccccccaggggacacgccgaccccaaccacggcatgttaattggaaattgggccccccgcaagcacggcacataaacagagggggaaaagcagcgaaggctgggcacaaacagacagaaacacaaaccaccgacggacgagacgacacacagtgccaattctgctgtcccccgaagtgcctgccatttcggggacagagcgggggggggggcattttcggccaatgaatttgcttggcttaatgccgcaaatggcatgccatttccgcccaatttcgacgagtcaaattggatttattgcaacgcatttttggacatttttttttgttaatttgtgagtgtgcccgactgaagatcacataaatgacatataataaaagtgagccacaggcgcaattaaggtgcacatttttggtcctcgaaattttcttttccttttataggccacagtaagccgttaaaaaattaaaaattttcttaattaaaacgaaaaatgccatattcctcgcccaattttgccagggctcacctaatggttatgattattttataaccatgtccatatgtaactgga

SEQ ID NO: 42238 - DNA, 710 bp, Heterodera glycines
tcgtttcttcctaattcagcttttaccatttttatcattttttatgcaaaacttgttcgtccacgaaaggttcgaccatttgtacaactgttccttctatgactatgagtcggtgccgagggaaatgcgcaaaaatgttctcgtcggcaccattcttttgctgttgtacggcatttttgaggcgagaggggggcagcactttttggaaaatcttgaagcattgaagcgattaaattatttaaaattggattttccttcccagattctgtacatcccttgtttgctggtctttgcgcggaaagagaacctccgcgagtcgtgctacaagctgatgctgttcatgggcattctcagcatggttaacatccattcgagtggactcgtcattggcatttacgccgtccgtggcgatgtgctttgtgaccgaccgctcgttaattatgttctcggaatgcccgcttttggtgtccaatttaatttaaaaaaataatttcttaatgtttttcaattccattccattttatgcctttactgtgccgaatcgctgacttccgtccttttggcattcaaccgatgcattgaaatgtgggacaacgtaacggcgcataaactgttcgaaggccgcaaagcgacctggtggatggtcggcattttgctgtacggattcgccttgtgcacttttacaattccgccgattcccaacggaatgt

SEQ ID NO: 42239 - DNA, 550 bp, Heterodera glycines
ttttgctccccataaatgtttgagtaccccaaacggacacttgaaaaaatcgatttttttgttttcggggcagtccccccgaaccgatgcgcccagatttatggggagaccgaatccttcgggaatagcttccctatagtctgtactttaattctgcgttggagttttgctccccataaatgtttgagtaccccaaacggacacttgaaaaaatcgatttttttgttttcggggcagtccccccgaaccgatgcgcccagatttataaggagtccgaatccttcgggaatagcttcgatatacctctactttatttttaccttggatttttgctccccataattgtttgagtaccccaaacggacacttgaaaaaatcgatttttttgttttcggggcagtccccccgaaccgatgcgcccaaatttatggggagaccgaatccttccggaatagcttccctatagcctgtactttaattctgcgttggatttttgctccccataattgtttgaggaccccaaacggacacttgaaaaaatcgatttatt

SEQ ID NO: 42240 - DNA, 876 bp, Heterodera glycines
acaataaaatagtttcaacaatttcggaaaatttcatccaaaaaagacaaatattcaaagcatttttgttgaaattaaataaatttgatttttaatatttatataaaatttatacatttattatttttgcttacagtctgcttttccgattataaattgctgtaatgagtacatactgtagttttgattttgtttgttctggtgcaaaatcgtttccatgtggaggcaaattgttggacataaattgaaaaatgataaaaaacaatgccaacaagaaaataacattatattttgttttccttgtcctaaaataataataattattattatttacgatttaaaaatgtggaattaaatttaaaatataaataaaaattaccatttaaacattttcctgtaaattatacggaatatttgatgataaatgttgttcaaattatgaacagattgaaaataattcgaatagaacatctaaaaaatttagtttttaacgaaataaaatatattttttccataaattttttattttaatttatttaaatcatttaaaataaatggaagaattattaaatattgaaacttttaaaaccataaactaaaatagcatttacatgtggataaagaggaatattaaaacaaaattagcttaattaattggggaaacaggttttatctcacacattgatcaattaattattgcacttcagcacaacattttttactcattattatttgtaatctcttattggataaatttttggcgtgacgtaaagcatgtaagcttagaaaagttaaaaagaaaattgaaaaatgaatttcaaggcgtgcttatcttttacaaatttttaaaaaaaatttatgaaatatttctttaat

SEQ ID NO: 42241 - DNA, 991 bp, Heterodera glycines
cgtgattatggtggcgaactcattccacaagggtctttcatatttagagcacaaatatgaccataaaattgttgccattaaaactgcttactcgcatttgggaatttctaaaaaggacacaggattgctcgtgattatgtggcgaactcattccacaagggtctttcatatttagagcacaaatattaccataaacttggtgcctttaaaactgcttactcgcatttgggaatttctaaaaaggacacgggattgctcgtgattatgtggcgaactcattccacaagggtctttcatatttagagcacaaatttgaccataaacttgttgccattaaaactgcttactcgcatttgggaatttctaaaaaggacatgggattgctcgtgattatgtggcggcctcattccacaagggtctttcatatttagagcacaaatttgaccataaacttgttgccattaaaactgcttactcgcatttgggaatttctaaaaaggacacgggattgctcgtgattatgtggcgaactcattccacaagggtctttcatatttagagcacaaatatgaccataaacttgttgcctttaaaactgcttactcgcatttgggaatttctaaaaaggacacgggattgctcgtgattatgtggcgaactcattccacaagggtctttcatatttagagcacaaatttgaccataaacttgttgccattaaaactgcttactcgcatttgggaatttctaaaaaggacacgggattgctcgtgattatgtggcgaactcattccacaagggtctttcatatttagagcacaaatattaccataagcttggtgccttaaaactgcttactcgcatttgggaatttctaaaagacacgggattgctcgtgattatgtggcgaactcattcccacaaggtctttcatatttagagcacaaatattaccataagcttggtgcctttaaaactgctaactcgcatt

SEQ ID NO: 42242 - DNA, 679 bp, Heterodera glycines
cccccccccccccccgcccattgcccaaaagttttttggaaaaaaacgccgcaaaaagtggggaaaaaaagtgaatcatcagaggaatttttgaggcgttttttccaatttcgtaaaaatttccgcctctgagggggggtatttcgtacttcgtaaaggcaaatttctgcggagcaggacaaaacgtcgtcgtccgccacgaggtcgcgaggagtttgagagcgcacctttgtttctttattattcaaaattaacattaatggtattattcgaaagcttatgaaaaatgatattagcctgcaaattttcaaaatttattattcacgctcaaaaaatccgagagcaagacaaagttcgaaatacttaggtttttgagttccttctgtacacataacttttttgcaacttaacgaaaatttttgaaactgaatccaaaaattcgatttttaggggtgtatttttcgttttttgaaatcctgaattagggggtgtattttacaaaattttttcgccaaaaaattcctattttttgccattttgccctccatttttcaaaaatatggtaaaatggggggtccggcggtgccgataggcgccgccgggaaaatttttgagtattttaacgctaattttgttcttaaaatgtcaaaaaaatttactgaaaatttttacttttttg

SEQ ID NO: 42243 - DNA, 1058 bp, Heterodera glycines
taaaattcagcacctgaccaagacagcaccgttgggctgactttccaccacaatcagctcagttgactaaaaatatatttatttaattttaagtcaaattaaattttggcttacgacgaggcgaatgccaatgcctaaaataaattttaaatttgaattatttttatttaattatttttttaccaatccaaaagcgtgagtaaggtgaaaagtcggaaagcccattggcaaatggaacttttgggcgtggaaaattgaaggcattgatcacaaaactgacgagaccgcttcagagaaaagtttaaaaaattaatgttcgattttaaaaaactaaaaattttcaattttcaatttataagacgaatttaaaaattagaatttaaaaaaatgataaaacaattaggactggactttgccctaatcactttctagtaatttcagctccatctcggaaaattgggatgacccctaattaaaatgccaaatttcaaatttaatgaatgccatcgttcaacccaaaatgccaaagtgcatggcattcgttcacctgcaatttgtgtgccaacttgcgtaaaaattggacatttcatccgtgaaagaacattgccgaaccaatttttgtgatgggcgaacgacggaactcgtgaaaataactgaaaaataatgaaaattattaaatgaaaaatattttaatttttgaatttaccaccaaatataagcagagtaatgagttgtgccaaatgcatttttaatgggcctaaaaataattcaaattattcttttaaattcaactttttttggcatttttaaataaattcatttcctttcaattaaatttttaacgcccctcgaaaaatttaaagaatttagtaatattttttcttctcttaaatcataaaatacctaacattcaaaataaaataaattaatactttttaagattaggccttttaaaagaaaaaaaattcatgaaaaaaaaataaagacaaatttatataatgaaaaaaaaataataaaatactaataaaacgccacataactatatttatagcattttt

SEQ ID NO: 42244 - DNA, 874 bp, Heterodera glycines
cttctcccaggggtattattttgtaaagtcttcttttcccctaataaacttttcaaaccccatttttcgcaccgtgaatgttatttttatcgaattccgaaccgttttgagtagattagactagaaaaaattgaaaattttgaaatcatgtttcccactcccttctcccaggggtattattttgtaaagtctttttttccaaataaacttttcaaaccccatttttcgcaccgtgaatgttatttttattgaattctgaaccggtttgagtagattagactagaaaaaattgaaaattttgaaatcatgtttcccactcccttctcccaggggtattattttgtagtctttttttccccaataaacttgtcaaaccccatttttcgcaccgtgaatgttatttttattgaattctgaaccgttttgagtagattagactataaaaaattgaaaattttgaaatcatgtttcccactcccttctcccaggggtattattttgtaaagtcttttttccccaataaacttgtcaaaccccatttttcgcaccgtgaatgttatttttattgaattctgaaccggtttgagtagattagactagaaaaaattgaaaattttgaaatcatgtttcccactcccttctcccaggggtattattttgtaaagtcttttttccccaataaacttgtcaaaccccatttttcgcaccgtgaatgttatttttattgaattctgagccgttttgagtagattagactagaaaaaattgaaaattttgaaatcatgtttcccactcccttctcccaggggtattattttgtaaagtctttttttcccctaataaacttttcataccccttttttcgcaccgtgaa

SEQ ID NO: 42245 - DNA, 1078 bp, Heterodera glycines
gtgtgagaaatgtattagtattgaaggtacacaaacaaatattttttgaatagagcgacgaagagggggaacatttccaattaaattaaggttttcctcatttctaatgaaatagcatcatgttcataaaattcatcatttccattctatttctcgtgccgtgagtccagactctgcccacagcaaagttgtcggggggttcagttactgcaagtcttcctgtactgtcataaataaatatattatgcgcaattatggggtcaaaaatctagagagtcgatatgtcaaaaaagaaataaagtcacgaggagaatgatatgataagtgctcgcgcaaacaaacaagtaaaaaattatgaagaaactttgacagcaagtcaaacaaatgctatcacttcttctgttgaagaatcgcaagagagtatgtttcaaaataatgataactaaaaaattattcaaaatctgcctaaatataaatgatcctaagttgaacatgttcgcacaatggcgcgttctacaatgagatttaaattcaatccacttaatgaagaccagcgtgaagaactgtgtgaaacatggttttacacatcagtaaaattttaaactaaaaagtagagtgccacgggaccgggaatttttgccaaaaccgggaccgggacttgccgggacctgagaagccgggaccgggacctcgattttttttcgggaccgggaccgcaagaaaaaccgggaaccgggaccaaccgggaaattttaaaaattcaaaaaaatttaaaaaatttaaaaaaaaattcaaattttaatttatatcaagtgaaaataatacaaaattatttggttttttatttaataaattaaattaatgaaaattttcaaacaaattttcttcaattatttcaaacaattaatcatttttggactaaatcatcgaatattaatagaaattcagatttgattttcacatcactttttttcggagcgctttttcaaaaaacttttgggaaagaaggggtccggcggtgccgataggcgccgccgggggaatttttaaaaatttgggtgcaatttgttaacagatt

SEQ ID NO: 42246 - DNA, 964 bp, Heterodera glycines
  unsure (1)..(964): unsure at all n locations
tgcggtggggtcgattgggccccgccgattgggccccgccgattgggccccgccggttgggccccgccgattgggcctccgcccccactgggcctcgtcgtcgtcgttgccgctccgtttggtcgggcggttctcggcggcggcaggtctcgactcagttaaccatcgccgccgctgccgacgcactctctccccacgcccatcgatcgcagcgccaccaataaattcccccgagagttcgatgaatgaatgagtgagcgggcctgtgcttgcggcgcctgctgctggcctctggccccgcgtcttttttgcctgacaatgcaaattttgtccctttgtgaaaaatcgttcgtcaaaatttttgccattgccatcgccgactccctcggggcggttcaactttttggcccaatccatccatcgatctcataaaaatagtctcaaataattggaaaaaaacaagcattctaaagttttggctccatccagcgaatgatcgaatggcactttcgagtcgagagtctcgaccttgcccaaagtgccaccggccgctgttcaaatttacaattggctacaactatttacccaaacccttttctcccatttccctaaattggccatataacacgtgatttgctcattcgtccgcccttgcccctttccccgtcggctatcaccaatcaattaatccccctaattatccgttttgtcccccctaattttccccctattttcatcgtcttctcaccgtttcgccttccattattgtcacactttacattttgctgcagcaaaatatgctgctgtgtgtgtgctctcttttctcttttgtgccccgtcctttccttcccccccccatttttcttatttcttatcactctttttcttcctctcttttattaatccccccccccaatttcaattttgttttgttgccaactttctgacctgcagnngcatgcaa

SEQ ID NO: 42247 - DNA, 429 bp, Heterodera glycines
gccttgcatggcctggcaggtccccctggatcaattacaaattatttatgggacgatcaaattttttcgaaatttttttttatttttgcataattaattcataaatatttttttcagaaaatgctctgaaacgcaccaaattttatttacatgctagtttaggcactctgatgctttttctatcaaaaagggagatgaataaatttttaaaaatttttaattcctttttaaacaggccaaaaagtttaggcttaacttttttttcagaaacttatcagaagcgccccaaactttgcagggatactgaaaggaaaagaattaacctgttttatcacattagcttgtcatcagtttttataaaaaattttcaaaattctgagtctcctattattttatttttttttcaaaattttgaagggcggggggggg

SEQ ID NO: 42248 - DNA, 1035 bp, Heterodera glycines
ttggattccaagacgaagctaatctttggacttctaaaattcagagttttcgaggcaagaagccctaaggccatggtccaaaaaagtgacactttctttggttgtatccataatgtcaaaattaacatcatcaaaaaacaacgcaaaattaccaattgaatgccttcgtatgctctgttgtacacgagtaagcccattgacagctaagagccactgaaaagggggagggaaatcgaaaatcgtattttaaaatatttatttaattaattttggataatataattaatatttattcaagtttccttttttggtgctaaccataaaaatggtgatgccaattccgcattttatgccttccctttcgtatttccccacaaaaatcgtcgctcgaacgcgttcgaccttaaaaaaagaattaaaattaattatatttatccttttgaatattattttaccataattccaaaatggaaaagcggtgaagcgaccaaataaacgtaaacgggcatccgaagcaaaaaggcgagccaaattggggtcaaacattggcacgggtcggaaaaattggcgaaaatgaacttaaaagggcaccgaaggaattgtggcatgagttaaacagaaattaccaaatagcgaacggaagtgatcagataggacaaagcaaaaatagcatacagaaaaagcatatttagcaaaagcaactaaataaagtcaatcggaaatttaggggaattaattattatttttaatatatttcacttttaaatttacatgcaatggcaaattaggtttcttggcaataaacacagaaatgttgagaagcaacagaaggatcaccgacccggtgatcagatgggcccagcggacgaaaaaaatagccaaaatcggtcacgtaccttgggcattggcacaatcagtcaaattgggcgcggacccatttggcgggatggaggacgaattcacggacataattaagggataattacaaaatggtaatttggtagtctgtaattggcctaatttaagaattttaat

SEQ ID NO: 42249 - DNA, 1145 bp, Heterodera glycines
gaatgcgtgaaaatggtctttgggtgagaggtttgccggcgcagcagaattatcgcacaaaatttcgagtaagttgaggaaccagggacggttcctgccctggggtggaggtgtaagccggggctcgggtctcggctaccgattgggattgaaggggagaggctcctccccattggaacgcccaccgggattccccttttaagcgatggctctcccagccgtcgaggccagtcagtcagtcaattccccagtcatcactcccactactggccctccccctaagccgaccgatgggacggagcctttccgcgggggctacggcccagtccaacaatccgtcggtggacggaggagatcgatctcaggggtcggaactaagcaggccgaatcctgaaacccggcacggcttaactatatatttgcgtaatagtggaccattttactagttgttctgatttatggggcaccgaaacaaattcattcggaccgtggaagagaatttttgaactcagtgttggaagaaattagcaaaactctaggaataaaagtctttcactgccggatatgatcttcagggcaacggacttgccgagcgagttaaccgaattttaattggtgccggagcccaccgaccgacgcagccgagatgccagagaatgcccaaagaattaagtgccagaaacagaagagacggaggaaataatttttgaacaaatttgcatttattatttattaatttaaatttcattctccattttattattatcatccatatctttcatcctttgcctttgcgatcactttatttattgatggaaaagtcggagacaagaagaaaaagagcgatagggaatttctcagagtttaacaaaaagcggaaaatgtccatgagagaggaaaaagggggaaaagatggaaaattaaaatctgttattcattcgcttaacttttttaaaaattctgttcaacgttcttgctctccgatttaaaaaatattatttgtcaatttggtattttcgcaccgtaataaatacttgtcaccgggacattatttgaaggttacggtaggggaaaatttggtgctaaaatttgtttcaccgggaaacgagagattggtccaccggggacttttcaaaacaaaatct

SEQ ID NO: 42250 - DNA, 1045 bp, Heterodera glycines
ggccaattaaaattgttggtgttccagtttatgtttcgtcggcactgcgctttggccaaatggttgtcgctcaatccgtccgtgcagtacgcgttgtttttggacgcggacatgggcgtgatcaatccggaccatttgttggagcattttttggcaaaatttgacaccgaattgccacacggaggaacaattgacatggttttctatgagcgcattttcaacggcgaaataatggccggaagttattgggcacggaacacacgttttgccattgaaatgttgcatttttgggccaatttcactgtgccgtcgcgcaccccttttcgcggaggcaccgacaacggggcaatccatgtaattttgttgggggatcgcaattagggattttttatgggcgcaaaatagggaaaaaatgccaaattgcagcaaaagttgtttttgggccggatatcccggctctattgcagttcacacaccataaaagaaacgacaatacattttttttgtaactttaatgcaccataactttttctaaaaggatccaaattaaactttcttggtatcattcaatagtccaacgaattctttataagtctgctaaatttcaaaaaatttcattgtgtttcaataaagctatggccaagaatgtttagaaaaccaaatttttgaaattttctggccataaattttttgaaacaacgaatttttttttttgaaattttgcaggataatagaggatattaaatgctaccgtatgataatcaaaaaagtttaatttggatgcttctagaaaaagttatgatgcattaaatttgcaaaaaaatttatgtcgtgtcttttttttatcgtcgtatgaactgcaatagagccgatatccctccatctattaaatggttagcgaataaataagaaattttgtgaagaaaaatggcacttttccggtttagggcgcccgaaataaaggggagtccctttttggattgaaaacttttttgtgataattaatcttttcaaatttggtcttccgccggggggttttttgggg

SEQ ID NO: 42251 - DNA, 1359 bp, Heterodera glycines
  unsure (1)..(1359): unsure at all n locations
caaaaaaaattgggtggctttaaaatncgggaatgatcagagcatttaaatgnggnnggnaatgaaacagaagagctgctgcatcctcttcaacagancgatcctcagctcggctgcgctagtggccattcaaaaatgtccaaatcgatgaccgtttcatctatttctttgcgaaaagcggcttttgaaatttaacccataagccacgcattctcatttaattacgaaagtggaacaaattctttatcaaactttgtataagcggcgcccaatcactcgttattacagaatttattggttattaaaatttacagtatttgttttgaaaaagaatgataatttggcgttccgctggctgctattccgattttgcttgggctgctaaagtagagcccggagcaggaccggatcctgcgcaggattttgtaggatcccagtccgcaatcctgcattttttggaaaaatgcaggatttgcaggattaatccggccggatccggtccggcaaaaaattttgaattccaatcctgcaacaggatccgcaaatttgatttttgtgcgggatccgacaggatttcattgattttttgaaattttaaagaacagaatgccaaaatttttgaataaatttataataaaatcaatcaaaataaattcaattttcatctcaaatttcacctagaatttgcaaaaaaaatttcccggcggcgcctatcggcaccactggatcgacattaatcctgtagaattgagtcaaaaggtgtgacatttggtcattttttggtcaaaatcagttaattaattgataaatttcaaaaaaaaaatttcagacggcgcctatctgcatagacggacccctttgttccaagtttttgaaaaaattgcgccgaaaaaagcatttttgaaaagcaaaaaatagtcaaatttattgaccattaacagatttgatttccgatctctttttaccatctgacccattcgaaaaatctttgtcgcccttttaatgcatcccgccagcccctaaaatttcttgtcaggtattttttttttggaaatttcattgacattttttcaaaatttctaagaatccgcaatcctgcgcgggatcctgcaaatttaaaatttccgggctctaattctgaaaggaaacgtgggaaatttttttttcattgcgaaaaacacaaaactaaaattttgtactgatttttacaacaattcaattcaattccttttcataatttttttttgtgacgtcattttgatcagttcgtcaattaattaccgtacttgctcgattatagcccccgggggctctattgttcaaccctcctcagaaggggggctttattcgagagggggt

SEQ ID NO: 42252 - DNA, 922 bp, Heterodera glycines
gtgtagaaaaaaagagatagccatttttctgagatccttattcttctgagaaagcaattttcaacccgacattttgtagggctcaaccgcagatagtaatgcgtttttggggaaaccccacatgtacaacggtgtagaaaaaaagagatagccattttctgagaatatctattcttctgagaaagcaattttcaacccgacattttgtagggctcaaccgcagatagtaatgcgtttttggggaaaccccacatgtacaacggtgtagaaaaaaagagatagccatttttctgagaatatctattcttctgagaaagcaattttcaacccgacattttgtagggctcaaccgcagatagtaatgcgtttttggggaaaccccacatgtacaacggtgtagaaaaaaagagatagccattttctgagaatatctattcttctgagacagcaattttcaaaccgaccttttgtagggctcaaccgcagatagtaatgcgtttttggggaaaacccacatgtacaacggtgtagaaaaaaagagatagccatttttctgagaatatctattcttctgagacagcaattttcaaaccgaccttttgtagggctcaaccgcagatagtaatgcgtttttggggaaaacccacatgtacaacggtgtagaaaaaaagagatagccattttctgagaatatctattcttctgagaaagcaattttcaacccgacattttgtagggctcaaccgcagatagtaatgcgtttttggggaaaccccacatgtacaacggtgtagaaaaaaagagatagccatttttctgagaatatctattcttctgagacagcaattttcaacccgacattttgtagggctcaaccgcagatagtaatgcgttttttgggaacccacatgtacaacggtgt

SEQ ID NO: 42253 - DNA, 1822 bp, Heterodera glycines
  unsure (1)..(1822): unsure at all n locations
cgattagaccaatgtcccaacaaatcacgcccaccgtttcattcccgcagggcgatgacctgcgcagaatgatcaacaaaatgattggtcagtcatgcaatctgatgctcggctctctgtttaagctgattacgaaccatcaagaattcattaccaaatctccgtaacattattagtaaaatgatcaaaaatcgtaaaaaatgggaaaaataagtaataagtgagcgagtaggcgacaaaaattttttaattaaaaaatattttttcatcctaaactaattgaataatgcggttaaagcagattgatcaatttttaaaattattaaattttgttttcttaatttaaataaaaaaagaaattggcggataaaatgttgctaatttgtatgttgtaaatgaatgactgtagaagttaaaattattgaaaaaacgggacctgaattccaataaaacagtccggctaattgtcaaattaaatttgttgaaaaccgggacatgaattccgagaaagttacagtgatttattgtcgggctaattattctaatttaaatatcaaatttttttatcccatggaaaaattttcttacttgttgcatgattattttttttttaatttaaaaatcccttttctataacataaacaaattttcgaattaaattattttttctaaattttccccctcaattttctttcaaaaaaaccatccccggtttaaacacatttttttcaaattcactcactctctccgtccgtttacaagaagcgcccaagccccacccacagggctaaggggtgccataatgcattttgatcaaattttaagatttcaatgctgccctaaaatttaaatcaaatttaaaaaatatgcttgaaactctctttgtcgaattttaaatttaagtttgtgtgtttattgtctcgaaatttaattaagagggtttttgattatcatgaaaatttaaacatgaagcctccttccttctaatatttatctaaaaaatttatttcttatttgatacatttatttaatattccgtcggttggcttttattttaaattttacttttttctctcctttttttctttttgcctaatttctcctttctaaaaaaaaatttaaatcttttttgaattcaatatgtnttttnnttgnnncttttnnnttttttcncctttnnnnnnttttgnttnntttnttcntttctnttnngtnnttnnttntcnnntnnnttttnnnnnnntttcnnntttnntgccttnttttcnntnnnnncggctctccncccggggtgtgncttgtctcngnnntgncgngagcgngngtttggcgngnggcgngngtccccnnngngncgngngcgngngtttggcgngnggcgngngtccccnnngngncgngngcgngngtttggcgngnggcgngngtccccnnnnngncgngngcgngngtttggcgngnggcgngngtccccnnnnncccgngngttggcgngnggcgngnggncgngnggcgngngtttttcnntttttttctgtngccttnttttttnntttnnnnnncttcnnnntcgtntnttnnnttnngggtncgggcctgggtntttgggcnnntnccgggtcngggtnttgctgggtncngnnggccgggtcngngtcctngtttttnnnccgngtccnagtcatgnnnntccnnnccnnnttctttnnnnttttttcntgnnnnttnnnntttataagcatgnnatntntttnttttngnnncnnnnntttcttctttatcggttttttccacctttttttgcggtgcgttttttaaaact

SEQ ID NO: 42254 - DNA, 1074 bp, Heterodera glycines
caatttcatggtaaaagtataaaaattgcagtcctaattagcagacttaacttttcttactttcgtccacttaaatttgaaaatggcctcgggtgccgctccgtgcagtgaccagcgaaattcggcaaaagcggcggacaaagcgccgccgccctcgcagggccaccgaagtcgcaaatgggcgacggacggaggggcagcagcgcactgcgaaaatgtgggcatttcgggaacatttcgacagttaatttgcgattttcagtgcgtcgtttgcggtgatcgggcgtgcaatcaccagtaaaattagagaaaacagtcaaaaaaccattaaaaccgttaacccccccccccctcaaaaaataaagttattatggcgttgccgcgtgccatggctgcaaatgtttcttctggcgatccatcaaaaacaaaatgaagttgtttgtgactgagatggcattttcgccaatgttccttttaaggtacatttgtcgtggagacggccaatgcgacataataaacccaaaccatcgcaattcgtgccgcttttgtcggcttcagcgatgcctaaaggcaaaatgcgcaagggcaattaattgaccaattaattaattggggactatttaaggccggaatgcagccggaatcagtacgaatgccgaaagaaggagcggacaatgtgacgaagcaaattgccattttggagcaatgcctaaagggcaccaaagaggcggagggactgaagcggaaatgggagaaaagtgacggtacgtgggagagataggatgttacagggagagtatggtagttggatagtacggtttaagtttagctgaattgacagaatttcctggccattccggcatttttttaacttatcggcacaaactttgaatgccccggggtccattcagccaatctctgctgttatttgtcactttttcagctctttcctcctctcatttgcattgtccgttgtgccatcagcagcgacttcccccgccggcagaacacctcaaaaatgggccaaacattcaaagtcagccgatggtcgctgcacattcattccagccaaat

SEQ ID NO: 42255 - DNA, 1342 bp, Heterodera glycines
  unsure (1)..(1342): unsure at all n locations
cgtttntgtgcgagtacaactggaaaaccaccaaaacttaccataagagaacatcgtgaaaacatgttcccaggagtttttggcttcactgaacacgaatcagcaaccgattctgtaaatcccgaatttcgcactgatttcgtcagactccactgattcggcccattggaaagatttaaatttttaatgcaagattgattgactgaccagcttgccctctttgatcatgaaccatcgtcggttccacgatttgaatgcgtttgtggcccgcttaaacaaatagccctccatgatgcattggggatcaagcggaatgccggaggggtgttgaaaaatttccttaaattaaaaaagaaattaatagaaaattgaaatggaaaaatcaatgaactgggaaagacagaaaaaggagaaaaagtccgtaaaaaagtgaaagtatccattgaaaatttaaaaatgatgaatcactgagaaaaaaatatgggaaaaagagaatgggagaaagaaaagtcacaacgcaatgaaaaatggagaaaatgcgagcaaagcgctaaaggttaaaaggggaaaaaacagagtcatttatcacgaatacatttcaaatttaaaggggtctccgaaaagtgaaattgacacttaaaaacgccaaattgaggaggaaaacaaattttattaatccaattcccctgggtgttcgattagcaattgtcccggaaaaagaaaatgcaaataaattcaaaagtccgccctctcccttccgttgtcagaaaaaaacacacttttggcacgaacgcgtgccggtcctgcattttgcgctccgtctgtttgtacgtgctgcgcatgcgcatcaccgcgtccccaatcagaaactcctgttgctctgcaaaaatttgactgcctcgggtgaaaaagttgccgtactccttgacaaacacccacaactgaaacaataacaacatgcaaaagggcgagaaaatggggtagaaataaacggacggaccgcctcaagcagcgctggacatttcaaagcgtgagcaatgctaactgagggggagggattaagcataattttgatggaataattggaagcatgcgcctttattataaaaccactttgtgccacatagtcgagcccaatgtgggagaagcatgtgccaatggctgtcagtgcattctccgagtcgcgcaattccttcagaaacaaaatggaagtgtttagcgttgaaaagattgtcaagagagggaaaaaaccccaaaaataggcaaatcaaaggaaaaagttcaggggaacatttactacaataaatttgccaaacttaaggccacctgcgctttgtttctg

SEQ ID NO: 42256 - DNA, 1307 bp, Heterodera glycines
  unsure (1)..(1307): unsure at all n locations
gggtgaaaattattttggcgattgcaatcggaattccgaaaatatcggaaatcggcaatcggaattccgacggctcaaaaatttcggcaatttggaaatgaaaattttccgtcatatccctgctatatttaacaaaaaaaaagaagtaaatatttggtaaaaaaggattgatttaatttttgccaatagtttccatagaaatatggccaaaaaaagttttggtcccaccttatgacgactacaaatggacgactgccttattctgctaaacaaaactttcaagaaccaatggacaaatacatataattcttttctgcctccagcagtgggcaaaaatgttttacgtcggactctttttgggcagccttttttgtgttgctaaaaatggcacaaaattgagcatttttgccaattttttgcattcataaaaatgctgtgagaaatattttttattacgtaaatttatgaagaaattaagaaagatatgtacataaaattgtgaaaaactaaggtttgtaattttaaattttgaatttaaaaataaaattttcaattttggttttaatatttattccattatattaataaaaaggaaaaaacaaatttaaatccgatttaaaaacatattttaatctttttttttaattaaattattttttatagcaaaatatatagttttattgttaaaaataataataataataaagnaaaaaaatatatcttctttatttttaaaataaaatacggtttttaaaaaaaatatacttttatgaaaataatattagatattttatagttcaaattattaatttacaatatttatttacacttattaaattatatatcaattgatccttttctccctctttttccacatctttctttcatttatccctcctcttcttcgctataatgctttttcatctgtccctggcgctttagccaaggcttttcctcaaatccgcccccattcagccggacgggcggtcgtcgtctccgtactccgatcagagctgcctgcacatattccgctaggcataaacagaacgctctccttctctcgtctcccctcccccggacggggaccaaaaattcagtgccgccaactcagtcccagacaattttaggcgctataatgtaagccataacttttttctttcttggttgaaaaattaataaaattgctaactgaagctanagttttttaaatagtttgaagagagtttttaaatgagatttaacaattcacaagaaatgaaaatttgaaaattgcaacaaaaaaaaaatcagaatttttgagttttttt

SEQ ID NO: 42257 - DNA, 856 bp, Heterodera glycines
  unsure (1)..(856): unsure at all n locations
tttctgggatttacctatagaattaaagaataaaactgacaacttattaagcgaatattattggtgaatgagaagaaaattaaatatttgggattaaaatagggagaaaagtgaattggtggaatgtttttgggatttanatatagaattaaagaataaaattgataaattattaattgaaaattataggtgaatgagaagaaaattaaagatttgggattaaaatttggagaaaagttaattggtgtaatgtttttgggatttatttatagaattaaagaataaaattgataagttattaaatgaaaattataggtgaatganaagaaaattgaatatttgggattaaaataaggagaaaagttaattggtgnaatgttttggggatttagntatagaattaaagaataaaattgataagttattaagtgaaaattataggtgaattagaagaaaattgaagatttgggattaaaatttggagaaaagttaattggaggaatgttttngggatttatttatagaattaaagaataaaagtgataaattattaagtgaaaattataggtgaatgagaagaaaattgaatatttgggtttaaaatggggagaaaagtgaattggtggaatgtttttgggatttagttatagaattaaagaataaaagtgataatttattaattgaaaattataggtgaatganaagaaaattgaatatttgggtttaaaatttggagaaaagtaaattggtgaaatgttttcgggatttanctatagaattaaagaataaaagtganaagttattaagtgaaaattataggtgaatnaaaagaaaattgaatagtagggtttaaaat

SEQ ID NO: 42258 - DNA, 1209 bp, Heterodera glycines
aaattttttccctccggagctgggctcccaatatttatttttcttaaaaattggctcaaagtcgaaaaaatgggcatttttggtgaaaatcttttaacaattgccgctttgtttctctaattttcaaaaaaaaatttcccggtggcgccttccggcacccccggaccctctggaataacttttcaaaatgattttttgactctaaatgctgatttttcactggtaaaatgattttaaaatttttacctgcctggcaaccctggttttttccgtatgatcttcgcgacacactttttccaaatacttttgcggaacctgggggtccggcagtgccgataggcgccgccggggaaattttgaaaatttgagtgtaatttgttaacagattcttatcaaaaaatgccaattttgcgatttttttaggaaaaatagtagtttttggtcaggtggtgagtgaggtcaattcaaaaccgttaaaaaatttcaaatttcgtataactattttgcctattctcctatgaaaatgccattcttaggggtgtatatttaaccccgaccccgagtcggggttaagggtcggggtcggggttcgtcggggttggaagcgtcggggtcggggctaaccccgaaaaatggccaaaaatttcggggtcggggcggggtcgcaaccctaaataaaacagccaatattgtgaaaaaaaattatatttccctttttagaatttaaaaaaaaataaatttaaaaagtgtataaattaagaaaatattcaaaaaaagaaagatcttttcataaaatttatttacaatttttattttaataaaataaaataaaagagccaattattgtgaaacatttttaaatattttttccttttcagatttaaaaaaataataaatttttaagtgtttaacaaaaaatcctaaaatttatctaattgatttttttcaacggaatttgtgggcacaaaattcacaagaaattgtgaggttgctgaataaattttaaatatgtttttatgactaaaatgatgaattgcatttttcttatttccaatttgtttaaataataatgaaaaattcaataaattactttaacaacaataatgccacgtttaattcccctaaaaaatgtttttatcattattttatttttttattgcgaataatttttgcttccgaccggaaattatgttgcgttgttgttttatc

SEQ ID NO: 42259 - DNA, 816 bp, Heterodera glycines
  unsure (1)..(816): unsure at all n locations
cttttcattttccaaatgttcaactcacttctgctgctccttaagatcatncnnncnaaccccgnncatgggctgctgnctttttttttgtaaaccgtctttttctctctcggtctctctttccttttcccctctttctttgcctcctctttccttttcccctctttttttgcctcctctttctttttcccctctttctttgcctcctctttccttttcgtctcccttctcactcccctgcttctcttcttcacttcctcccgtttctctatttctttcttcatttccttccttcttttcctcttttttctcttcctccatcctttcgggtacggtgcaaagattgaagtacagtaccaacagcatccatccgcacccaatcagcaaaattcctcctcccgcaatcagagcttagcttattaattttgaaagtgatcagagtttttggcgtttgttcagtcaccaaccgatcacccaccattgcgcacgttcggtcatttcaatttgaaccaatgcttaagggggagggggatttgaatcatcaaaagtctaacaaaaggcaaccagaaatgccgatgatgggaattctgaggagggcggacatttcggagagggaaagcaacgaaagatcagcgaagagagactaaacgaaaagtgattagagagggaggggagaagagggaaatgaaaagagagggtggggagagatagggagagtgatagagagagagagtgtgtgagaagggggaaaagaaatagagaaaaggtatggaaacagactttggcgggcaccattaggccattcagagaagcaga

SEQ ID NO: 42260 - DNA, 1374 bp, Heterodera glycines
ataattatgggtttaataaaaaaaaaatctttttatatacttttacaatataaaaaaaaattaaatttttctcactgatgcccttcggaaaattgtaatagccggccgcgcaccgatcacattttcgtccaatcacattcggcttgcatttgcattgtccaccatattcggcacaagcgaagtccaaacttccttaaaaattttagaaattttaaaattaaaattcaatattttttttataaaaaaaaataccctgagtgttgcagtcgcatgccaatgcagcagcattgaaatcagtggtcagtgaaaaaattttttgacgacaataattgctggtgttcgaagggctaaaaattttgaaattttttttattttataaataatttctgaaaaaaatgtttcaattcaatttttgttttgctttttcttaaccatattgggctatatagagcccaccccaaaaactgaaaaaaaaattttttttgaaaaagcggtgaaaaaaaaagttcgtcgattcggaggctaatggactgatgtttcgccgttttggatgtgattttttgtaagaaatttttttaaaaagaaaaaaccaaatcatttttattaattaaaaaaaaaatttcataatttacagtatttatcgtaatttattttgtttatggcattttgtgccgcttttatttatgcttttcaggattttattccgcaaaattttattcaattttttaaaatttattaacatcaatcgtctaaagactaaaaaattaaagaaaagtcataattaatggctaatttttgacaagtgcaatttaaaattatttatttattttcgataacataaaatagccctgccccctaaagctaactgatttttcaaaattttttgaaatttctaatccccccccctaatccgctgaatattgaaaaacccaccggttatggaagttgtcatccgagcatttgtccacaaattcgttggccaattccaatggcaacgggcgcaacactttgtccgtgtactgctccaacggtacgaccatcacatagtcaatgtaaattggccatttttgatgggtttggttggagtagaagcgtcaacacatatttgtcatccagtcgaaaatgatgttggcccgagtgctttttgtccatctaattaaaaaatatataattttttctttttaaatggttatatggtaattagctaattcgtctaatcaggcgattagaagggtaaagatggaaaattttggctataagatgaaactaatcagcataaagaaaatctatgtttttataaaattatatccaaagaatgcactaaatcaaacacaagagagaaaaaagacagaatttctgactctagaggtcccc

SEQ ID NO: 42261 - DNA, 1325 bp, Heterodera glycines
  unsure (1)..(1325): unsure at all n locations
ggagaagcaaggggctgtggctgggggcntaaaatttgggccacatttggagaattaattctgatttctgaaaaagtcccagaaataactatttttctttccatacgttcttgtagagctcgagctgctctttccaatggtcttatcccggtctcgatccgtgccgaactcacaaagttatggagtgaaatgtgaaatattgttttcaccacaaggcattttttctgaaaaccggattcaaaaatctggggtttggtataaccgttttagaaatagcgtagaaaacagcttcgatatcaagaaaccaagtcaagtccagaaaggaatattttaaaacgatttcgttttgttttggcattatgataccgaataactttcggaaattatggaaacaaaattggagaaattcgaataattttttgactgcaaatttttttccttttttgaattgggttcaaaaaaattttaagagaatttttgattattaatttgaagtcttgaatttatttgacaaatccaagacttaaaactgggagaagcaaggggctgtggctgggggcctaaaatttgggccacattggagaattaattctgatttctgaaaaagtcccagaaataactattttttctttccataccttcttgtagagctcgagctgctctttccaatggtcttatcccggtctcgatccgtgccgaactcacaaagttatggagtgaaatgtgaaatattgttttcaccacaaggcattttttctgaaaaccggattcaaaaatctggggtttggtataaccgttttagaaatagcgtagaaaacagcttcgatatcaagaaaccaagtcaagtccagaaaggaatattttaaaacgatttcgttttgttttggcattatgataccgaataactttcggaaattatggaaacaaaattggagaaattcgaataattttttgactgcaaatttttttccttttttgaattgggttcaaaaaaattttaagagaatttttgattattaatttgaagtcttgaatttatttgacaaatccaagacttaaaactgggagaagcaaggggctgtggctgggggcctaaaatttgggccacattggagaattaattctgatttctgaaaaagtcccagaaataactattttttcttttcataccttcttgtagagctcgagctgctctttccaatggacttatcccggtctcgatccgagccgaactcacgaagttatggagtgaaatgtggaaaaattgttttcaccccaagtatttttttctgaaaaccgattaaaaaattcggggtttggtataa

SEQ ID NO: 42262 - DNA, 942 bp, Heterodera glycines
  unsure (1)..(942): unsure at all n locations
ttccatgtgcaacaattgggaatntggaggtaatatttttcacatataaaattatcaatattttactttttttattgccacctttattttttaaattattttttaattaattttcactttttttctatttttataacttattaataaaataaatgaatgttgaaaaatattattatttataattttatttaaaaaaattcaaatgtaaaagaatggtttttatagtcatttagtatatttttatttaattatagaataaatttatttatattttaattaattttaattttagattttcatcccaacgctgccaatgtgttggaagcagctgttgccatcgttttcctgggctccggcattggactattagctgctttaatgatcggcattgcttatcatttccaatcattgtttttcatcaccctgaggggatggcttttaaagcggattcagttcagcaaacaacaaaagtgatcaatcaaaataaatttataacataataatagaaaaataaaatttaagaaaataaatttgaaatatttttgatcgtttttaaaataaaaaatttccaattttttaactaatttaaattccgaaattcattaatgaaaaaaatccaattgtgtatatatttttagggttaattgttggacctctgatgaaacattcagattaactcaaaaataatcgggaggcataatttctccaattgtcgaccaattcaaccctccacggggccaattcaaaaaaaaaattgctcaataaaaaataaagctttttcagaagagcttttataataagacagattataattaaaatacaaaaaaaaatgtttcttgtattaaattaccttattttaacagtttctataagatacagtacaaattaattggggaaaaattgaaaaatatttaaaattcataaaattaaatccattcattt

SEQ ID NO: 42263 - DNA, 1419 bp, Heterodera glycines
ctaccatttggccctcacaaatctacggttccttttggcatttatcattacacaatttgcaaaacctcattttcagcctttgtgcaaactgtgcgcagaaactctgagactttttgatggtcgtcgtcttcgcttggatggtgccgttgcagctgaaccccaacaaataaccaacgagtgcgctttttcatgtcatgtcatcatgttcccccccccccccctattttttcgtcttgccccgttttgttttctcgcgccttttccgtccgttttttttttgttgaattttttgtgtttggcacgctcactctctctcttccgtggacatcgcttttgcttccctttggatttcacattcaaacaacgacaacctctttttcctaccagtcccacttcctctgccgttgctgggagacctttttcaattcggatccaagcccttgacttgaacaattcaaacaaaaaaaaaattagactttatgccaaagtctgagtgtggcactccatttaattgaaacgccgaattgatttgcagtcaatgtcggcaaaaattgagtcacaaaaagtcgagaaattgatccggcattgaaaaataggcccctggtggtggcatttccgccccctcccctaacacataatcatcatgatcacataatcaatcatctcactttctcatcattttattgtctttttttgtatgtatatacattttttctatgctttctcatgcccccaattttctgattttgtttatattatttcgtcgtttttttctctctgcctccccccttctgcgcaacgctcatatctctcctctcacatcccttctaatccactccctaaattctcctttaacattcatttaacaccaaatttgcgtagacactaattgttttaaataattaattaattacctaactaatctaatacactttccgctgatgatattttgttttttgttttctctgtttctttgcccttggttcattcaccttttgctcttcttttttttgtgtttctcttctgccttttgttttacagtctcacgaacacatcgccaaaacagaaaagcgcgcgcgtatatataaatacaaatatgaaataatcgagtaccatatgcccacatgaacacctaccgtatatgcagagtccaccatttgtttgtttttgtgtcgtatctgtgttttttattttatttttcttctttttgtttaatttttctaattttatttacatttaatttctttcatcaacaaaactttccgtcatcgtcgtcgtcgttttgctttttctattttttctgtccatttgaataaataaacaaaatttaaaaaaacaaaaaaaaacatttggattttaaataacacacactcatctcaaacggctttttcttttccacactttcggatcggaatgaaa

SEQ ID NO: 42264 - DNA, 1184 bp, Heterodera glycines
  unsure (1)..(1184): unsure at all n locations
ccaaaaaccgncggcggcacngnggacgcgacggcagnngngaacggcttttttgtagcgccaatggtagaagcattgctgcccgtttgtgtagctgtttgtcgccgagttctgttgttgatggatctgtgcgaatgtccgtcaaaatgcaatggcatcggttggccaaagaacagcgcttcgaccaattgaacttcgcgcttttccgaccccccaaaagaattgtcgtccaaatggaaatcattggaatttgacggcaaatattcaacggcattcgtcgatttggctggcagcggaagaaagccgaggaaaagaagcaaaggcatcgcctgggggcccatgtcctggaactgactaaagaaaaagaaacgattggaccgatcgaattgtctgatcagcacgtgccatctacaaatgggcaaaagggcttcttcaaaatataaattgaaaaaccctgtccgattttcctatccaaatgactctgaatgatgaaaaagctttggacgaatggtgggcactttgtctccgtggaagcgcatcaaaaagtgtccttttcgtcctttccaaatgaattggctcttacgtcgccaaatccgtccgcaaatcccttaagtttggctttttgcctttgatccgattgtgcgcaatttgtctaattgcggcgacggcgtcgaaaggacggaatgttattttgtgccattagaagatttgatggatattatgcacggatatacgatgtgccgatgatgggagttgagtggggacagaacgatcggaggaaaagcgaaaggaaaagcgaagagaaaacggacgaaacgaagcgaatgaataaaccaaatattgaaaaagcgaataaatccaacggtttttcacattttaataataaaaatatacaaatacaacaaatatgcacagttacagtaacatatcgatagttccaatttcctcttaaaacttttctttaaaaaattaattcagtgtcaaaatatgaaaaaatccatcaatggactcaattaatgagttaatttgttattattaggatattacctaattcatttttatcttttaaaaaaatccattaattttttacgtttattttattgaatagaccataacgatgaatagcgcggatttgcgttgaattgtgtccttttccgtactgatccgccgccgtccattgatga

SEQ ID NO: 42265 - DNA, 915 bp, Heterodera glycines
tgattttacaagcaaaatatctagttttaactctatttaatacttacgaattatagcatcgagagctctatagatatttcgttacctcttttcaacatgacctgacaacgcgtataaaaacaataaaaattgtattaatttatgttgtaaattttcgttacatagcttgcgttgccgagatgatttttatttattatttataaatattattggtattaatagtaactttatcaaatctttttaaaataatttagattatttatcacttgcttttatttcgtttttatttaagttattattattttgttaatctcttgtcttgcttttgagtatttatgttgtcattcattttctcaaagaaaatcactttcttgccaaacaacaaaatattcctcttaatttttataataaatattctctttctcgcactttttatttctttaaattaatttaaagcaattctttaaattcataagaaatgaataaatttttcctgaataatttagtacaaataaaacgggacattttttatgcaattcaataatattattcaataatttattcttatttataaaatttaataattattttcttataaaataaaattattatagtatttataataatttacgatctgaaataatattcttttttgaaaatatttgacattttttttaaattttcaaatattttgttaagtggattaaaaatgaaatcaatgtttgttatctttggtataattaaaattcatgtttagactcataaaattataaatataatatcaataatatgttatgaattcgttattaatcaaataaaaaataaatgtaagttcatcatattcaacctattcaaacaggttttgaattttatctcgcatttcattttacaacttaaaatatatataatattaaa

SEQ ID NO: 42266 - DNA, 949 bp, Heterodera glycines
attttcccctccattccctccccccccccatcacatatttatgtaaaaaagaagatcctccctccctcgtcctacttttgttgcatttccattcaatttcttcattcatttgtgtcttccttcagcaatatttcccccttttccccgtttaatttccatttaaaatattttacatttcccccttccttttagcactttttacattccttccacttcctccttctcttcttccgtctccgatgtttcctcccttccatcctccgtcttcctcttcccccttcttcggcccttcccattcgtcctcctcttcctcttcctcctcctccgtctttcttcactcattcaaacccgtgcagcccttgcagaaaaagcgctcgtcggcaaatgatggcacttctcctcagctgaaaaacattgttggacccgcggcggcggagaagggcaccgatgggcagaaggagccgtgcatttgcgagagggaccaggcattggttgtgtgccgaaggtgcggtgacagaggtggcacattgggggaaggcgatcattaacatagtgacatgggaggcatgccattagagagatttgtcttacaattattaatatctgattactaattagtctgatggtaatatccaaattgggaattaatgagaatgatcagtgattactaatcagtttatacaaaactcaaaggttcactagcgtaatatataagaccggaaaagctagaattataacaatttctaagtgatttggtaattttatgtttcgaccttatttgactttgacctcaatttattttattttcgcatatttttgtcttttaattccctgtgatcgtccatatattgtatattgtcacttactccacgacacatttatatgaatagtcgtcagagtaagtggtactcgcccttctgatgactttttttttatttttacgaataaa

SEQ ID NO: 42267 - DNA, 975 bp, Heterodera glycines
tgggcatgtgtggcacccgtgaacagttggaccccgaggcttggcgaatgggcatgcgtggcacccgtgagcagttggaatgggcatgtgtgcacccgtgaacatttggaacccgaggcttggcgaatgggcatgcgtggcacccgtgagcagttggaatgggcatgcgtggcacccgtgagcagttggaaagcgagggcttggcgaatgggcatgcgtggcacccgtggctagttggaatgggcatgcgtggcgcccgtgctcagttggaacccgagggcttggcgaatgggcatgcgtggcacccgtgagcagttggaatgggcatgcgtggcacccgtgagcagttggaacccgagggcttggcttatgggcatgcgtggcacccgtgagcagttggaatgggcatgcgtggcacccgtgctcagttggaatgggcatgcgtgggacccgtgagcagttggaatgggcatgcgtgcacccgtgaacagttggaacccgaggcttggcgaatgggcatgcgtggcacccgtgaacagttggaacccgaggcttggaatgggcatgcgtggcacccgtgaacagttggaacccgagggcttggcgaatgggcatgcgtggcacccgtgagcagttggaatgggtatgcgtggcacccgtgagcagtcggaaagcgagggcttggcgaatgggcatgcgtggcacccgtgctcagttggaatgggcatgcgtggcacccgtgttcagttggaacccgagggcttggcgaatgggcatgcgtggcacccgtgagcagttggaatgggcatgcgtggcacccgtgagcagttggaacccgagggcttggtttatgggcatgcgtggcacccgtgagcagttggaatgggcatgaatggcacccgtgctcagttggaatgggcatgcgtggcaccaatgagcagttggaacccgagggcttggtttatgggcatgcgt

SEQ ID NO: 42268 - DNA, 1249 bp, Heterodera glycines
acataaatttttctgtattttctgaggttttcggggttgcattatcataaatataatattaatttcattcagcggctcgatattataataagcacgatcaatatgttaatggtgacttaaaaatacatggtctctcaacaaagcttgctaaattataagcacatttttgactaattcatggattgtatttttaatgtaatatcatacataatatcgagctgctgactgaaattaattttatattcgtggtcagcgaccccgaaaaccccgggaaaatattaaaaaaatattttttttttaataaattttaaacacagagacagaagataagaaccttcttccaaagagtggacattccattgcgttttggaaaccattttggcacaagtgaagtgaatcttttcatcctggaaacgatggtattatataatatacataaaaagggaaagaagacggtgctaaaagatttagaggattggttaaaaagaagccaagtggaggcgactcttgccaatggggccggctttaaatgttcccaaaatttcaagttggggggtcaccaactcgggcgaagacctttttcgaatcccaactttataatccagcggaaacccacctggataccaacgagaataaaaagagtacaatttttaaaaaatgcaaaatctgattccctcttcccttcaattgggtgattaagaaatcaaaattgaaaaaacggcacaatcaatctaatttgttcttaatttaaattcattaaaggagtgggaccttgttcgtctcaaaatttcgaatggccaactttttcaagttttgccagaaagctcatgaattgatgttggtgatttggttcgccatcggagaggtaaaggctttctctctaaatccatttaaatttattttaccttcttttatatttctcttatttgaatagatgcaaaaattaaacattggtctccaaaatgtttagatcgagaatggaggaacaccgactacgccattattgacgccaaaccaaagtccaatttcttcgtcactttccggcttcggctgggacagcttcggcgtcgggaattctcatccgggctctggtcacaggtccggcggtgcgaattcgaatgcggggtccggagaattgcccgtcgtgggaccacagcctcagcatgaggaagagtgaagagaccgcttcacatttgggatgttttggtgcataattttaactgaagtggtcaaaaaatgattttttttt

SEQ ID NO: 42269 - DNA, 995 bp, Heterodera glycines
  unsure (1)..(995): unsure at all n locations
tcttttgatttttggcccttttgtccttaacatcgcctcattcgaagaaaatgtgtcaaaatactgctccgcttttaacccaagtgcgtttaatttatctgctgttatttttcaccaaaaatccatttcgtaatgttccccaaggttttttccgattcgtcattccctcaaaatgggcgtttgtcccttgctgcctctccgcacactttggtctccggcaccgcttttgcgcagtcactttattgtgcccgtaaggcactgtttgctgatcggtttcgtagccctgggtccaatttggcaatgaccgtcggcaaagttgcgcatgaactttttcaggtgagtaaaacaatattgggctattattttccaatttttgcctatcatattcgctcattgtcagattgctctcgttgaacggcccgtcaatttgtccagagaatggctgttccgtctatggcgttgccgttttttgcccgaactttgcatcgaattggtgggaatgcaatgttcacttgagcgcttcgaagaggaattgagcccgtacctggacaacatcacctcatggattagggtaaagcggggaattgaaaattaattattttgactaaatcgaactaaggatggcatttcccgggaacaatgtgattttatttctatcaaagttcaaaaacacttcagacacatattaccgacccatgtccaaagccaattgcgcatttgaagcgccgaccgacgccttttaccgaacgaaagggaagcgacgaagaagcagaggaaaatgacaacgatgttcaaaaaggcaaaaaaaaaatagttgaaattgcaattagtggcataagtacccttttaagtatctgattctgaacccgtctatttcaatgccattcgtgacattgaggagaacgtttggacacctacgcttggcttgaaaggncggattgacgtttcatttgtggtataaaatttttggtaattttttgcagttttttttaggc

SEQ ID NO: 42270 - DNA, 642 bp, Heterodera glycines
ccccccccttttattcgttgcttttccttcgatcattcattctttggaatgtctcccctcctcaatttgtttgatcctttcattttttgtcttttccttcgtccgttgctttgcactataaaaggcgacggattcatgggtgtgcaatcgctttttgcgtccattcctccgccgtcgaattgcttcgcaatttgtgcgccatttgcccatttaatccattcattttcgctttctttcccactctttttttgctttcatttaactcaaattgaaagttgtcttccttccgtcgatgggattttgatgagagagattttaggcagccaaaaaacgagtcgcattttaaatgggggggggggggaaagagattcttttgctgctgatcagatgctgaaaaagaaggtaaacctaaactttttggcctgtttagagaggaattaaaaatttttaaaaaacttattcatctccctttttgatagaaaaagcatcagagtgcctaaactaacatgtaaataacatttggcgcgtatcagaaccctttctgaaaaaatacttaagaattaattttgctaaaaataaataaaaacgaaagactcagattttcaaaaatatttatgagccaactagctcgggggtcatttc

SEQ ID NO: 42271 - DNA, 893 bp, Heterodera glycines
atataaaatttatcaaaaccctaaaaatatgtataaaaaattatttttgcatgcataaagcaagcagtttagtgaataaggttttttagtgaacatattctttgatctcttattatatactattatcattaaattaatatttatagtaattaattaatttttatatagaaaacaataaaaaaatatttattttctgcaatttacaaataaattcgacctttaacagtttataaatttaattcaaattaaatacattctaatttctattggctctaactaaatcaaacacagaaaaataaataaataataatgtagtttcattaaaatgcttttttgctaatgaaatattaaaaataataaattacttaattaataaaaatttaatttttgattaaatggaaaattattcatttaaaaaaaattaataatattactttgtaaaatgaaaagaaaaattctaaaaaaataatttagcaatattaatagatttattattataataatgttaaaattaaaattccctatccccgggaacatttttcttacttggttcattcatcaagaagcacaaatattaatacattttgataaaatccgggcactggttagaccatgataagtccaaatatattctttatttgtaaaaaaatactattattattcattagttaaattaattgaaattcttaaacaaaaattatgctcgatcaaagcaagaactaaatgtaatgaatggaaagaatattgttattaattcaaaaatagatttcttttaaattaaagtaaaaatggcttcttagctgataataaagaaatacaaaattaataattttatttttaaatatttatttttaagttggcattgctttccttataatagaatgccataataa

SEQ ID NO: 42272 - DNA, 70 bp, Heterodera glycines
cgccgaggacatgcagggcatcaagctgcgcgtgatgcagaaccagatcgcgctgggcgtgttcaacacc

SEQ ID NO: 42273 - DNA, 829 bp, Heterodera glycines
gggggggggggaagggatgagacaatgatcacgcccaacagtgatcagataatgatcggcagtgatcagacggacagatgagatgattcaattgacagacaaaggcacagtgattagagaaaacaacaaatttatcactcggaaagtaaaatggaaagaatcaatgtatcaaagagcagcaaagagatcaaatcacttcgttttccattggtcgtcgttttttactcaatttaggcacttcggagaggtggggtcactggcgagccaagggcatttctgaacagtcgcatttttcaactccaatctcatccatggattgctctgtcctttcaatagtcgagagtctcgagtcaacaaacctttctttattaggtttgtttcacaacaatcccccaattatccgctgtcattcctctaccccaccgtccctcacttttcggttgtcccccgggggtttcgtcgcttcgcttttccctccttttgcttttccacccaccaaattctgttgtccgcatggattgtgtccgatggagcagtaccaatcgtggtagaagaacagccacattgtggtgaacagcagggacacgtagaaaaccagcgaaagtaattccaaccgacggattgccttttgccaatcactttccatgtcattttggggtgtcatcgacacaatgtcctgcctgggacattctcggggaatttttttgaatttggaaagattgtgccaccttatgccttgtacatttcgctccaatcggcacaaaccgaacgccaactcatcgatcagtagctggaagcactggtagagcagcaatttgtcttggtgaag

SEQ ID NO: 42274 - DNA, 1162 bp, Heterodera glycines
  unsure (1)..(1162): unsure at all n locations
caggtctatttaaaaaccctaaaacttattttcaatttacttattctttaaaaaatgnngngattgnnnnnnnnnnnnnnngnnnntccttaaaaaaaacatnnngnnnanngnnaaaaannanngnaaanaaaangnnaaanaaagnaagnaaangannggcccctgaatgaaatatnanataattttatgtnaataaagtacgtgtataatgaattggttggacaccgattcatattatgtaaatattatagaaaatgatggccgagttaactttcaaaatagattagggtaaaaatttgtgaattcaaaggacaacttcaacaatttatcaatgcaataaaatggcaaatttaattcaatgtttttggacgaggaaaattggattttgcttaaatttgtagaaaataattgtgtcacgaccggttattaaccggtacccctggttttggttatgccggttttggacccacggttttcggttaatgaaaaagtttttcattataaatagcattttgaacatgacgagacttttttttgctttcggccgagtgagtaccgtgcgattttcggcactatgataatttcagcgctcattatgggttgtataatggcgacagcagtttttttacgacgtatttttcatggggaggagtccggcgccggtcaaattcctaaagattaagcggtgacttttgaaccctaacaacgacaatgcatttggacagttgcaaataaatgaacatagtggccgtgatgcaaacgacgagaggcaaatcaaggttttgtgctgagcgaacgaatttgacccataatttgggagggggcaggcccagcccaaaaatttgttcgaaattatggcatggaacatacacaaaattacgatgactccttcggttatccaaaccttagacgaatttcgatatctgtcaacgagaagcgctgtgttggagttggcccgcaaaacctcaactgactcagcataatgttgaaatccacaagcaaatacatcattttggtgtttttgcgcgtagagccaataacattccgttttgaatgctggttcagcaaaacccagctgcggttcaacaaattttggccatcctncagcccaaccaatgcaagcgtccaattttcaaccacgccaaccttatgcctggcc

SEQ ID NO: 42275 - DNA, 762 bp, Heterodera glycines
tatatatatatatatatatatatataacgtgtcaaatgtctctagtttttattttggggcaagagataagcggcataatgaagcagcagcagtcaaaagagcaacctctccgccatcaacaagtgccccctgttttcgagcatccgttctcaatgtgtgtgtccgggtgtccgggcagtggcaagacgaaatgggtattgcgaatgttgtccaacctggacaccctcgctggccccgcacacctttcgggtgtgctctactgttatggggaagtgaatgaagacgtgctgcgactacaacaactggaaactgagacgggggaggaggaggaggaggagtacaaggggggtcaaccgcggcggcgctgggtccgcccctgccacgcgcttcccgatgaggaggcggtgaagcgggcagccaaagcgtgcggcggcagactgctattggtgttggatgacctgatggtcggcatgcgtaacaaaatccttgatctgttgttccaccgtggctccctacacttggggcgtcatgtcgttgtgttgatcacacagcatctgttcacacgagatctgaacatccaaaacaacgtcgcccagtctttggtgttgctgaggatcccggcagcgactctacatggttccgaaaatccacaaatctattcatttttcatcaaatgccgtaagtgtcaatttcgatgaccactgattttttcaaaaaaaaatgaactattggaatttgtcgtaaactgaacagatttgatga

SEQ ID NO: 42276 - DNA, 1478 bp, Heterodera glycines
  unsure (1)..(1478): unsure at all n locations
ttttgttttagcatataataaaaattttaaaattntggaaatttaatatttttgcaattgtctataaagtgctctttagcccttgttttagtgtttttaatgtcaattattaatttttacacaattttttgagagttaaaagctatttttagcaattttaaggcatattttagtgcatattttggtatttttcggttattagtgcatattttatgcgcatatttggcatttttagtgcatacaacttcgaaccctattaataaccgtcgcaaacacaaattcttatgacgatacaaaaataaaagcaacaataaacattttgctttagaaaaaataatttcaataaaattatggcggctcgaaaaactgataattaaatttattggtaaatttaattttaaccatgataatgaataattttaatttgaaatgacagaagaatttattaaacggctttgatatttttaaagtcaactttaaaaaatatattagttattgtaaacacatcaagtaatataaaaaaattaataatgattaattgcgagccaaaaaaacaattttgaatttaaatagtaaaaaatattctgtaataataatttataacagcttgacgaatatctatctcatcctaaaaacaaaatcattcattataagctcattaatgaaaatttggcctagaaattttaatgatatatgagaaaaattagggttagacgggtccgggtatttgggcaaaaaccgggtccgtgattgccgggtattgaaaagccgggtaccacgtcgggtaccagttttcagaccgggtccgggcctgggtaccctggtaaaaccgggtattaagaaataaaaaataaatcaattttttgaaaaattttttcattaaaaaaagtttatgatttttaaaaagcatgaaaaatataatgttttacaaataacgctttattaattgccccaattttttgttgttatttaaacctttttgcggtgattttccaaaaaactttcgtggccaggggcagtgcggtggtgccgatcagggaaggcacggaattccgatttccgacatttttggggtcggaattccgatttccgaaatttttgatgaaaaagcggaaattttttttgaatttttttcaaaaaattaacaattttttacaacttttgttaataaattgcactgaaattttcaaaaatttcccggcggcgcctatcggcaccgccggaccctaaaaatcttatttttcttgagaaattttgcctcaaaatcgctaaatttggtcattttttggacaaaatttgttaacaatttgcattaaatttataaaattttccccggcggcgcctatcggcaccggcggacctccctcgccatgttttcaaaatttgaaaaaacaagccgcaaaaaaaggtaaaatttttgatgaaaatcattgaataattttttaaagcanaatatatattaaatagatcaaaaattt

SEQ ID NO: 42277 - DNA, 833 bp, Heterodera glycines
tgacggacaaaaaaacaaattatttacaacaaacaacgcctatcggccgaggggggggggggagagagcgggagagaaagatagggcggagagagagaggggaaggacagagaaagagagggtatttgctgcatttacactaatcacaagcaaacgcacttattaccttaattaaataattaattaacgtgattaccaaccacgaccatcaaaccatgtaaaagttcaacactctcgacaataatttgttcttgtcagaaacggataaatcaatgtttttgtgacaaacttttattgtaattcgttttctgtatactgtatttgcagggtaattattaaattaattagcataaaaacaaattaaacttagcaattctataataaataaattgtatttttagtccccggcgggatctcgcggggaatttacaaggagtaacctaaaccagaaactctaagaatccgaaaatttctctactatgagccgagactctctctctcgcaaatcccttccaaaattattcgaaagcatttggccaatttgttctcattttaatttcgtggcgttgtttccatggctacgcccgagggcattttgagcggatgtttctcccccccccccccgcacattggggcggtgcgcgacacaaatccgccactcgcccggcggggggggggggggcacggggacggcatctttgtgatttggcacttcatcgcagttgacaacaatctttcaaaactttttgtgagaggcccgcgcggtcaccagcactatggctaattctcggcgggtgatcgcgcccgcattaatcactttaagacggatattt

SEQ ID NO: 42278 - DNA, 1315 bp, Heterodera glycines
  unsure (1)..(1315): unsure at all n locations
caagtaagccaaagaaagggtcacaaagggaacattcgtgnacagaaagggaccggcaaatggacgggcattgctgcactcgaatacggcattcccgtcacactaattggttggcgtgatcattttctcgcaattgacaaatgtccaatttagcggaggccgtcttcgcccggtgtttgtcggcactgaaaaaacagagaatggacgcgtcgaaactgctgccgaagccatcgaaaaaagcgagcgatttggtgaaagacagcaagaaatttctaaacagcattggcagtgtgagtttggggagaattggaaaatgattaatttacaaagggtacgacggtgccggaaaaaatttaaattctcatttttgtaaacagattttcactcagaaattgttaatttgtgggtttttgggaaaattttgcaaacttgaaaattttcaagcgatttttgaaaattttttgaaaaacctcttaaaaattttcaaaaccaatgtttttgtaggcgttgtacgcctccaaggtggtcagctacgcccagggcttcatgctaatggctgaagctagccgcgagttcgactggaatttgaattacggtgccattgctttgatgtggcgcggcggttgcatcatccgttctcgattcttggaccgtattcaaaatgcttttgaaaagaatccgtcgctggtcaatcttttgctggacgactttttcatgaaagccattggagacgctcaggcaattcaaatgcaattttagcgaaacgaactctcaaaacaccgaattgtccccgcaggactcgtggcgtgaagtcatttcgaccgctgttcagcttggcatcccaatgccagcgtttagcagtgccttggcatttttcgatggctatcgtactgaagctctcccggccaatctcatccaggcccagcgcgattatttcggtgctcacacttacgaactgctcgcccagcccggcgttgctgtgcacacgaattggacgggcagaggagggaaagtgacgtcaaatgcgtactccgcctgatgaattaacagaaagacctttcaattagtgaccgatcaaattgtgattttgccttatgttgtcatattttatcacttaattttgcaaggaaattctcattgtgatgaaaaagggattgtcattcacaattaattaattaattagctgtgccttttatgcggtccgtccgacgttttgccatttcatttcattttccctgcccttcgctgtcgtcggtcagtgccaattcgtacagtgtcaaagtacgcgttcgcttccttcctctctcttccgctg

SEQ ID NO: 42279 - DNA, 961 bp, Heterodera glycines
ttttaatatattcctttctaggacttgacctggtttcttgatatcgaagctgttttctacgctatttctaaaacggctataccaaaccccagatttttgaatccggttttcagaaaaaatgccttgtggtgaaaacaatatttcacatttcactccataactttgtgagttcggcacggatcgagaccgggataagaccattggaaagagcagctcgagctctacaagaaggtatggaaagaaaaaatagttatttctgggactttttcagaaatcagaattaattctccaatgtggcccaaattttaggcccccagccacagccccttgcttctcccagttttaagtcttggatttgtcaaataaattcaagacttcaaattaataatcaaaaattctcttaaaatttttttgaacccaattcaaaaaaggaaaaaaatttgcagtcaaaaaattattcgaatttctccaattttgtttccataatttccgaaagttattcggtatcataatgccaaaacaaaacgaaatcgttttaaaatattcctttctggacttgacttgatttcttgatatcgaagctgttttctacactatttctaaaacggttataccaaaccccagatttttgaatccggttttcagaaaaaatgccttgtggtgaaaacaatatttcacatttcactccataactttgtgagttcggcacggatcgagaccgggataagaccattggaaagagcagctcgagctctacaagaaggtatggaaagaaaaaatagctatttctgggactttttcagaaatcagaattaattctccaatgtggcccaaattttaggcccccagccacagccccttgcttctcccagttttaagtcttgcatttgtcaaataaattcaagacttcaaattaataatcaaaaattctcctaaaaatttttttgaacccaattcaaaa

SEQ ID NO: 42280 - DNA, 1005 bp, Heterodera glycines
tctgaaggatgttctaagtttgattttatacattggacctttggttttgttcatcgttcattaaggaatatttttttaaagtaatgttatgttcctccttcggattgactatttgatcctcagatatatagtttatattttcgtttatttttggcataccttcaaaatcttttaaacttttttcaaattttaaaaggccttggttcaaaagagataaaaccatttggtaggcaatatctttgggatagtttttctttaggtcatcacttaaagcatccttgtactcattccataacaaactcggatattttggttcacaattaattaaaatatttacaaaaagatttcggagacctcttggaaatttaaactgactggcttcgtttaagcacttatcccattctgaatcatctcttgttaatcctaaagctaagcaggcttcagcataattcgtatatttaattccattaacaatttttaaatcatcaaaacttgttgcttgtttatgtaacaataaataacgaagataacataattctctgttttttggatttactgtataaattcttccgataactttatgtgtttttttccttggccatttccattttttggttttgttatcataagtgcaaaatgttggcatttcaatgtatttgaattttggagcatttgggtattctttaaaaaagttaaaataagctattaatttacttcctttttgcattgcctcttctaaattatcatcgtttaagttttgatcaaaataaacagtttgttcgttttctaaatgaacttccagtctttctattgtatgtgatttaccttgtaattcatatttaaataaacggtagcaagcttcaacaggactcaaatatcgtgcttcaagatactgccctatttcatcatattttaaaagagttttttcaccattttcttcttcttttacacattcaaccgttgctgcgtcataccctttgtaaatatatttgtaaatatatttaa

SEQ ID NO: 42281 - DNA, 1658 bp, Heterodera glycines
  unsure (1)..(1658): unsure at all n locations
ctttctgtgctttttcattatgttcgcctcgtgttggtactacgctttgattgcatgctttttgacgatgtccatttacaaatacgtggaatggaaggggtgggaaaagcagcggaattgcgccgcaattaaatcaaatatatatttaaatgataattaggacgaaaagcaattaaaacgctaatgaacgactaattgagcaaaggattttaccatacttatttaaatataaaagtaattaagataattttcaggaaaattcaaaattgtggtaaataagagattttgttttatttatttattaattttttggattctgttattggattataatgccaattaaattaattagttttattaatttggccaaatcagtccaaataattaagtttaattggttgtcatttcagcgcaaaacaagaatggggagatggcctccgtgggttggcgctaaccacggcacagtactctctgatgaaggtggaggacaaggacatgcacccgaaaaattggaggcaaaaaaaaatttttttttttgaaattttggggaatttctttttctttgccaggccacaattgctgattttggtggacggaaagtactccaaagaaatgattgacttgcgctcgctgaacttgctgaatttggccggccaactgaaggcgggcaaagggctggccattacgggtccgattttcttgacttgtttttttaattctaagtttttaaatttaacaatttcttatgaattttcaatgcttctccggtttcgcttaccgaaaccgccgaaggtcaacttttaaagtctaaaattaaggaggtgtaaattgatttaaatttttagtgttttatatttcatttgattctatttaccaaaaaaaaagtaataataatttcttaaaattcaaacattctttttctttaaaatgaatttaattgaataaaaaattctttacatttatggtattttggcaccaattctttttcccattttataaaagtaaattttgaaatgccaaattccatcagaaatattttgtttgtctttatgtgctttatttataaatccaatgaattctttctttttctaatattttctcatggccaattccctgaaaaatcgtgtcaatattcccttagtcttacaaaaatttattttttcattttttaaaattaaatttaaaaaaatttaattgccttccctctgattttccagtggcatttgtccgctgctccagcacgcggagcaatgtgcaagaaaaccggaagaaggcggacgaaattaaggacagagtgcagcaggacatgggccaggcccgcctccgcggtttcggcaaagcgttgctgtacacggaaagccaggcacagtgccaaactcaattaattatttagttgacaccgaaaaagccaaatggcggtgataaatatggcatttggcgtatattttttcgatgttttgggtttttgtttaaatttacttttttgatcagtaatactagaagaattttgaaaacggttttgtcagtttgttcggccataacttttttcttaattggccaaagtaaacattattggtggtatcaaacgaagcttaaagtctcggggattttgtgtgtaactaaattctgagctanatcactcataaaaatttattctt

SEQ ID NO: 42282 - DNA, 1558 bp, Heterodera glycines
  unsure (1)..(1558): unsure at all n locations
atccgagtgatattccatattaaatattacctgtttctgtgcttttaggagagtccatggcacttgtgccacccttttggccattggctcatccgttgactttgtctttttgctttcattttctgtcccttttgccatttcgttggttggtcgcaacatgatcagcaatttcgactgctttttcctccaattcgtgcccaactttggcctcttttcctccgtttcgatcgttttcttcgttggcatcgatcgactgatttccgtccttttcccattatggtaaaagttattagtcgcaattagtcgagacactaattcctataatttaatcatttgccaagttcagtaaagtccattttggtttccgctagtcaaaaattgtaaaatgctctgccgttacttaggtactgtcttcttgagcggcactttttcatttacattttcccaatgcttacggtaacctttggctacagtatctatgtgctgattgaagcggcacaattggtactctttgtgtacccagattggtaaaaatgtttttattgaaaacatttttagtttctttttcggatttatgcttttagggctgttctatgcaccaacggcgacatgttcagctttggcatgtccgcaatggtgctgagaaatggcctggtgatcaacggtgtctctttcttttgctatttatttgtcgggttggcaatttttcgctgtcggaagcaaagttggacggacaaatgaatataaaatagttaatgtttcacaatgtcaaaatggttcaccttctgttttagatccgaatgccatggtcatacatcgaattttcaagtccctcgctgccattatggctttgttggttggcacttacttttccatttgcttcatccttttgttgtttcgctctgtcaaagacccatttttcaattttcacattttgtcttccatcagcgcactgctcacagtcacagcggccagctccaacggactcattctgtttatatttaggtaaaaaacgaaaacaaatattgccaaattaaataatggtaattattttttaaatatatttttaaaataattcaatttatttggataaattagcagcgaatatcagctggcgttccacaaacatctcaaaggatggcccctgattggcctgtgcttaagccgaatgggacaacaagtacccgtaaatgttattgtggtcaccaatttcaacattgctgctaatcaaccgcgcactgttagccgccaatgtgggcaaatgacgacaaaacagaaacttttggacggagccaaaaagccgaaaattatcagtagcaaatcaaccatactctgctctacatgaccaaagcaatttttttaatgtgattgngcagcggatattgttcatcagttagaattcgagagaataatcacgaaaataaaaaatatattaaaaacattttaacacacttagaatataatacaataaagcattctctttttatcatctctcaaaaagttcgttcagcttttgtctcgaccgaagatcactnctggatttacaattttaactgat

SEQ ID NO: 42283 - DNA, 1660 bp, Heterodera glycines
  unsure (1)..(1660): unsure at all n locations
gctgccggatatgttggtgatggtggtggtcgtggcgcttttcatcgtcttcaccaaaactacttcatcgtcgtccgtccgtccttccgccgtcaaagtcgtgccctcctcctctcctccttcctgctgccgctgctttggccattggacaaagtgggccaatcaaattattatgagtttgtgcttgttataagctaaagagggtgtgccatcatgccctgcagccgacgacggcacacggggcaaggagaaagcaaaaatggcacacaaaaaaaagaaataatcaccaaagccaagcaagggatggcacccagtccctcacttaccggcacggcatggcattagcaccccgagggcacacacacataacaaagcgtgcccatcccgtacagcagcggtccaacagagccccgtcgggccactttattccccccacccatttccattatcattgttgctcctttctcaccccttccccccaatgtgtgtgcattcttcatttttcacagactgtgccgaggttacgccattagtgagtcatgccatgttaaataacatgccccatgatgcctcatcccgggctttaattgtcaagatttcatactgtgctttttaataccatacacttgatagctttactgacaagcgaagacactcatggtctcggctcgagactctcgaggctaagatttgtgctctgtatagcaaatttaggtgaattgtgatataccacatcatatcaattcatggaccactttgccccctctttgttgagtacataatggagggaatgaatgatgtnggtggtggtggcggaagtggtggtggggaaaaagagaagagtttcacctctccatctccccctcccccgtggcactttcccccgtgccgacgaagacgacccatccaactacttagtggtgtcctctccaattgaaccctcctcgctcgacccacgggcggacccctcggccccgaagggcaccaaccccccaccattttgctacagctcctcctcatcttccactttttcttcccatcctcaatccctcccccccccccaatggaatggtccatccattcattgccccccgggcctcatcacttctcattctcccaccaattccagcccccctccccacccaacctcaaccacattaagcacatttattgactaaccacttaaggaggagggggaggagaagcccggggagaaacggtctcgccgcccccggtgcccttctttgtcatcaacgaaaagcgtctcatttatttcaggattaagggccccccaaccaacaccacacacatcaaagcaatttggaagaaattttctaattttacatcgcatttgcccccgctttcaaaaacaagtgttgctgtttgttttggacagtgtgttcggcggtgttattttatcttttctgggtgtaatttgatcagggcttttaaattgggggatgacacgggcaatcatcatcaacatcaataataataactacaacgacaaatgatcaacaacagcatcattagtggacaacggagcagcagcagccgcaattactcatattttttcactgttttaatactgatgatgatgatgatgatcattttgagcagcaatagcggcatcaaatgtgagcggaaggagacaattttg

SEQ ID NO: 42284 - DNA, 1411 bp, Heterodera glycines
atatctaataaatttataatataattctcatatattcttttgttgtcttggattgtttgtgtagaaatttcttataacattataaaatagttctacaaagttttttttcgactcacatgggattaaagtcgctattagaataatgattaaaagatttcctagagctatttattacattatttactttcaaatagttttattattaaaattaatattatattaatcttttaagtgcctttgaataataagaatcatttattttttaattctattattttttaaattagtaattatatttatatttgtttaatcatatagtttttatttccgaatagatacgcatactatggtaagtgaaaacaacacataatgcttatactaatacattcatgttttaaatattaaattaaaatatattcggtttcttcaatttattatctattcttttggtgccaggtattgcaattattttcttcacgttcgaatgagattttcattctcttacctaatttttttatattaatattttgataaatttaaatttaaaaatttaattcttcaattctacagcacggttaatctttttatattgttatattaattttctaactatacaaaaagtattttaaatttttgtattaaatatttctaatttgaacattgaactattttccatcatgtttcattaacattttcgaatttaagacattattctctatttctttacggtcggactgaaaataagattctcttatcaaaaatgtatattattaaaatatttaattcttcaatttatatcataaccaattatctttcaaatgatagcgtagattccgcttttatattgatgcaacaacgcttgaatttttttacttttttagaatttagtgaattcatatttattctagatgtttttttactaaatgtattattttttttgcattatgctatgataatgcttcaggcttttttgaccttgaatcaaaataaaacaataaatattcgtaaaattattataaacttggcattagaatcttgattgaatcgaaggcaaaatttggatgcagcaattagacaatttttttatttaagtgtaatttaaaatacaaaaattaatttaatttttctttctatttttaatctattttacaaataatttggattggctcaattacagaggcttgaagctttttgatagtataaacgaattttttttattttttgcacgaaaaatgttctttcaattttttttcaatagattttcacaacaagtaagattgtttaatcattagtatattttgttatgttatttttaatatgtaaaattttaaacatgaaactatttgcacttttgtgaattgcaataattgattttattctgtagtattttttagacagttaatattattac

SEQ ID NO: 42285 - DNA, 1002 bp, Heterodera glycines
agtgtttgtttttttttttataaaaaatttttcctctcctctccccccctctgaggggcacaccagcgggggcactctcacacgattcagctgttcatgggctctctaaacctatttttattttttttttctatctcttctctgaatggagttataacaatttttcacaacagttttgcatttaacagacacattctaaaaattctaattagtatggtagtccaagcctattatttttttttttgacttgtctctgaatggggttatcccagttttagtatcctttttgaaaaacatcaattttaataactgatacggtagcccaacatccattgccccaatgtacccttcggtttgtcaacgggagcaaacaattgatgagtttgtttggtttcttttttaagcaattttccgtcattgctcaccaactgttaggcgtacagcaacggcggtacttgcatccgattcagctgttcatgggctctctaaacctatttttattttttttttctatctcttctctgaatggagttataacaatttttcacaacagttttgcatttaacagacacattctaaaaattctaattagtatgttagtccaagcctattattattttttttgacttgtctctgaatggggttatcccagttttagtatcctttttgaaaaacaaaaattttaataactgatacggtagcccaacatccattgccccaatgtacccttcggtttgccaacgggagctaacaattgatgagtttgtttggtttcttttttaagcaattttccgtcattgctcaccaactgttaggcgtacagcaacggcggcacttgcatccgatgcagctgttcacgggctctctaaacctatttttattttttttctatctcttctctgaatggaagtataaacattttttcacaacagttttgcatttaacagacacattctaaaattctaattaatatggtagtccaagcctattattatttttttt

SEQ ID NO: 42286 - DNA, 1421 bp, Heterodera glycines
gacttttcgacagaaatattttaaatttaaggaggggacttttcgacagtggacttttcgacagcaaaggacttttcgacagaaatattttaaatttaaggaggggacttttcgacagtggacttttcgacagcaaaggacttttcgacagaaatattttaaatttaaggaggggacttttcgacagtggacttttcgacagcaaaggacttttcgacagaaatattttaaatttaaggaggggacttttcgacagtggacttttcgacagcaaaggacttttcgacagaaatattttaaatttaaggaggggacttttcgacagtagatttttcgacagtaaaatgtaattaagtttcaaatttaggggtgtaaaatcttaaaattttatccaaaagcaacaaattaagtcaaataattattgaaatacataatttttaaattcaaaaattcttttcaagaatgtaaacaaataaatggagatgatttttttaaaatattccatttcttaagatgtattttttgaaatttttgatcgacttttagggggtgtatttttcgtttttattacctttttattcataagttttttgcaaaaatttattaatttaaagttctaaaaaataaaaatctagaaaatagatgctaagaaatcgaaaaattgcttaacaacaaccaaaaaaaaacattttttcgtgcgtttcaggtcaatgagagtcaggaaaaaattaggttaaaacctaaaaatattagccctagtaataatgatttagcaatacatattatagtatgttaatttaaaagaaatttagtaaaactaacaagcaatataatttattttaataaaaattatttgtttttatgtttactgtcgaaaagtccactattttttatttttctgtcgaaaaatccttcactgtcgaaatgtcctttgctgtcgaaaagtccttctgtcgaaaagtccgggagccatttactttcagtcgcttttctcattcatcgcttttctcattcattcgttctgtgcttttcccttaacagagcacacaaagatttgtcggatcctttgattgaacgctcggaatgtttgagcccggaaatgttcgccaaccaaagccaatttcagcgccaatgcgcaacccacgaaacattttgcatggtcagtggaaacggaaaaacacgaaaatctacaaaaattgaatcatttgacggacttcagaggacaccgattctaaatcaattctaattttaattgctgatcaattaccataccatttaattggcaattcccctcaaagacctccgtctcctctatgaacggcttttttgtggagatgcgtcgcgactgtgccgaacggtgtcggcccgggtgccaagagagcggatacggacttttcagcagacaatgtctccgattaatg

SEQ ID NO: 42287 - DNA, 989 bp, Heterodera glycines
atttaaaaaaataactctaattactccacagtgtttaaccctttagaaatgtggttaattatcattcataacattatcacgtcgttgcttaaatcccctcaacatttcaattcttctccattaagcccctgggctcatctttaattttttgcttaaaattacgataaattttttatattccactgttttcaatactagcaaacttttccatatcacttaaaaggctgatattcctagtttttgttaacaaataatcttttttatatctagagcgttgaataaataggatgaaaatgttttaatcaaatattttacttttttctgcaccttgttttggagcagttacattaagtctatgttatagccagcatcctcaaacaaatttgatatcttcaaattttttattccttttgccggtatattaaatagtcaaaatttagaaagacatttaaaaaaataactctaattactccacagtgtttaatcgcatgcaatgtggttaattatcattcataacattaacacgttgttgcttaaaccccctcaacatttcaatttttcttaattatgcccctgggctcatctttaattttttgcataaaattacaataaattttttatattccactgttttcaatactagcaaacttttccatatcacttaaaaggctgatattcctagtttttgttaacaaataatcttttttatatctagagcgttgaataaataggatgaaaatgttttaatcaaatattttacttttttctgcaccttgttttggagcagttacattaagtttatgttatagccagcatcctcaaacaaatttgatatcttcaaattttttattccttttgccggtatattaaatagtcaaaatttagaaagacatttaaaaaaataactctaattactccacagtgtttaatcatatgtaatgtggttaattatcattcataacattaacacgttgttgcttaaaccccct

SEQ ID NO: 42288 - DNA, 775 bp, Heterodera glycines
  unsure (1)..(775): unsure at all n locations
acttctgagcgcaccttaaattgacggacggacgacggcgtttaaggggnattgntaaggggngggagaaaaagcatccttagggggggggggggggggaaaaaaganaatgtcttattttgagaaagggtatacgttacaaaagtgttttttcttaaaagggagggaggagagaaaaggagatgaaaattggtttagaaattttagatttattttatataaaagaaaaatgattatgtgttattttgagaaattttatatgatataaaagaggtagagagtgagagggagggtggtgagtaattgttatttaatttttcagagaatttttaaatttattttatattgaagaaaaaagagtatatgttattttgagaaattttataagttagaaaagatgttgagggtgatagggaggggggtgtgtaattgtaatttaatttttcagagaatttttaaatttattttatatctaagaaaaatgagtatatattattttgagaaattttataatttataaaagtgttagagagtgataggaaggggggtggggaatagaaatttaattttttagagaatttttatatttattttatatttaagaaaaatgattatgtcttattttgagaaattttatatgttagaaaagatttagagaatgataggagggggggggtgtaatcggaatttaatttatcagagaatttttttattttattttatattctaagaaaaatgattatttcttattttgagaaattttatatgttataaa

SEQ ID NO: 42289 - DNA, 1605 bp, Heterodera glycines
  unsure (1)..(1605): unsure at all n locations
gaagttgatcttgataaataaatctttaaagcacattcctattaaatttttagatacgaaaaaccattttaaactggaattcttataaaattaccctaaatattaaaaattttttaaattagtatgaaaaaaggtatgcttattaaattcccaaaaatcttaagcatgaattcttggtccagaactttttgaaactcaatgaaaatttctgaaattttaaggtaaataaagaattcttagtgctaacaaatataatttaattttggctcaattgcattttaaacactttcaaatattaaatgttcataattaataattacattgtatatgaatgcccatgcaaaaaacataacatattcgatgctttataatttttatacataagagaaaaattttggaaaattatattctgaaagagattaattaaagcttttgaatgataccacgaaatatttaatttcaaacaaaatccctcacatttttgtacttagtaaataaaagtgaccaaaagcaatgaaaaattaatacaattgacaaacaagcgaatattcctggcaaaacaatggaagacaagaccaaattggtgacaaaaatgagcatctcatttttcacataaccaaataaaacccagttaaaatcgcctaattaggcacaaaaaattcccgaaatagccatgaaatacatcaaatttaaaaaagttggccacgtattaattgggtttttacttcgtcgttacatttcaaaaataataaaaataaaataataatcataataataatagacttaattttttatatttgtttttctaatttttttttttagcaaaacagttaataatttagatgatagggctttcctttatggcaacaattttctacgtcataaatggtctattaatagtagtttctgagagttttgggtcactcagattatggatatgaatacatattggccattttcattattctgaattttttaattcatttttttgggttctttccttaatatttatacaatattcaaaattattttagtacgttaattccctaaaataagctagccaaatgatggagattttacaaaacagaaacacgatccagcacattcgaccctttaatccctttgtaaaagtaaggaggttcttttgtaaggaacatttcgaaaaattcatgaaacttcagaagaatgattctcatacgaatattacaaatttatgttttacggatgtcactaatattcattttatatatatcctattttattaattgccaaatttgtagccatgatattattttcttgttgaaaatcaaatttatttttaaacgttagcaaattgtcttcgccttagctaatggctccccgcagcttacaaatgatgttgctggtcaaaaaccaaatcacactgctgctgtacatcaataaagaaacaattttaaccaatttatcaatgttttagcccaaattttttaattgaataaaacaatgtttccctaaaaaatttttcattatgccgaaaaatttcaaaatttcatttatagatagaacttacgtctgaatatatgtaataatcacattgattnttaggggggtggtaaattggactac

SEQ ID NO: 42290 - DNA, 1038 bp, Heterodera glycines
tagtcatttttcttggatataagataatttaaaaaattctctgagaaattaaatggcgattgcgcaccgcccttcctatcaagctcgagcgcatttgtaacgtataaaatttctcaaaataagagatagtcaatttcttggatataagataaatttaaaaattctctgagaaattaaatggcgattgcgcaccgccctccctctcacgctcgagcgcttttgtaacgtataaaatttctaaaaataagagatagtcatttttcttggatataagataaatttaaaaattctctgagaaattaaatggcgattgcgcaccgccctccctctcacgctcgagcgcttttgtaacgtataaaatttctcaaaataagagatagtcatttttcttggatataagataaatttaaaaattctctgagaaattaaatggcgattgcgcaccgccctccctctcacgctcgagcgcttttgtaacgtataaaatttctcaaaataagagatagtcatttttcttggatataagataaatttaaaaattctctgagaaattaaatggcgattgcgcaccgccctccctctcacgctcgagcgcttttgtaacgtataaaatttctcaaaagaagagatagtcatttttcttggatataagataaatttaaaaattctctgagaaattaaatggcgattgcgcaccgccctccctctcacgctcgagcgcttttgtaacgtataaaatttctcaaaataagagatagtcatttttcttggatataagataaatttaaaaattctctgtgaaattaaatggcgattgcgcaccgccctccctctcacgctcgagcgcttttgtaacgtataaaatttctcaaaataagagatagtcatttttcttggatataagataaatttaaaaattctctgagaaattgaatggcgattgcgcgccgcaccttcctctcacgctcgagcgctttgtaacgtataaaattctcaaaatagagatagtcatttttctggatatagataaatttaaaa

SEQ ID NO: 42291 - DNA, 1271 bp, Heterodera glycines
atgacacttattgttagaaacttatgggaattttagccccatctaggaattttttgtccgtttttttacattcttttcacctttaaaatcctttgatgctttctttaaatattttttgcgtgagctttgttctcctccttcaccttgcatttgcctttgtccatggccatgcccacagtgacgagccaccgcatttaaaatacacacgcgaagtcaacgaagcggtggtaaatccaataaatgtataattcattatgtagcaaagtttgtctcttaacttattatttcagacaaaaagcgaagatgcaattgatcaccaccagcacggccatttgcatgacgacggacatggccatcaccacgactgtggagggcaccagcacagccatggggaacggcacgagacggacggaaagagagcggcgagcactctccccaaaatcggaagggcaacagacagtgacaaaccgtacgacaaagacaggttcaaatgatgagtaatagccaagacaagctcatcacatcatatcattccatctctttcagctatttggcctttctgaatgaccccaaaattcgcctttggacgtacgccgttggctccaccgttttgatcagtgccgtcccctgctttttgcttcttttgattccgatcaaagtctgtcccttcgtccgtttgcggttattcctcctttaggaaaacactgccgaggattcgcctttgttgcgcactttgctcgctttcggtgccggtggacttcttggcgatgcgtttctccatttgattccccacgccacgccttccggccattcccattcgcactcgcacaatgctggcgaaggccatgcgcacggaccgcacgacctttcagtggggtcgtgggtactcgtcggttggttctttctcgtgctttgacttggtcagattataaacattagtttggagttggcttttacataggaaaactgcaatacattgataaaatttgttgaggatcaaacaacaatctttttgacccaatcgtttttttacccaattcatttcttatttgaaacccaaaaataggtcgagtcgtgtttcagtccaaaaaacgatttgaaatacgtttcagttattgttttaccagttattccttccattttcatacaggttttatgacattttttatcgtggaaaaatctgtccgaattattcgcggaaatgacccaccgggccacggacattcgcacggagatgagaaaaggaagaaaaagcaggcaaagttttctga

SEQ ID NO: 42292 - DNA, 842 bp, Heterodera glycines
aagccaatatcaaatcgacacacaaaaccatgaatgaacgaatgtatgatgaataatattaagtaaaaattcaattcagtaaataataaagcatgagaaaggtcagagaattgctggacggtcaaacagaaagagggggaggagagaacgggggggggggggttaattatctcataattcagtgctgtacgatttttatttaaatattttttttataaataattttaaaaaaaactttttagattttttaaaaaatgttgtgcaaatgcggcgaatgcttcgaatgcgaagatgaaaagcgccgcctcaagcgcaatcgggagctcaatacccgcaaagagcaaattaagaactgcacaggcaatcatctagcaccggctatgatggaactcaaacgccggaatatggaactgtttaaaaaggcttataggccggtgaagggcgtcatcaataaaataaccgggggtgagtttaaaaaagaaattgaaaaaaaaaaaaattttttttaggcccttggaatgtagaatgtgaggtctgccatgagaccttcacatacttcatggtggagtgggaaaactcccggaccgacttctcgtggggtcccgggaggaccatggtcgaagcggataacatagtaaaaatttttgaatttttttttccagttaaaaaataattttagaatcagaaagaaattttggctcactatgtaggccaaaatgatctactccagaatgaagtggactattatcagaatcttggtaataatcctccattgaatgtgtccccaatgggggaggatgctataatgttgaccagggacgatggtatgccgattggtgcag

SEQ ID NO: 42293 - DNA, 1739 bp, Heterodera glycines
  unsure (1)..(1739): unsure at all n locations
aattcatttattataaatttntggaaaaacattaatttatctatatataagaaataaataaaaactaaaaagcattaaaaaagcttttaataaaggcacgtttcttactaagttagaatttagaaaaaaatatattaaaaacaaaatttcatcaatatcgtaatactttttggttaatatataataattattatcaaataaataaaatatttctaagtttcttaattttagcttttccaaaatttcgacacacaaagaagcaaattttgttaaaaatgagtgagtgtactgtggtgacttttcttatgtaagttttgggtacttttaaaagtgccaacttttatctgggcggaaaaccgggtttaacgggttttaacagcgtttatttaagcgcacttttggcaatcatttgttatgccaatttttgtgccgctgtgtcaaagcaatggacattgttggatcttgacgatatggagggcatgagaaaagacacgcagcatggtaaatgaaaaaatactcttgagaattttgttattttccactattttgccacaaataatttctctatagtgccctcaaaaaaaataaataaattcgatacaacaatctggtcttgatttgtttcttgaatacacagatccagatccacacatagtttctgggcaccgtacactcagctaaaaattttaaaaaattttaaatttaaatttttaatttgttcccaacaaaaatgcattctaacttagctctgaagcaaggaaattttaactcgataattctagacttagaaaattttttgctagctatattttttatgcgctaatagcagttatgaatatttcctctcttaaagggaagtggagaaacaaacgtgacggcacagcggtcaaagaatataatgccaaaaacatcaactataccgaattttatgctcgcgttgtcgccaataaatgcctactgaccgtgaacaaaacccaagaagaagtggagagggcggaggaggaggaggaagagaacgtggcaaatggaaaagttggcattttgtcactgacaaatgagaaaaaataaattaatggaaatttcatagaaatttgctaaatctttaatcaggaggatggtaaagaaatcggccccatatcaaggaggcggaatggggaggcacgtacccccccccccccggccgccccgaaatgaaaaactttaagaaaaaattgcaatttttttgaaaatttacacgatttaatcaaaagtttgaaagaaaattttcccgttgatgccgatcgctactgccggaccccattctatcattgtttattaagaatttgacctaaacaacacaaaatatttcattctttggagcaaaactgctacaaattccttcttttttggccccggcgcgctaatagaaaaaatttttggcccgaagagcaaagagctcatcgggtgcccccacagataattttttatggatacgggccagaaagaaatacatagtatatttttgaattaaatatttgaatttatataataaagtgagcaatttttcaaattttccatttcctanaattatatatatacagattcacgtattcgaagtcaaatcacaagaaaacgagaagcagcaagaaagggcaagacctgacactttaatcgcgtttcacagaattgtcattacgccagnaaagtgccggcacaaccaatttgagtaaattaattaattccatttttaaatatatttt

SEQ ID NO: 42294 - DNA, 1384 bp, Heterodera glycines
accgagaacgcacaactgagagcccgagctggaccgaaccgtttgctggtacgtgtcgcacgcgaccgccaccgacccccagctcgagtcaacacggacccgaaaccattgcacaattcacccagagtaaacagcactcccccgatccgggtaccagaccccgaaaggctggcctcaagaccgagctcacgcagctactccgagcatctcagcgcactccgcctgcaaatgccccattcgccactgaacagaaagaaggacagcaaaccccagtctggaggctagcagcccaacgtacagcaacaaacgggtgaatgcagaccagatacgccagctctgtccgtttccacctcatcggtttcacgtcctctttaactctctcttcaaagtgctttgcaactttccctcacggtacttgttcgctatcggactcgtggccgtatttagtcttagatgaagtttaccacctgatttgggctgcgatcccaaacaacccgactccaagacacgtaaagatgggtaggcaccgccagttggacaggtcttgcaccttctctggagccccggtcaagggaaacttgaacaagcgggccaacccaagctcacggtctatacgctacacctcgcaaccccagaggagctgcgattcagcgctggactcttcacagttcactcgccgttactacgggaatcctcgttagtttctttccctccgcttactgatatgcttaagttcagggggtgttcacgtctgagtttcaggtcgaaaaatcaaagcaggaatgccagtaatccaggcactccgccacagcatgcaaagcattggtgcgcccgagttacggtccgtaaaacgcgaattagaaccacaagttcgcgccagcacaccaaaaccccacagccgagctaagcaagtaacgtaagaacacgtacaagtacatgatcccacgaagcaacgcacaagcagtgcattttatggtaacgaccctgaaccaggcgtgccaatggatgtaactccaatggcgcaatgtgcattcgaatgttttgtgttcaaggtttctgcagttcgcactaattatcgcagttggctgcgttcttcatcgatccacgagccgagtgatccaccgataagactagaattcattcttcaacagaagtgtaaaaaaaaataatgaaaaaaaagaaaaagctggcggtgcccgagctgacactcattgagtcttaagccacgtgctaggccaagcacgggccctaccacgtcgtctcatcacggccacggacgtagcagcaagcacaaacacaccgctagttacggcacgtaagaccgggaacgaaaccaccatccccaggcagtgtgttatgtgcctgccacaacaaccgctcaacg

SEQ ID NO: 42295 - DNA, 632 bp, Heterodera glycines
gggcgcatcggttcgggggatctcccccgaaatcaaaaaaatcgattttttcaagtgtccgtttggggtactcaaacaattatggggagcaaaaatccaccgcagaattaaagtccaggctatagggaagctactcccgaaggattcggtctccccataaatctgggcgcatcggttcggggggcctgccccgaaaacaaaaaaatcgattttttcaagtgtccgtttggggtactcaaacaattatggggagcaaaaatccaacgcagaattaaagtacaggctatagggaagctactcccgaaggattcggtctccccataaatctgggcgcgtcggttcggggggactgccccgaaaacaaaaaaatcgattttttcaagtgtctgtttggggtactcaaacaattatggggagcaaaaatccaacgcagaattaaagtacaggctatagggaagctattcccgaaggatttgtgctccccataaatctgggcgcatcgggtctctgcaactgcccctaaatataaaaaaatcgatgtttttcttcatgccatcctcgaggtactcagatccttctataaaactaaaattcattcttcaattaaagtacaggatataataaagatactc

SEQ ID NO: 42296 - DNA, 1015 bp, Heterodera glycines
  unsure (1)..(1015): unsure at all n locations
attcagacattgcttgtcacgggcactttgctttagatgtggagaaaagcatcacgttttggtatgctcgagtccggaaaagacgcccgccaaggggagcaatttggctccgttaggcacccgtgcaccaggcggaaggacatcccagtgggaaaatgcgcccgctacttcttcggcagccccccctcagggcaacagaaatggcactcagattgcctcggccattgctgagggcgaattttttacccctattaatgagttttgcgccgaggagaaaacccgaccaaaggcctatctcatgattaaggaaattcctgtttttaatcacaatgggccctctcccgtgccgacgcccgtcttttttgaccccggctcccagcccggcttcgtttcctctgcactcgtttcgcagattgacccccctttgatcacacaggaaaccatggccgtagggggttttttggggagtggcccatcccaaccaatgaaattttcgtcccctcgtttttcgatccgcctgcggcggagggacggcggttgggaaacggtggaattaaatcaaactccccacatcatcccgccagttgagtttttgagggaaatacattggaaccccgccgaaaagctgaaaatgggagtagcggttaaagaaccgcaaattttgctcgggattagggaattttggaaattttttgtggccagaacggaaattttccccgggctgttccgaattgatacagtttttggccccgtatttggaggggagatggaccatttttgttcgcccgtggtttcgcattcgattccaatggcctgtggggcaattctgaggcaagaagaccctaaaggaggtggtccagcgcctatggaatttggaatcaattgggattagtgacccgttggatccgaatgacgacgaattggctatctcccttttttaagattccgtccgatttngaggggaaagatacgaaagttgggtgggcatggcgtccagggggaaagagacgattgc

SEQ ID NO: 42297 - DNA, 526 bp, Heterodera glycines
aagctaatagaggacacttacaaaggagaggtgcccaagtgacggtgggatttccgaatgaaaattacagggtaggtagattacccccccccccccacccctttggatcataaaactcatagtaatcaagactcccgcaattcctgtaacatatttcaaaatgttgccctcaagaccgagctcacgcatttactacgagcgtctcagcgaagtccgactggatgtgccccattggccagtgaacacaaacaaggacagtcaaaccccagtctggaggctagcagcccaacgtatagcaacgagacggcagaatgcaaaccatatacgccagctctgtccgtttccacctcatcggttacacgtcctccttaactctctcttcaaagtgctttgcaactttccctcacggtatttgttcgatatcggactcgtgctagtattcagccttagatgaagtttacccacctgatttggtgctgccatcccaaacaacccgactcctatacacgaaaagatgggtacgcac

SEQ ID NO: 42298 - DNA, 1018 bp, Heterodera glycines
attttttaggtcaactttttgccgtgtcactacaccttttataaagataatctcaaacattaatttttataatcacaatttagtgcccttcccattcacttttcaattacttttttttttaaataaatttctcctaaaaaatcagcaaaaacagcagctgaagaacacttgtgtcggtcattcaatcactttcgtttccatttattactgttgttaattcgcatttccttttttcaaattgattttttattcaaataaaatgtcaatttcgaccggtccaacaaatggcacagccgaagcagaccagggtattgtataatttaaaacagtttctcaattagatatttttaagattttctatttctaagccatgaaaatttaaaacataaaaaacgatagcgctttaataatttaaaaagattcatttttaaaggccattaagttttagatctatctaaaaacctgaagttttcgtttcaccagcctcataaaaaggcttaaatctgagatttttttcttaaaatgaggaaaaattaattaaaatataatttataattttgaaatttaatatttattttcagcactcttcccaaatttgagtccgtccgaagaattgcgcctgttgagagcacgaattcagcaattggagaaaatggagcaacagcagcagcagaacatggaaatggaatcgtcgtcaaatggcaattccaatgaatttgtgcagagtgggaacggtaaaaaaatgagatacggtagaaaattaaaaaataaattgaataaattattttcgatgatcaacccaacgcaatttgggaacgaattggccaattagagacacagcaacagcagcaaaagggccattttgaaaggatgatgagcatcgtccgcgaagaacaaagtgccaaatttgtcaccatggaaaaatttcttggtgccttgggggagcaaatcattaattaattagcataattaattcctgggggggttttttcgcgtagttgatcagcttttgcatcaa

SEQ ID NO: 42299 - DNA, 1023 bp, Heterodera glycines
tcaaaaagcttctcaaacaattttagcgcttccaattccttctacaatcgcctttatacatcccattatgagcgctaaaattatcagagtgccgaaaatcgcatgtgatctaagcctagaaaaaatggtctaagtaaaaatcgtaattacgctcaaaaagcttctcaaacaattttaacgcttccaattccttctacaatcgcctttatacatcccattatgagcgctaaaattatcagagtgccgaaaatcgcatgtgatctaagcctagaaaaaatggtctaagtaaaaatcgtaattacgctcaaaaagcttctcaaacaattttagcgcttccaattccttctacaatcgcctttatacatcccattatgagcgctaaaattatcagagtgccgaaaatcgcatgtgatctaagcctagaaaaaaatggtctaagtaaaaatcgtaattacgctcaaaaagcttctcaaacaattttagcgcttccaattccttctacaatcgcctttatacatcccattatgagcgctaaaattatcagagtgccgaaaatcgcatgtgatctaagcctagaaaaaaatggtctaagtaaaaatcgtaattacgctcaaaaagcttctcaaacaattttagcgcttccaattccttctacaatcgcctttatacatcccattatgagcgctaaaattatcagagtgccgaaaatcgcatgtgatctaagcctagaaaaaaatggtgtaagtaaaaatcgtaattacgctcaaaaagcttctcaaacaattttagcgcttccaattccttctacaatcgcctttatacatcccattatgagcgctaaaataatcagagtgccgaaaatcgcatgtgatctaagcctagaaaaaatggtctaagtaaaaatcgtaattacgctcaaaagcttctcaaacaattttagcgcttccaactccttctaccattgcctttatacatcccattatgagcgctaaaatatcagagtgcgaaaatcgcatgtgatct

SEQ ID NO: 42300 - DNA, 391 bp, Heterodera glycines
ttaaaaaaaacaacataattttcgttgaaacttttctaaatcgtttaaataatcgacaaaatttttacagttgaaatgtgtcggcggagtgccaacactttttgctgtttttgcagcaaaaaactggacggaaattgagcagaattttgatgaattgaagaaactgagctgcaaataacggaaatgccaaacaaacaaacaaaaaatggctgataaaccttcttaaaaaatgtaccttatcttgattcttttgaatctcaaaatttttaaaatgttccattaattaaaatcacgaaaattgttgaaaactattttttaaacaaaaaccaaaataaacataaaaatgcatgataaatttttctttaaaatgattattattagagtagagcgg

SEQ ID NO: 42301 - DNA, 1178 bp, Heterodera glycines
aggtacaaaaatgattagaagaggtacaaaagtgataaaagaggtacaacagtgattagaagaggtacaccagtgattagaagaggtacaaaagtgatcagaagaggtacaaaagtgatcagaagaggtacaacagtgattagaagaggtacaaaagttagtaaaataggtacaacagtgattaaaatttgaacaaaagtgattagaagaggtacaatcatggattaaaatgaaataaataagaaaattgtattattggatgtattataaatttatcaaattaaaaaatccttttacttattaaaaataaagttagaaatttataatatagaatatttattgaaattgaaaggaactaatttctcgaattttataaaaatttaattcaaataaaaaaatgtaatttattattaataaaataaaaaatattttaaatgaataaaacaatgaaaacacgaaaaaaatggtagttattaattaaaaaaacaacgttggaaattattaattgaatatttatttaatttgaaattaaattattttttttacaaattcaaaaaaaataatgaaattctttaagttaaaaaaaataaatttaaataatttaaaagaaatcttcaaattaattaaaaacagtcaaaataacccaaaaatgcactgaaaaataatgttacaccgtccggattcgaactttgcacccccccccccaaaaatgatgcctcagaatccccaatcacacagggattctgaggtcttgactatgtgaaaagttaaatctgatcacgtaccaaataaaatccataaaattctcctgatttttctctatttttaaggctttattcctgtaaaattgatcaacccttcgatttgttatgaattttcaaatattaggccaaaatcctgagggccaaaaaattgccaaatattttcgaatttttaaaaaattccaaaaattctgaaacttaaaataaacatcatattcgtactcagcaccttaaaaatacccagaaaaaaatttttcaccctctttttcaacccaaaaaaaatttccgaaaatttctagggggcctagctcgaaaaattttgaaaatttccggccatataatacactattcgatagcattttaaaagctctacaattttgctctaaggcatttttggctaaaaacgatccctgacga

SEQ ID NO: 42302 - DNA, 903 bp, Heterodera glycines
aattagtagtgatgctcgagagtctcggtctcgagtctcgactcgagaaaagtctcgggtttttttggtctcggtctcgagtctcggtctcgattttcgagactcgagaccgagacttttttacacccctaatgattgttggcctttggtaaacttctatttttataaattttaggttcttttttgttcaaaatttattaatatatgcgtggtccagcgggttgtgttcttgattttgttccttatttttgcgttggatcagttcccctccaagtattattttttcttctcatttttcaaaattaatgtttttttcgatgggagttcaaacacaattttaacaattaaaatcgtaaaaatgtaatttttggactaaatctattaacaaagtgcactaaaaatttcaaaattttctccggcggcgcctaacggcaccgcaggcacccaaaactcttacttttattttaacaaagtagctcaaagtcgcaaaatttggtcatttttgggacaaaatccgttaacaaattgcaataaaattttaaaaaattttcccggcggcgcctatcggcaccgccgggccccctgttaccgaaaattttttttgaaaaagagcaccacaaaaaatggtgtaaaaaagtcaatcatatgaaaaggaaaaatgtatggtagcttaaataaggaaaaaaaacaaaaatttttgagaaaaaaactcaaaagattgattttttcgatttttaagtgtgtaagaaaaaattttgaaaaaagtctcgggtatcgggtttttttggtctcgggtttttgggtctcggtctcgagtctaggggtcgagtctcggtctcggggtcgagttacggtctcgagtctcgggaaatttttggtctcgagcatcaatagcaaatacac

SEQ ID NO: 42303 - DNA, 1240 bp, Heterodera glycines
atcaaaagattaattgctccaattattaataaaaaagggaaacattcaatcgagcaatttaaaattgacaaaaaatcaaacaattttttctgaaatcgctatttatttttattttttatcttttacaacaaatatattttttattcaaaatcatttcataatttttcatttatttttcatttccttcagtttcattcatttttcgtcctttcttttcttttctccactttgttccgtaagttggccattgccaaaatttgacgaaatgccatccgcagcatcaaaaaaagtgccaaaattgccaaaaataccgcactgatggtgaacagaatggcatcgattgaataataagcgacccatcccaattcggcatcggttggcatgttaagctcgttcagatgcggaaattcggctgcgaattccacccaacgcaccaattgctcttttgcaccgaatggcgacaaagcaattttcttttggatgagtttggcattggcacgaaaagaggcgtcgtggagaacctaaacaaaccaattaacattcattttaaaattttaaaaaactaattgtcggagattagcaatttatcagcgaaattcaaaataacattcctaattagctgcaaaaattctgattgtccaaaacaaaatagctttagtaaaataaatcctaaatccaattaattttctatgcttttgaagtgcttttcgtttttcctttctcattcatttgcttgtgtagcgaaaagtgcatcgaatgtatcctccgatggtgcacttttgctcacccgcatgagcgctgttatcagcactttgcgcgttctatatgtgattagatggcgaatgccatcgtgtacggccatccctcggtgctttgcacaacacggcgttgtaatagccgatcaccgtaacagatggaatgcctcacaattggcacttccgatttttgctgcctccgccagtctgtttcgcacgcaatgagtgacaaaatgcgtcgctattttggatgccctcaaaatttgtcagaagtaaagaatgcaataaaagaatggcgcatctaaaatggcattttgcggcacccattagaaagtgtgcacatttggagtggctttgatcagttaggaatcatttggtacggattgggcgtacaatttacaaatgagttcatactgggggagtagaaggaatgggtggagaagcgtacgtggcaaggattggcccaaagtgggggtgttgtctac

SEQ ID NO: 42304 - DNA, 526 bp, Heterodera glycines
  unsure (1)..(526): unsure at all n locations
tttattcatctccctttttgatagtgaaagcatctgagtgcctaaaataacttgtaaataaaatttggtgcgtttcagagcagtttgtgaaaaaatatttatgaattaattttgctaaaaaaataaaatagtgaagctttaaaaattaataaaaaattttaaattcagaattactggagttagcatcatagcagtgcttttccttgtctttttgatgccctcgcaaaatctggttcgcttctgatcagtttataaaaaaaaagttaagcctaaagtttttcgctcgtttaaaaagcaattaaaaatttttagaatttgtattcatcgccctttttgatagtaaaagcatcagagtgcctaaactaacatgtaaataaaatttggtgcgtttcagaaccctttctgaaaaaaatatttatgaattaattatgcaaaaaacaaataaataatgaactctcttccttaatattttcctgcaccgaaggacctcnactcggccgcttcgcggcttcgtggtggagccttc

SEQ ID NO: 42305 - DNA, 997 bp, Heterodera glycines
tctcgacataaaagccgaactgattccggcaggctgcttttgttcttaatttcaatccgaggcctgctgtccttgattcccttcgcttgccaaaactgatcaaactgattcctgccaattctcggcccttgcttaaaaaggcaaaagccacgcacaatgtgaagcaaaattggaagggggggggggaagtgatcaaaaagggaagacggacgaattggatgatgagtgaaaatgagttgagtgagtgagtgagggaaaggacgaggatggggaatgggatgggaagggatttgggagattgaattgatcgtccgcgagggaggcgagtgaatgagtgactcctccgcaaccccgcgcgactttgtgctgctgctgctgctgttgttgctgctgctgaacaacacaacacaacagcggcggcaaggacgccgttaaatgcaacgggcggcgacggaagagaccaaagattgccgccgtccgctgcttttgagggtcggtggctctcagcagattgtaaatcggaacagtagtggaggatcttgtattgaggaggattttaggagaataggcttggcaaagcttatccatgaactgcttgaactccatttatgtcccaggccccggttttatcggtgccctttttcatggaattctgggaaaaagttcaaatccaattttttgagacgaagagaaatctttcatcagagtccgatccaaaatcatattagctttcgagaacataatagcctttctcaaaatgtgcccgaatgaaatgagtgtgccgtaccaaaattcatttaaaaaaatattgaaaattcacgttttcgcgcaatgaaagcagcagaatggcatgatccgaactgatcaggcttctggaccatttttgattatccaaaatggccttatttgccaccagtgagtctcggcattgcctttcgtggccattctcgtctttaattttcgacatacaaatggccattatcaaagcattaaccag

SEQ ID NO: 42306 - DNA, 181 bp, Heterodera glycines
taataatttatgttcaaaaataaatgcattcaaataatttgaaagttcgaaaatgtatctcgtcttaattatactgccaagcaagataaatttggaaagccaataaaattataagtctaaatatattttactaaaaaacaattaaaaactatggtaaaacgaaatatattgtttttaattt

SEQ ID NO: 42307 - DNA, 745 bp, Heterodera glycines
aaaattttgaagaggctttccgggaacggattaccatcgggggttacgagatagtaaaattgtcttaaaaagagatagccattttctgagaattaattcacaatttctgcagctcttagggtaatggaaaaaattttgaagaggctatcaggaacgattagcatcggggttacgagatagaaaattgtaaaaagagataccatttagcatcggggttacgagatagaaaattgtcttaaaaagagatagccatttttctgagaattaattcacaatttccgcagctcttagggtaatggaaaaaattttgaagaggctctcaggaacggattagcatcggggttacgagatagaaaattgtcctaaaaagagatagccatttttctgagaattaattcacaatttctgcagctcttagggtaatggaaaaaattttgaagaggctctccggaacggattagcatcggggttacgagatagaaaattgtcctaaaaagagataaccatttttctgagaattaattcacaatttccgcagctcttagggtaatggaaaaaattttgaagaggctctccggaacagattagcatcggggttacgagatagaaaattgtcttaaaaagagataatcatttttctgagaattaattcacaatttctgaagctcttacggtaatggaaaaaattttgaagaggctctcagaagcggattagcatcggggttacgagatagaaaattgtcct

SEQ ID NO: 42308 - DNA, 1014 bp, Heterodera glycines
  unsure (1)..(1014): unsure at all n locations
tctagagttttttaaggcaccttcattcgtataaactggactggagcttttgtacgnccgattttagaatcgggtgttgaaccattttaaattttattttccattttctttttatattttattttccattttctttttatattttattttccattttctttttattatttattttaaattttattttccattttctatttattgtttatttgaattttattttccattttctatttattgtttatttgaattttattttccaattttctttttattgttattttaaattttatattcacttttctttttattttttatttgaaattgtattttccatttgctctttattgattaattgagtattttatttcccatttttcttttattttattaatctgaaattttatttgccaattttgtttttaatttttatttgaaattctattttctatttgctctttattgtttaattgaatattttattttcatttttctcttgttttattcatttgaaattttattttccaatttttcaattttcttttattgtttacgtgaaatttttgtttaaaggtttggttgataaaactaaaactaaaattcataaaaaataatttttaccatcaaaaattcttatcaaaagaaactttcttaacccaattattgctaaaatgctgaagatccgattgaaatttgatctgtgccggtggagaaaagccgacgatttactgtgtgatttgtctcgatgatcaatgcactagaaaagatatctcgaaaaacgaaaaactagagatgctttgagaaaaaatcatacaaaaatcttttacatgaaaatggaaatttaccgtcgctatattttgttggtcgtacgtgagaaaatgggcgttgtttttcattcgctttccatttagtgatcaatggccaaaacattcactcgcctattcccccccccccggagtgggatactgtaacaaaaagaggagaatggtgaaaagaatgaataaaaaattaaaa

SEQ ID NO: 42309 - DNA, 939 bp, Heterodera glycines
ttttggggaacccccacatgtacaacggtgtagaaaaaaagagatagccattttctgagaatatctattctctgagccagcaatttccaacccgacctttgtagggctcaccggcagatagtaatgcgtttttggggaacccccacatgtacaacggtgtagaaaaaaagagatagccattttttctgagtcatatctattcttctgagaaagcaattttcaacccgacattttgtagggctcaaccgcagatagtaatgcgtttttggggaaaccccacatgtacaacggtgtagaaaaaaagagatagccatttttctgagaatatctattcttctgagaaagcaattttcaacccgacattttgtagggctcaaccgcagatagtaatgcgtttttggggaaaccccacatgtacaacggtgtagaaaaaaagagatagccatttttctgagaatatctattcttctgagaaagcaattttcaaaccgaccttttgtagggctcaaccgcagatagtaatgcgtttttggggaaaccccacatgtacaacggtgtagaaaaaaagagatagccatttttctgagaatatctattcttctgagacagcaattttcaaaccgacattttgtagggctcaaccgcagatagtaatgcgtttttggggaaaccccacatgtacaacggtgtagaaaaaaagagatagccatttttctgagaatatctattcttctgagacagcaattttcaaaccgaccttttgtagggctcaaccgcagatagtaatgcgtttttggggaaaccccacatgtacaacggtgtagaaaaaaagagatagccattttttggaaataattaattcttttgaaaaggaaattttcaacccgactttttgaagggttcacccgcaaatagaatggggttttggggaaaacccac

SEQ ID NO: 42310 - DNA, 941 bp, Heterodera glycines
agaacggccatgcaccaccatccaccgaatcatgaaaccctttcaatctgtcaatccttacggttccgggccgggtgagtttccccgtgttgagtcaaattaagccgcaggctccactcctggtggtgcccttccgtcaattccttaagtttcagctttgcaaccatacttcccccggaaccggaagactttcgtttccgggaagctccccaccagggcgaataaatccgccggcggatcgctagttggcatcgtttacggtcagaactagggcggtatctgatcgccttcgaacctctgactttcgttcttgattaatgaagacattcttgccaaatgctttcgctgtagtccgtcttgctacggtccaagaatttcacctctcacgtagcaatacgaatggccccgtttgtctctgttaaccattatctcggtcagcaaaaccaataaaatcggaccgaaatcctcttctattattccatgcacgaacattcaagcgaaacgcctgtttgaagcactctgatttgttcaaagtaaactcgccagcccaccgacgccgaccggtaaaggccaacgccggggaaagaccggcagaaaagccaaccaaaccagtaacacacaaagtgtgcaccggacggctagcacagatccaactacgagctttttaaccgcagcaataattctatgcattttgagagctggaattaccgcggctgctggcaccagacttgccctctcatagatactcgttaaagggtttaaattgtacccattccgatgaccggcctcataagagatcggtctcgttatttctcgtcactacctcctcgcgttgagagtgggtaatttgcgcgcctgctgccatccttagacgtagtggccatttctcaggccccttctccggagtcgaacccttatcctccgttacccgtcatcaccat

SEQ ID NO: 42311 - DNA, 1125 bp, Heterodera glycines
  unsure (1)..(1125): unsure at all n locations
tacagtctgaatacggtaaatacaaaaatggcaaactgcagtatttttaagtaaattattacagataaccagcaatcacaatatatagttgagtaatttggtgatacttgtgggtgaagcttttggaaattaattttcattaaattatttggtacaaatatttttttgcatgaattaaaaattttttttttggcatttttcaccatattcaattcaataaataatttttatgatttaaaatagttgaaaaaaccgcgattcgggaagatatgtttaaatttttttaattttcactcaaattntggctttttacattcaattaaatcgggagagccgttcaatttaagaaacatttttatgaccagaattaataaaataaaaataaattctaaattatataaaaaataattaattagtttttaaattcccaattattttatttaaaaaaacaatcattgttctcacctttacatcggtggaagctgaggccaagccggttttcgcacattttgcaattctgcaacattttgccaaaagcgcgctcctccacaaattggtgatcacaactgttgattggccgtccacgagcccatccagggccgaagccgggcaatcttacaaaaaaaaaaaaacaaataaataaaaatatacataaataatatttttataaaaaaataatttttattgtccatacttttgacgactattcgattgtggtgttcgagaacagaagcgacggcgctgggctgctggcgttgtgaactatttaaaaataataacgttggacaattggtagaactgatcaaagtcctctgggggtgttaaaattctgatcacttccgatcagcactttgatatggagtgacctgatcccggtggtgcaatttcacttttcttttaaatgagcacaaaaaacttatatgaggatgaattttttcacatttttatcaagtacaaaaaaagaaatatgtcttaaaatttttgggtgattggaaaaattttcgggaataaattattttaaaaaaatttctttatactttgtgattgaaggtatgcctggtaaaaaaaatttagctcgaacctaacgcattcaaaaattgcaaacgaatagggaaaaacttcatt

SEQ ID NO: 42312 - DNA, 859 bp, Heterodera glycines
ttttttttttcccaaataaatttttcaacccccttttttccccccgggaaatgttattttttttgaatttttgacccgtttggagtagattagattagaaaaattgaaaaattttgaattcatttttcccactcctttttcccagggttattattttgtaaattctttttttcaaaataaacttttcaaacccccattttccccaccgtgaatgttatttttatgaaattctgacccggttttgagtagattagactagaaaaaattgaaaattttgaaatcatgttttcccactcccttctcccagggggtattatttttgtaaagtctttttttcccccaataaacttgtcaaaccccatttttcgcaccgtgaatgttatttttattgaattctgaaccgttttgagtagattagactataaaaaattgaaaattttgaaatcatgtttcccactcccttctcccaggggtattattttgtaaagtcttttttccccaataaacttgtcaaaccccatttttcgcaccgtgaatgttatttttattgaattctgaaccggtttgagtagattagactagaaaaaattgaaaattttgaaatcatgtttcccactcccttctcccaggggtattattttgtaaagtcttttttccccaataaacttgtcaaaccccatttttcgcaccgtgaatgttatttttattgaattctgagccgttttgagtagattagactagaaaaaattgaaaattttgaaatcatgtttcccactcccttctcccaggggtattattttgtaaagtcttttttacgagcaataaacgtttcataccccatttttcgccacgcgtgaat

SEQ ID NO: 42313 - DNA, 951 bp, Heterodera glycines
caaattttaaaatcttgataattcgatagccctaagtattatctattattctgcaaaatttaagaaaaaatagttaagtttcaataaagttatgacctgagaagctcagaaaaccaagttttttttcaacgtttttgcccataacttttttgtggcttaacaaatttttttgaaattttttaggctaatagaaaacacttagggctactgaatgacatcaatattttaaaatttggttgtctttgagcaaagttatatcaaaaatctttccatttgatggtttcttgacaaacgcccattttaatggtttttgactaacgtcatagcacccttacatatatattaatggcaatttccgtttatttctttttagtgctaatttcaatttttaatttcagctttgaaattttcgtagatggtcaattttttttttttttttttactgttatatattatttttaatcattaccagtgatttcgatgattcacatattattgtaataaagtaggtactgacatctactaggaattttatattttttatgaaaatttttaatcgttttttagttcgtctatttatcatgcatgggtccagcacagatatatttccttgggaaattggaagcattaacaggaatatttgaaaaaatgttaaattttaaatataaatttaagaatcccatgagtgaataatacaataattttgccttactcattattccaaaattttcattggccaaaataaattgacaaaatttcttaccatgaataaattgtcatgaaaaattttttgcaaaaaaaaattctaggacatgaccaaattgacaactgcaattgaaaaagctgaaggatgcaagtgcaatcttgttgaaaaaattgagaaggaattggatgatgttgagggtattaaatgaaatttattttttatacaaaaattattatataaaatga

SEQ ID NO: 42314 - DNA, 627 bp, Heterodera glycines
tttagctgtttttaagcttctaggatggatttctatatccatccatattttccatatttcgtgatttatatcatatttccatatttgtccacattggcatgattgtccataaatttatccaaaaaagccctattagaacggcccccatcagctaaaatggccattttgaatctaaattccgaaaaatttccaaaaaaaaaaaaatttttagcaaaattttctcgagaattttatttacataagttttaaacatcacaaaaattgggaaaatttgtgccacaaaacaaggaaaatgaggaaaatttcgctttttggtcgattttcacaaattaataaaattttatatttgtcgtttttctttttaaacgctttttttataccgtactcagccattttaaatgtattttgccaaaatttaatgcatttgaaggaattttggaaaatttattcccgtccatattcttgcaattttatgtccatatttcgcgatttttatccattttttttccgagccctaattattatagaagacggtctcctcttgaaaaattttgcgagattcaaaaaaaatgttgtaacacaaatacccacccattgcaatttgcaatggctgcttcccgcgcttcg

SEQ ID NO: 42315 - DNA, 962 bp, Heterodera glycines
  unsure (1)..(962): unsure at all n locations
tcattttttttgtcttttgaaataaattgtgaaaaatatacgaaaattattttagcttttaattatgctgtacaatgcttttaagccccgccgtgaggcgggacagttccaaaattttgtaccacattttactgtggaaagtccaagtaccttattggacaactacgtgtcaatgagcacagtcgcctttggccagttgtggaacggaaaaatggaaatatcagatggggtgcgctcttttctaaaaattcctcttttcgtctaaccatccctcccttttgtgcactatttcgtttcaaaattgaatcatttttttggtcttttgaaataaattgtgaaaaatatacgaaaattattttagcttttaattatgctgtacaatgcttttaagccccgccgtgaggcgggacagttccaaaattttgtaccacattttactgtggaaagtccaagtaccttattggacaactacgtgtcaatgagcacagtcgcctttggccagttgtggaacggaaaaatgggaatatcagatggggtgcgctcttttctaaaaattcctcttttcgtctaaccatccctcccttttgtgcactatttcgtttcaaaattgaatcattttttttgtcttttgaaataaattgtgaaaaatatacgaaaattattttcgcttttaattatgctgtacaatgcttttaagccccgccgtgcggcggctccccttttgtgcactattttagtttttaaaattggttccggactttttggctttttgaaataaattgtgaaaaatatacgaaaattattttagctnttaattattcagtacaatgcttttaagccccgccgtgaggcgggacagttccaaattttgtaccacattttactgtggaaagtccaagtaccttattnggacactacgtgtcaatgagcacagtcgcctttggggcagtgtggaacggaaa

SEQ ID NO: 42316 - DNA, 1286 bp, Heterodera glycines
tagagctcgcattttgtggcatatgcctttttttctgcgcacttgtttcgacatattaagcataataacatattttccacttggtttgaggcttctattacataaatgcctttttttggtattttgccgtttggtgccttttttggcgttttttccgaaaaattccattaaaaatgctataaaatatggaaatatacccctaagaaatgacctgaaaaatttttagaaaatacacccctaagaagtgaaaaaattttcgaaaactgatcgccaaaatttctttttttttcttgataaaatttttaagtttaaaaattttcctctttcgtagaacattataaaaaatttaataatcatttaaatgaacaaaattaagttttatcattaagttttacgtgttatgctccctaaaaatccttaataaaaaaagccttttttcatgcctttttcggggttttcctgtctttacaaatagtactcaaaacttaaccttatcccatccatcatcatatccaatttgacacttataaaaactttgaaaaatgtcaatttcaaccgattcaactaacagtgtagaattttcatctgatgattgtggtgaatcatttattgaccagcaaaagttaaaggttaacaaaaacaattaggaaaaatatacatataattttttattaaaaatttaattcattttttattgagaaaaattttagcaaattggtgaaaagtttgccaaaatggaattggtattgaaaaacaccaaacttgagctcaaaaatgtgagttttacataaagaataattttgacaattaaatctaaattgctaattaatttataaataattaattaaatttagaagggacttcaagaaaagttgaagcagcaggaaacgaaagcactgctggcaaagatcgaagcggagaatggaaaaatgaaaagagaaattgagaaaatgccggaaaaaatggacgagaaggaggagcagtacatggacaagttggaggagttacagaaaaacgtaatttttgcaatttttttatttctgccctttgaaatcgaactttaaccatggaaaggaaatcggtgataaaattcgtttaatttcagcagaaggcactccaagaagagcacgaaaaaaactgatggaacaaattgtgaatttacagacgaaagttgacaaattggaaatggaaaatcaaaagcaaaagagtaagggaaaattcgtgagcaatgattactgtacctaccgtaacaatattattattattgctactgtcaaataccattt

SEQ ID NO: 42317 - DNA, 254 bp, Heterodera glycines
ttaattatgtgaatctatctttgataataagaatttatatcaaaaagtataaattgtttttaaagacttttgtgtatttggtattctgtgcacatttatattgttttttaaaatcattttttagagacagggtctcactctgccactcagactggagagaggtggatcaatcaaagctcactgttacctcaaactcctgtgctcaagcaattccaccacctcagcctcccaagtaggtgttttctttttttttt

SEQ ID NO: 42318 - DNA, 732 bp, Heterodera glycines
ttttaaatatgccaaaaaatgtaggcttaacttttttactgtaaattcgatcactcatattttttgctaattgagcagaagcttaccaaactttgcagggatactccccggtaaaggactaacttacactgaaatgagcgccgagctagctggctcaaaaaaattttcgaaaatctgagtctttcgtttttatttattttttgcaaaattaattcttaaatattttttcagaaagggttctgaaacgcaccaaattttatttacatgttagtttaggcactctgatgctttttctatcaaaaagggagatgaataaaatttttaaaaatttttaattcctttttaaacaggccaaaaagtttaggcttaacttttttttcagaaactgatcagaagcgcaccaaactttgcagggatactgaaaggaagagaaataacctattttaaatattatctagacagttcatttaaataatttttatccgaagaaattggttttcgggctctcggggtcaggcccctgacccgatgcgcccggatttatggggagaccgaatccttcaggaatagcttccctatagcctgtactttaatgctgcgatggatttgttgctccccataattgtttgagtaccccagacggacacttgagaaaatcgatttatttttgttttcggggcattccccccgaaccgatgcgtccagacttatggggagaccgaatctttcggg

SEQ ID NO: 42319 - DNA, 227 bp, Heterodera glycines
aatgaaaagtttatcgttataaattgttcagattttttatattcttgatattattcgatagccctacgtgtcctctattagcctgcaaaatttcaaaaaatttcgctaagtttcaaaaaagttataaccaaaaatctgtgaaaacctggttgcttgtgtacttttggccataactttgctcaaacttggccaaattttttgaaactcaggtgagctaatagagaacc

SEQ ID NO: 42320 - DNA, 939 bp, Heterodera glycines
  unsure (1)..(939): unsure at all n locations
gcagaatcacttggctcatgttgaccggcacacagtcgccgcataactgcttggtccggttggtcagcttcaggccgcacaagcgctgctgctgcttcatcgcctcgtcattctataatattatttgtttatggaataaattttttttttaaatgtttcgaatgacagtcgttttgtgacgttactcaaaaacatcaaattggtattcctcaaaaaaccaccaaatgaaaatgtttgcttataattttacaaaaaagttaccgttttaatccctaatatcattttatagacttaaattttctctattatcctgccaaatttcaaaaaatttcgttaagttgaaaaatttcgaaaaagctggttttttgagttcctctcccattaaaatttttttgaaattttgcaacctaacagagaacatttagagctatcgactgttatcaagaattaaaaatttggttactttgcaagattttttgtcatttttttggcccctccctttatgctggaccatgctcactcatcactctcaccccctaactttaataacctctcaaaaatttccactttagtcttatgaccggtacattaggtcatacatacattgattgattgacctatgtaatttgtatggctcggtcctaattagtgattacggacgatgttatggtcaggctgatcatttggcctattttttgatcaaaaaactgctgatcagctaccaaaacggtgatcttaaaacattttcaggcctcttatccgtctcaatccggtcaggccgatcacttggccaagttttgatcagaaccctgctgatcacgataaaatccacctcaatgatgcttccgtccaccacattctcgtcctcactgttcggcactgcacaaatcgtcggccagcggtccgtcgtcgttggccaccgcttccnngctgcgcagc

SEQ ID NO: 42321 - DNA, 1026 bp, Heterodera glycines
ttccattccttctacaatcgcctttatacataccattctttcgcgctaaaattatcagagtgccgaaaatcgcatgtgatcttagcctagaaaaaatggtctaagtaaaaatcgtaattacgctcaaaaagcttctcaaacaattttagcgcatcaattccttctacaatcgcctttatacatcccattatgaacgctaaaattatcagagtgccgaaaatcgcatgtgatctaagcctagcaaaaaatggtgtaagtaaaaatcgtaattacgctcaaaaagcttctcaaacaattttaacgcttccaattccttctacaatcgcctttatacatcccattatgagcgctaaaattatcagagtgccgaaaatcgcatgtgatctaagcctagaaaaaaatggtctaagtaaaaatcgtaattacgctcaaaaagcttctcaaacaattttagcgcttccaattccttctacaatcgcctttatacataccattatgagcgctaaaattatcagagtgccgaaaatcgcatgtgatctaagcctagaaaaaatggtctaagtaaaaatcgtaattacgctcaaaaagcttctcaaacaattttagcgcttccaattccttctacaatcgcctttatacatcccattatgaacgctaaaattatcagagtgccgaaaatcgcatgtgatctaagcctagcaaaaaatggtgtaagtaaaaatcgtaattacgctcaaaaagcttctcaaacaattttaacgcttccaattccttctacaatcgcctttatacatcccattatgagcgctaaaattatcagagtgccgaaaatcgcatgtgatctaagcctagaaaaaaatgggctaagtaaaaatcgtaattacgctcaaaaagcttctcaaacaattttagcgcttccaattccttctacatcgcctttatacatcccattatgagcgctaaaattatcagagtggcgaaatcgcatgtgatctaagcctagaaaaaatggtctaagtaaaaatc

SEQ ID NO: 42322 - DNA, 1294 bp, Heterodera glycines
tatatgtgatttaaattatccttttttctgtttaaaaaagttttgttatttattattacatatggtaccaaattatattcatatgcatgttttttttaatacaggggccaatttcggtttttgtactcagaatttaacaaaaaaaatttgattttttatgtagtaaaaataataaaatattttacgatttaaacagaaataaataaatgattttttaattaaattttcaactttaaaaataaaataaattttgaaaaaaattcgttttcgcgtttcgcttttttgttttcttttttgggcgtttcgcttttcgcttttcgcctttcgttctgtatttttagtttcgcacagccttgatatatttttttcctgaacaagcaagggttctgaaacacataaaaaacatgtttttagcttgggtgacattttagtccttctttcggaaattttaatagaaaatttcaaatattacccccaattttgaaaaattgtggtggatatttgtattttatggtgaatgtttttgcgcatgttttacaaatgaatataatttggaaccctatttattaccatattgttttgttttttgacacgacgcggtttttaatttttttaaattattttttagtcaattattattgtctatataattcaatggtttgaacgaagcaagattttggaaacgcttctaattcagggaaaaattccagcaaagagtatgaaaggggtttaacgctccctacaaaagctgattagaagggttcaaagctccctacaaaagctgatgagaatggttcaaagctccctacaaaagcggttgaaaaggttcgaagctcctttcaaaagcggttagataactctctaaacaaagaattgaaacattttgtaataaatttggatgattcagacgaagatatgaatgatttaacagatttattcaatgcacagtcttcaagtcaagatattttaagagaaagacaaaggaaaaatatggaaaattggcgtaaacggaaaaatgagttgcctgaagcagaacttaatgcgtttaaagaaaaggaaagaaaaaatgttgaaaatttccgtaaaagacaaagaaataaagaaactaggctttatttggcagctaacaatccaaacaaagcagttttttatgcgcttagcccatttgagataaagtgtaaagaatgtaaagctgtgcatttcattgaagaaaattcaatcaatagttgccaaaaaaacaagatttttacagttgttgtaaaaatggaaaacttacgtcattaagcgatcattt

SEQ ID NO: 42323 - DNA, 930 bp, Heterodera glycines
tcaaatggaacaaatctctgtaaatggtaaggaaaaaccctttcatttttctttttaaaatttcggggggacgaagtttatagtttttattcgaattcagcttcgctgttgggtgttgtccgaaatgaatgtcattttcgtgatcaacgaccttgaaaagcgcccgaaaaatgccttacaattagacaattttgataccctttttttctttttttttgccgaaaatggtgggcgctccaccgcgttactctatttttctcacacgaaaatccgtaaaaaatatctcacttaaaaatttaaatcgatttcggtcgtccctaaaaagtaggaaagacactcacttttcttcaaacatttttgccaaatcgcgaaagccaagcgctgtccgaaaattgtgccaaatttttcgcacattccattccgattgggtggcaaaattgcatttgaaaatgtcgaaaaagttggggtaacgacgccgaattgccgccacagcgtccgcttcgtcgctttcgtcaagcgccaggcgagtggaaaagcggaaaatcgcgtcgctcagaaagaagaaaaaaccacccgtggtcgactcgacgtcatcctggacttcaatttggacctaaaacaaacacaagtcgtaaattccatttaatggtggggacatttttctaaccaattccaaattaatattttgacgcgcccaagggacaaaaatttcatcgaaaaaacatggtgccatgattttggcatgaatgaccattttttgtcgtttgaccgtcaaaatttcaattttagtgttttttgctaatttctaagaaaaaatccatttttacttaaaaatttggcgctggaggcttgggcggaagaggtaccaacacggaaaaactatttcatcaataaattctattattcttcgtaagctctttacatgctcta

SEQ ID NO: 42324 - DNA, 782 bp, Heterodera glycines
tttttcttaccccctttttttctaggcgtagatcacatgcgattttcggcactctgataattttagcgttcataatgggatgtataaaggcgattgtagaaggaattggatgcgctaaaattgtttgagaagctttttgagcgtaattacgatttttacttacaccattttttgctaggcttagatcacatgcgattttcggcactctgataattttagcgttcataatgggatgtataaaggcgattgtagaaggaattggatgcgctaaaattgtttgagaagctttttgagcgtaattacgatttttacttagaccattttttctaggcgtagatcacatgcgattttcggcactctgataattttagcgttcataatgggatgtataaaggcgattttagaaggaattggaagcgctaaaattgtttgaggagctttttgagcgtaattacgatttttacttacaccattttttgctaggcttagatcacatgcgattttcggcactctgataattttagcgttcataatgggatgtataaaggcgattgtagaaggaattggatgcgctaaaattggttgagaagctttttgagcgtagttacgatttttacttacaccatttttttctaggcgtagatcacatgcgattttcggcactctgataattttagcgttcataatgggatgtataaagcgattgtagaaggaattggaagcgctaaaattgtttgaggagctttttgagcgtaattacgatttttacttacaccattttt

SEQ ID NO: 42325 - DNA, 1336 bp, Heterodera glycines
aaaaaaattgcctccaccaatccgtggggaaacctaaaaaaaaaaattttccccaaaaaaatcggaacttttccgccgggcatcaagtgcatttccaacagttcaacagtataaataaatatagcaaaatgaaaattttttttctttcttctttagaaactgtttaaaatttttgttgttaatattcaggaaaacgtgttttttttactgacatttttttcagaagaaggatatgaacaatcacttataaggctcatgctgggagataaaggaatcggaaaaaaaaatatctcaacaatcagtcgtgaaacagttcaataattcggaagcagtgccatattgggaaaagatgcacaagtagagtaggctcgaaataaaggcaactgccgaagattaacaaaaattcaaatttattggccccgttctgctttgacaggccatatctcgacagggagtggcggtagaccctttgttgatacatttgaaaatgtagagcgcgtctagctcattcgaataacatcaaactggtttgtttttgtcacgaaacaacccgctgatggccacgtcgaagaaaagtcccaaaatttgacatccataaaactccattttttcataggccagcgtgtttaaagcaaacccgaaactgataggaaatttaaattgatcataatagaagtttaatttttatttgtcccatgcattttctgggaaatcttttcgcgaaaagttgaaaaatttcaaaacggcagacaacagatgcatttcaaacaattcaacaatataatataaaatttaggcaaaaatttttgttccttcctctttggaaatggtcttaaattttgcttgtaaatattcagataacaagttttttttactgaaaattttttacacactacaggatgaaacgcaataaataatgtttgtagacaaaagaaattggcgaaaaaaattgcctcaacaatcagtggtgaaactgaaagaaaaaaacttccccaaaaaatcggagcttttccgacggcatcagctgcatttccaacagttcaacagtataaataaatattaggcaaatgaaaaatgttttccttcctctttagaaactgtctaaaaatttttgttgttaatattcagaaaacgtgttttgtttagtgacaatttttttcaagagaaggatatgaacaatcacttataaggctcatgcttggagataaaggaatcggaaaaaaaaattatctcaacaatcagtcgtgaaacagaacaataattcggaagcagtgccatattgggaaaagatgcaaaaatagagtaggctcgaaataaaggcaactgccgaagatta

SEQ ID NO: 42326 - DNA, 1169 bp, Heterodera glycines
  unsure (1)..(1169): unsure at all n locations
ttaataaaaagaatttttttttttacaaaagtgcttacgtattatacgtttttattaatattgtatcaattattgattgaagcaaaaaaaaagaaaaaagaaatgaatcaattgtatattttgttaataaaatagtaataaagtgtaaaaaaagtcgttttcggtgacaaatgttttcgtaacgatgcgaaaaattatgaacaaaaaagtgtgaaaaatgaacatttggaattatataagaatttatataaatatttattaattttaacgaatttttgaaattgtatataaaatatataatatttttcatatttccatcattgggttaaacttttatgagaataatatttcatattattgataatgtcgaaagggtaaaatttttaaaataaattgttctcgaatttatatcaaaaaatttaattgttagaccgatttaaaacagcattttggaattttaacagaacttaagaatttagatgaattttgaagatgtattatataattgaataaaattcatttgagaaatttgttattcataaaattaataaatcgaagttgctagctacagtaagttaaaaatatattttttaataatttatagatttgaacgatgtttagaaatttgaaaatacttgttttgattcatttcttcaaataactttatgatattttaaaacaacttataacaatatcattttttaagaaaagaaactaattttagaggggtacatttaaaaattcataagaaatttatggcaatggaaactgtttttcctactattcaaagcatggcgaatccatgaaaaaactatatatttacatgaaattttcatccttattaataagataaacaaataataaataactaactaagtaaaaaaaacaaatgaaaaataaaatattaaaaccgttatgaactcattttaattttgagaaatctgaaaatcgtgatcttgattttgagaaaagcgtttaaatatgcaaatccatagacaatatttaattttatccaaattttattgttgtccattttcacataaatggcattcgggagatttgaattatttttctctaaaaagtacatttcaaaaatggaaatgcaaattttataagcttatttcaataatctttntaatacctatgcctttaatcgccgctaatataaa

SEQ ID NO: 42327 - DNA, 1711 bp, Heterodera glycines
aaactgagatacatttagtgttagtacgccaattgacttttttcaaaatttaaaattaatttttagttccctcaggcgctgtggcacccgcggcaccgttgccgcaaggcggtggccgtggtccaagcgcggcacaaagctacaacaaatatgcgcatgccgctgctctgcgcacgcgccaccgtgtcgcgtaatgaaagggcgagagaagggaaaattgagagaaaagggggagagaaaggaagagaaaaatacaaaaacgaaataaaagaattattgtatattttaaaaacaaatctgaaaaaaaaagaatttcttattcgaaggattattttttagaaattttattttattttttttaaatatgaaaaataataaatcattaataataaatcaattccaatgccaacactctgatgagaagcaattgctaaaacattctaagcaaattgataaccaaaatatgtatagctcaaataagaatatttattatttttatttttatgccgttcttttcttctcaatcccttttaattcattggcgctcaaaattttcgtaaaatcggcgaataaaattcgaattgactctgtccaattgctctttgtttcttcgccttcgtttttttgtattcccaaatgcaaaaagcaaattggaactgttcaaaaaattgatgctgaacagaattttgtggaaataaatttgttgggagaggaaaattggaacaaaaatggcaattttattgccaaagtttcatattcgggcccacctgttaatgagcaggtttttaaacaattaatttttacccatttttaaattttatttcccaattttgatgctcatctcaaaatttgttgacgtcgatgctcactttttacttcgtgctgaaatggttgtcgtttcaattgaagcgcaaaacggagaacaacaacgaacgctgacgataatgccgcacagaaagcaatgcttcgtggaggtgtactgtaacattgccaacacagacggtacgagtacagtactcgcctttggcaccggacaaaaagaagccggcactgcccaaattcacttgtcactttttgacggagaaaaggcaaacaaatgttttgaacaaaacattcacgtaaaaattttcgacgaaaacaaagaggtaaaagaatttaattgaaataaaaaaatatataaaaaagaaaattacagcaaaattttatttttaattcttcggaatttttcaatgtatcaaaacaaatcacaattgatttaacgaaacccaactgaacaatgagagatgaattttggcttaatcataagttagttcattttaaatgatatggtcgactttttttcattctttcgaatattttttcataaatcctttccaaagaagataattgttaaatttatttttatctttttttttgagtatttcattttgcttctttgctatttattagcaaataaaaccaaatgattcaaatgaacttaaagcatgttgccttgatcattaattccctatataagaagtttatacctatgatccaagcataaaaactaatttaagactttttagcgaatgttacgggtcgtgagtggggtcaatcgacgcagtttttcaagggctataagggaaaaatacgggttttctaaaatgttcagaactgttcgaactgcaaccaaaaaaccgacccaaactcacactatttggattacctattt

SEQ ID NO: 42328 - DNA, 654 bp, Heterodera glycines
ttcttaccattaaaacattatctgatcccttttttggtatcttccataccataccaccacgaccacaatcataataccgtacacttctgcaacaaaataatgccttttagggcatgggaaatgcgctcgcgcaccccaaacaatgcatggaagacggaaatcatatatgtatgaagagacaggccagcacagtcatccccccccccccccccggcgtcgatcggacacacattgttgcccaattttccgaccaattagccgtgcacatacaaaactctgtcgcccgggggtgggaagggcgggggaagggacagaccaaagatatcattttacatacaaatttggaacaaaaattttgttgaacaatcaacaagcacaacaacaataaaaaagttaattgccttttaattgcttttcccacacatcacacacacacaggcattttttggccatgccaaaaatgtgttccccccaaaaaagtgtgattgttggccgtttagcccccccccccataattcctcctcccataaggtgacatttggtggtggagttgatgccgatcgacgagtttgtcccaacaagaatggaaaatgattaaaaaatcccttcctttgagttgctacatatttagctactcactaaacttctttcacc

SEQ ID NO: 42329 - DNA, 1217 bp, Heterodera glycines
  unsure (1)..(1217): unsure at all n locations
taaattaaaccaaatatttggagaatttccattttttctcttcatagatggnncnctttnnaaanngnngngagnacttcttttttcatttggngatgttgttgtaganatttgtttttntgggggaattggggntgaagttgnntcggtttgtgatggaagtgntgaggagggnaaagaaatggaaatggtagaaaattggggtgaagtngaagaagaagnagnagaggncaaatncgagagaggagaagnaattggganggaagaagtnggtttcgttgtcaattggcactgcgttgggttgggcgtcgttggcatttctttgtccgttctttgctgctcagttttttcagtccctggcccatcgacagtccctttggccatgtcattcttttcttgctgctccctccgtttttggtccgccacttttttgagcaacgcttcacgcgcagctgaacaaaataaatagacaaaatatttagatttggcattgtccaccaatgtgtcccggacggacccacgaccatgagaagacggacttcgaagttcgtcggaggcattggggcagtattttcactgcgagcagtgagcagacgagaagcggtcaaaatggagtcaaccgcggtgttgggcaacacagggccaatgagttgggaggaagttgcagccaactgaaatcgaaacaaatcattaggatattcatagcgcacatacgtgtgcaaggggggggggggtcaggaaaagggtcgtgcgttcggcgatgacttttgcagagcccttttgtcaacggccggccaattttttgcacgaccatcttttgcatttttcatgccagttttttgcgttgcacttttttcaaaaaacttttggggaacggggggttgggtcaggcggtgccgataggcgccgcagggaaaattttttgaaattttgattatgatttgttaacagattttcaccaaaaaatgacaacatttttgcgctttttgggtcaccttttaagagaatttaggcatttttaatgaaattttaaaaaaataggcaagattttacgaggaaaggatgtcgaacgcagaaaaattgggaaattttggcgaaatttcttagggaaatagtcaattttcaagtccccacttaacgttcgacaaatcgccctcatggttagtcgacgcaataggagacccgaccctttccttgaacttgccgctcccttttct

SEQ ID NO: 42330 - DNA, 947 bp, Heterodera glycines
ggaaaaatcaaaaaaaatcagggctctctctattcatatactaaaaatattcaccaattcccttttcatgactataaaaatcttttgttttccgctttgactcattaaaaaaataaagcttccaacgaattattattctgctcttttgtgtgacatcattcggaactcggccaaaattgtgctaattgccaaaaatgaaccgacggtaaaagaattttaaaagtctaaattcagcattatttagctaaactgttttcccatttcagttggatttgcaacgacgtttggatggacattttcccctcttttgaccgtcctcaacttggcctcaaattggcacttctttcgccacgtttcaatgcgttggtggacaaacatttcaatggcaaaagcgaattgacaatttggagaacaatcgaaattcgtcgcaaggacaaaggaccagaaccgaaactgtctgtgctgatggatgacaaaattgtggaatttccattgcccgattatccgttgccctggaaaatccgttttaagcgccttcagatgtggtaattataaatcagagctatcgcaataaaagcattcatcccatttttaggtacatcgatcactccgtcatcgcttttcttcgttcaaatcatcaaattttcgacaaaagaggcaccaatttatatttgtggattccatcatcacactctacgaatggccagccgatttgggacatttttgttcgtgaaatttggcccattttttctgaaaacattcgccacttgcgcttttacgatggtgatcatttggacaatttgcttcgtcgcacttcgccgacaattctcactgatctcaaccaattgacttcaatctattcctgtggtctgtcgcccgctgcgtttggtgatggttttgatgtgccaattttcacaaatttctgctggccaagcattgtccaaatg

SEQ ID NO: 42331 - DNA, 1512 bp, Heterodera glycines
aaatagaccggaaaaattaaagtcgaatttttaatccattcaaactaaaagtgatttggtcgctatttatttatttgtattgatttcatattatattttattttttggcggcgatctcgtttttaattgttttgcgctttcttgaggacattttttaaattaatgttttgtcctcaatgtaagcggatttttcccttttgtggactttttctttattgacaataaacaaattaaaagcttccctgattatatattttttctttttataattatgctgcttgatcggaaggaattggaacggccaaagacaaggattgtaagtttttcaagttttgttcgctattttatagggctgggctatcaaggtaaattctcgttctcggtttccgcgtctcggacaattttggatctcgagcagccctaattttgtatctaatatttcttaatagattttaaaacatttaaattatatttattaatatattaaataattaagagtcaacaatgccaagacttgatcaaatatctctcaagtcaaaccgacagcccaaatgatttcgccaaaaaattggaaagtgcgcctcctgtaaaggaattgggtgatgtaagtttgttaataaaaatattttaataatttacactttggattaataaaaatattaatatttgccttcggcaaatgtcaactttcagcatttttttagatttttttggaggctttttatgatttaaagcaggcgtgcaattattcaggatcatagaaattacgggatttttagacccgtaattacggattatgaattatgtgatttttccgtaattttggtccataaaatggttttatagctgaatttctaattaaataaatttttgtacatataattgatagcaaaaacttatgactagggctccaattttagggtttacctattttttcctgagctccctatggtctggtctgaaatgcacaaaaaacatgttttttagggggggggggggttgttaagctacttttcgagtttttagaacctattttctaggtttttgtttttagcacctaaaagactgaaccataacatttttccgctttcttaattctttcatatctaattaatatattttgttttatgctttgctaatctttttttgtgttgtttaaaaaccgtataaatttttttggcgaaacgaattacataaatatgctcttgaaatgtttgaattcactctcgagattgacaatttttccgaaactcaataccaatactgagtattatccctaaagcgaagaatgggcgacttgcgaccaaaacagcactttggagtttcaaatgcacaatctttgacaattaaaattttaaatatctggaaaaccaacttgtgcagccaataatttcatttcgtttaaactaaaaactgaaactattaagcgaaagttaaaaacgtttaagccaatgtagtttatttatagtgtattaaaatagggacaaatccgagtaatcaaattcacaaaaa

SEQ ID NO: 42332 - DNA, 1007 bp, Heterodera glycines
catgctgtggcggagtgcctggattactgccattcctgctttgattttcgacctgaactcagacgtgaccacccgctgaacttaagcatatcagtaagcggaggaaaagaaactaacgaggattcccgtagtaacggcgagtgaactgggaagagtccagcgctgaatcgcagctcctctgggttgcgaggtgtagcgtatagaccgtgagcttgggttggcccgcttgttcaagtttcccttgaccggggctccagagaaggtgcaagacctgtccaactggcggtgcctatccatctttacgtgtcttggagtcgggttgtttgggatcgcagcccaaatcaggtggtaaacttcatctaagactaaatacggccacgagtccgatagcgaacaagtaccgtgagggaaagttgcaaagcactttgaagagagagttaaagaggacgtgaaaccgatgaggtggaaacggacagagctggcgtatctggtctgcattcacccgtttgttgctgtacgttgtactgctagcctccagactggggtttgctgtccttctgttcagtggcgaatggggcatttgcaggcggagtgcgctgagatgctcggagtagctgcgtgagctcggtcttgaggccagccttttggggtctggtacccggatcgggggagtgctgtttactctgggtgaattgtgcaatggtttcgggtccgtgttgactcgagctgggggtcggtggcggtcgcgtgcgacacgtaccagcaaccagttcggtccagctcgggctctcacttgtgcgttctcggtgtaaaagccggtcatctgttcgacccgtcttgaaacacggaccaaggagtttagcgtatgcgcaagtcattgggtgttcaaaacccaaaggcgcaatgaaagtgaaggcttcttacggagctgatgtgtgatccctggcactgcggtgaggggcgcaacatagtcccgtctcgatcgcatgcgatgggggactctagag

SEQ ID NO: 42333 - DNA, 617 bp, Heterodera glycines
tatttaaacgttaaaaaacgatagttagacatgttctttagaattttctcttcaaaatgaaaccaaaattgctctattttttttattaatggccaagtataagcattagaaatttcagaaaaacgactgttttatcactttttcctcttggcgcactgtatgcatttaattttcattaacttttagtgtagtgtctgactcatagtgtctgctgtttcttcatgttttatgttttttttcgattcactctttttttttttataaggttacgcaatatttgtcaaattgttgatatatgcctcatgaatacttgaaagggcagggatttatttactcgaaattccttctcatcaataaattgcatacgccaagggcgtagccaggaccttcgtttcgggggggggggggtcaactcaaaaagtcgattcttaggggtgtattttttcgtttttgtaacctctatttttaggggtgtattttcgtgtttttttttaaattgaactgattgcattattttatgtttcctttgcataaacgcgttatttaaattaaaataaaattatgccggcgatgtttcaaaaatttttttttcaaaaattctgatttcgggggggggg

SEQ ID NO: 42334 - DNA, 481 bp, Heterodera glycines
ttaaaaattgcactaatttatttcaaaagaatcattaaaatagcaaacacttggtccataacacaatttgaaaccaggaattccgaaccccgaccccaaaatactgataaaaaagttgaaaattcaagttcttttaaatttcacattttgttcaacctttgtttacacacacggaaacgaactgaaagtcatccctgatactcatcagtgctccaataaaatcgtttaaaccattttagattaaaaatcaaaatcgaaaaattccaattatgtggagagaaactttgctgaaatataacacattgaatacaattaactgttaaagaatttttgcttttaatgcattttttcaacgaaaaatctggcggcgagatagccaaaaaacaaggcgcggcgagttggccccgcggcgagaaagcgcgcggcgagttggccccggcgagatggccgcggcgagttggccgcggcgagttggccgcgg

SEQ ID NO: 42335 - DNA, 984 bp, Heterodera glycines
  unsure (1)..(984): unsure at all n locations
tttttgactgcaatttttttccttttttgaattggggctcaaaaaaattttaagagaatttttgattattaatttgaagtcttgaatttatttgacaaatccaagacttaaaactgggagaagcaaggggctgtggctgggggcctaaaatttgggccacattggagaattaattctgatttctgaaaaagtcccagaaataactattttttctttccataccttcttgtagagctcgagctgctctttccaatggtcttatcccggtctcgatccgtgctgaactcacaaagttatggagtgaaatgtgaaatattgttttcaccacaaggcattttttctgaaaaccggattcaaaaatctggggtttggtataaccgttttagaaatagcgtagaaaacagcttcgatatcaagaaaccaagtcaagtccagaaaggaatattttaaaacgatttcgttttgttttggcattatgataccgaataactttcggaaattatggaaacaaaattggagaaattcgaataattttttgactgcaaatttttttcctttttttgaattgggttcaaaaaaattttaagagaatttttgattattaatttgaagtcttgaatttatttgacaaatccaagacttaaaactgggagaagcaaggggctgtggctgggggcctaaaatttgggccacattggagaattaattcagatttctgaaaaagtcccagaaataactattttttctttccataccttcttgtagagctcgagctgctctttccaatggtcttatcccggtctcgatccgtgccgaactcacaaagttatggagtgaaatgtgaaatattgttttcaccacaaggcattttttctgaaaaccggattcaaaaatctggggtttggtataaccgttttagaaatagcgtagaaaacagcttcgatatncagaaaccnaagtcagtccagaaaggaatattttaaa

SEQ ID NO: 42336 - DNA, 1483 bp, Heterodera glycines
taattttctatcttgcaggattaaataatttctctttctttttatctccaaacaattttaaattaaccgaagatggacccgttggttttttcataataattgcaaaaaaaaaaatcgtagttttattgggaccgctgaacatgaatctggcagaattgtgacaaatctcaaacccgaactcaaacaaaaagatgaaaattcacatttttaaataaatttttttaattaagaaccaagaagaaaataaatgaaaaataaatactataaattttttaatttttaatttttagttttaaattattattttattaattatttttattcatttatttgattaataaagaaagtaaattttttatatgaaaagaagtgaaaaaaaattaacaaattaaaatatgataaatttattaattaataaaataatctgaagttattcgtgagaaataattacatattttaaaatttagcatttaattcaattaataatattgacaattaatcatgatcgtatgaccgacttcgtgaatactgtttcgggccaaagtttgttgtattctattgagtgttgcgatccgaaataattaatatttatttttgtttaataatttcatttcaaaaaaaatatgtttttgtctcattttcttgaatttaatttagtttttttaattaagaatcaggaagaaaataaatactataaatttattcatttttaaattttggttttatattatttatttttatttttaattatagtatttaccttttaaataattagaaaattttgcttaaaatataaatatttcggtaatttttttagatgtatttgtatatcaaatgcaaatatattgaataattttttgtaaatgaattaatttctgcgtattttttaatgaattgtccttaattttattagttcattaatttttaaatttatatgacttcagacttcattagcatttttcacaaatttcacgatgtgtaagctgtttaattatgcgattaattcattttttatacagaatatcgaaatctttgcacataagaaaataataataataataaataatttgatttaaatagcgaaaaagatttaaatatctaacaagagaaaaaacacaaactgtgatataattaaaatactaaaacattaattaaaattactttgcttagaatcttaaaaaatgataaaaaacagaaatattagcatatttgaaacaaaatgaaatgtttagactaataatatagaaaatgcagctgacatcataaaaggacgacactcctacggatgtgcacatgaaaagaataataaaattattcgaaaaaaagatcattaaattaaatagtccaaactgctacttttaaaaaaggagatccgacttcgagtttatatttgaaaaatcgtaatttatcattaaaatttgataaaataaaataacataaaataatataggaagtgtccctattatttgtaccaaatttcggc

SEQ ID NO: 42337 - DNA, 967 bp, Heterodera glycines
tgttgggctaccgtatcagttattaaaatttttgtttttcaaaaggatactaaaactgggataaccccattcagagacaagtcaaaaaaaataataataggcttggactactatactaattagaaattttagaatgtgtctgttaaatgcaaaactgttgtgaaaaattgttataactcctttcagagaagagatagaaaaaaaataaaaatagggttagagagcccgtgaacagctgcatcggatgcaagtgccgccgttgctgtacgcctaacagttggtgagcaatgacggaaaattgcttaaaaaagaaaccaaacaaactcatcaattgttagctcccgttggcaaaccgaagggtacattggggcaatggatgttgggctaccgtatcagttattaaaatttttgtttttcaaaaaggatactaaaactgggataaccccattcagagacaagtcaaaaaaaataataataggcttggactactatactaattagaaattttagaatgtgtctgttaaatgcaaaactgttgtgaaaaattgttataactcctttcagagaagagatagaaaaaaaataaaaatagggttagagagcccgtgaacagctgcatcggatgcaagtgccgccgttgctgtacgcctaacagttggtgagcaatgacggaaaattgcttaaaaaagaaaccaaacaaactcatcaattgttagctcccgttggcaaaccgaagggtacattggggcaatggatgttgggctaccgtatcagttattaaaatttttgtttttcaaaaaggatactaaaactgggataaccccattcagagacaagtcaaaaaaaataataataggcttggactactatactaattagaaattttagaatgtgtctgttaaatgcaaactgttgtgaaaaattgttataactccttttcagagaagagatagaaaaaaaaaaaaaa

SEQ ID NO: 42338 - DNA, 839 bp, Heterodera glycines
ttttgtagggctcaaccgcagatagtaatgcgttactttggggaaaccccacatgtacaacggtgtagaaaaaaagagatagccatttttctgagaatatctattcttctgagaaagcaattttcaacccgacattttgtagggctcaaccgcagatagtaatgcgtttttggggaaaccccacatgtacaacggtgtagaaaaaaagagatagccatttttctgagaatatctattcttctgagacagcaattttcaacccgaccttttgtagggctcaaccgcagatagtaatgcgtttttggggaaaacccacatgtacaacggtgtagaaaaaaagagatagccattttctgagaatatctattcttctgagacagcaattttcaaaccgaccttttgtagggctcaaccgcagatagtaatgcgtttttggggaaaccccacatgtacaacggtgtagaaaaaaagagatagccattttctgagaatatctattcttctgagacagcaattttcaaaccgaccttttgtagggctcaaccgcagatagtaatgcgtttttggggaaaccccacatgtacaacggtgtagaaaaaaagagatagccatttttctgagaatatctattcttctgagacagcaattttcaaaccgaccttttgtagggctcaaccgcagatagtaatgcgtttttggggaaaacccacatgtacaacggtgtagaaaaaaagagatagccatttttctgagaatatctattcttctgagaaagcaattttcaacccgacattttgtagggctcaaccgcagatagtaatgcgtttttggggaaaccc

SEQ ID NO: 42339 - DNA, 828 bp, Heterodera glycines
ggggacctctagagtcttggttttgttgcgtaaatgttgaactttgttgaaactctgtattttcgattttttgtcggaatccgggttcgggttcgaatagggtcgaaaccatctaaactattaccctccttttaaacggaaaaacatattcaattttaaaaataaataaatggcaaaacattaacaaaattaaaaataaataaatggcaaaacattaacaaaattaaaattacataaatggcaaaacattaacaaaattaaaaataaataaatggcaaaacattaacaaaacggtcgtcgccaattcggccggtcgtcgtccatcactcagcgaggatgcccaggtgccggaggataagccatcggttgaggacaatatggccaccccgtcgccgctgcaaagaaagtcaaaattcgtaagcataaggctgcattttgttgccctgccagcaaaggaaatgcatttttttttgttgcaagtttatatattactgtcggtggcagcacgcctattcttgaaaaaaatattttgttttctcgatacaaagttgttttaggggcttttcgggtcggaaaatctgattctgccatccatttcgaatcccgaacccgaattttagcaaaaaatcaaaaagtccatccaattttcaacaaaatcaaaaatatgcaacaaaacgcacaaaataaaacggagaatacgattctgcactccgtaaaaagaatgttaaagcgtgtagatgatttaaaaatgggtctcaagagccggttattactccgacagaggccgacaatataaaaattgtcaaaataatcctattttagatgact

SEQ ID NO: 42340 - DNA, 1202 bp, Heterodera glycines
  unsure (1)..(1202): unsure at all n locations
agtcaaaaagcttttgtttattttttagttaatataatntaaaattatatnttccatatccattatatttctcataaaaaagtggcccttgtagagggtggattgcttttagttctaaatgaactcaaatgaaacaccaattttataaagaatttatatgcattaatttttttcatatccttctaaattccctttattaaaaataattattattaaataatcctaattcaaaatatatttcattttttaattttatgtgtaataaattataatttttttaacacatattttcaaaatttttatttaaattcctgcttttttcattatatcaattatttttgatatcatcattatgaataccttctaatcattgtcaaagtgttttttatgtttaaaagttatattttttaaattttcttcgtcgttattaaatttatttattccttttaaatgtatttttataacattatctgaaaccgttttttggtgacctgtttcagaaacatttgtttttgattcattttcctgatggctttctttgttacgacgaatattttggttttttcttatattaattttccttgttacatttatttttaatatgcttttcaaaaaatatatttaatcgattaaacattcaaaaactgattataaagaaaacactttaattttttataaaatttttttttgctataattattttgccttatatttgaataaatcttttactttccatttttataattaaatatttttataggttgatgagatttatttatttcaaattagttttttttttgtatttttctttgagtgttgttcaacatttatcttgtcttagctctaaattgacgttgtcgacgaagtaacacttgacgtccatgtccatgggaatttattgattgatccgggaataaatgctgcttagaatatctgtttactgcttgggcttaatttgccttacacttgaagagattatgtagttgaaggccgagattttttctcatatttcaaatagctttttttattggttttttagtttaatatatttataattattggttttcatattcattatatttcacataaaaatgttggctagaagaaagttggttgctttttttcaatgaactctaatgaaacaatgaaacgcctttttctaaagattttatattttaatgcattaattatctttatatcct

SEQ ID NO: 42341 - DNA, 1171 bp, Heterodera glycines
gcgtttttacgagatttttctcgatgaaattgaagggcagggaaaggtaccgacagagttgggagtaattctcccattcctgaatgtacgccctcagcagagagtcgtcgtcattgtgggaatggatattctgcaaattggcaacaattgccataaaatgattaattgttggacaaccaatggcatttgccttcccctcacattggccgcgtccgtcacgtggtcaagcagttcaagtcccaattccaacagtaatttctcacaaccattgaccacccacgaggcaattcgattgttggttgtgaacatgtcatgccaatcctttttcgacacattctgtaaaacaaacgttgaaatgaattgtaaagcattttttttgaataattcagtaattttcatccgggacggttttctttacagggttttctccaagttccaaaaaaattacagcaaaaaagagtttttgaatttccttcatttgtttttcatattggattcgttgtcatcacagcaaattaagatatcccaagctttaatgaacaaaaaccttaggctaccgaattgttcttccccctcccccaaattgttttgccataacgcacttctttgtggagcaaattccgcaccactggtaaggattttgcccactccgcctcgaatgaaatgttattgttcctcgactaaattcaaaatttatattaaaagtcgagtttaataaattaagaaatggcaggagaagttttttttctaaactcacaatgagaagtgaatttccgttgctcaattcgccactcattaataataataataatctgaattagccgcttgcatttagcttaaaataaaactgatggaagatgaatgcaaaaccaaatattgttatgttatgtaagtatttaaatttgaattaagaatgagcaaaaaaaacagagattttcttagtttctttaaataaaaaataaaataaccatacaatacagaagtaccgtaattgagaattacagactcatagagactggagaccacgaacaaaatgtaaagtttatttaatagagcctgttaagagcccagtttatgaccagcagtccgatcagcttgtgtccccttccgccgactatctcatcaccgatgggaattttcaccagcattcgtttacaaaatttaaaaaaaa

SEQ ID NO: 42342 - DNA, 898 bp, Heterodera glycines
  unsure (1)..(898): unsure at all n locations
gtataaaatttatcaaaaaaagagatagccatttttctgggataacctctaaatataaaaatcctctgtgaaataaaatggcgattgtgcacagccctccgtctcatacgcaagcgcttttgtgaggtataaaatttctcaaaaaaagagatagacatttttctgggatagagtataaatttaaaaattccctcaaaaataaaaggtctattgcgcaccgccctccctatcatgctcgagagcatttgtatgtgtataaaatttatcaaaaaaagagatagccatttttctgggataacctctaaatataaaaatcctctgtgaaataaaatggcgattgtgcacagccctccgtctcatacgcaagcgcttttgtgaggtataaaatttctcaaaaaaagagatagacatttttctgggatagagtataaatttaaaaattccctcaaaaataaaaggtctattgcgcaccgccctccctatcatgctcgagagcatttgtatgtgtataaaatttatcaaaaaaagagatagccatttttctgggatagagtataaatttaaaaattccctcaaaaataaaaggtctattgcgcaccgccctccctatcatgctcgcgagcatttgtatgtgtataaaatttatcaaaaaaagagatagccattttttctgggataacctctaaatataaaaatcctctgtgaaataaaatggcgattgtgcacagccctccgtctcatacgcaagcgcttttgtgaggtataaaatttctcaaaaaaagagatagacatttttctgggatagagtataaattttanaattccctcaaaaataanaggtctattgcgcaccgccctccctatcatgctcgagagcatttgtatgtgtataaaattt

SEQ ID NO: 42343 - DNA, 468 bp, Heterodera glycines
tgatatttattttaatatattgtgttgaatttataaaacattttttttatttaaaaattcacttgaaactgtcaattacccccgccgaaaattgtaaagtgtcatcatgcccccaaaaagagtaaaaataatgggcaataaatggtaaagaattgttgtccctaatttaactttttattttagactcagattcagtttccggggggtttttgaggatgatgaatatgaacctgaacttgggtttgctcaattccgaaccccggatccgaaattcgaacaaaaaatttgataaattgttttccccaaaatataagttaaaaccggtcaaatttcggcgcaaattgcgaattttatccaattaaacaattgcaagcattgttttacatcaaaatgaatagttgttaaatgaattagaagcttttaccttagaaaaatgcatcctctacatataattttctattttttgtt

SEQ ID NO: 42344 - DNA, 793 bp, Heterodera glycines
ttttgggtagattagactagaaaaaattgaaaattttgaaatcatgtttcccactcccttctcccaggggtattattttgtaaagtcttttttccccaataaacttgtcaaaccccatttttcgcaccgtgaatgttatttttattgaattctgagccgttttgagtagattagactagaaaaaattgaaaattttgaaatcatgtttcccactcccttctcccaggggtattattttgtaaagtctttttttccccaataaacttttcataccccatttttcgcaccgtgaatgttatttttattgaattctgaaccgttttgagtagattagactagaaaaaattgaaaattttgaaatcatgtttcccactcccttctcccaggggtattattttgtaaagtctttttttccccaataaacttttcaaaccccatttttcgcaccgtgaatgttatttttattgaattctgaaccgttttgagtagattagactagaaaaaattgaaaattttgaaatcatgtttcccactcccttctcccaggggtattattttgtaaagtctttttttcaaaataaacttttcaaaccccatttttcgcaccgtgaatgttatttttattgaattctgaaccggtttgagtagattagactagaaaaaattgaaaattttgaaatcatgtttcccactcccttctcccaggggtattattttgtaaagtctttttttccccaataaacttgtcaaaccccatttttcgcaccgtgaatgttatttttattgaattctg

SEQ ID NO: 42345 - DNA, 739 bp, Heterodera glycines
tttattccatcgcctattgctttaaggttttgtctttgattttgcttttttgtccatttattccaatcgcctagtgctttaaggttttgtctttgactttgcttttttgtccatttattccaatcgcctattgctttaaggttttgtctttgactttgcttttttgtccatttattccaatcgaccacgttaattcattctctatacatttagtgtcttatttcatgaaattatatataatttaattttaaataaagaggcaaatttttacagaaaataaatagacgctgactaattagctaacatttataaagaaagtagaaatttgattaaatgcatatacaaaatattacttttttaaaatttgtataaagttcctagtcgtatgtgctttgcgttggttggttggcgtgggtgactgtggtggttgggccgtttttgcgatattatggctggaaaaaagatgcgatttcgctatggggagcgcggccgtctgggttcaagtgcttgcttgcgcttgtgctcggcattgaacggtgatggctgctgctggggtgccacctttgtcgtggcctcagtttctccagcgattggcagctgtcgaaatgaataaacatgcagctcgtctgtgtgttaaagaaatttggcgagttaattgacttgtgtaaatgtggcctaaggcacaaatgctgtggggaactcagcactggggatgctgaacctaaagttggtggtggtg

SEQ ID NO: 42346 - DNA, 971 bp, Heterodera glycines
  unsure (1)..(971): unsure at all n locations
gagagagtgtgtgggaaagagagaaatatgaagggaaaaagaatgagagaaggcggaaagataaggaaatagggaaagggggagagagagagagagagacggacaggggaaataccagaataaagagaccattattccggaagagggtggagggcggggggggggganggaagaaaattgcncgattttcaagatattcattgggtacggtgttgatttgatttattcctgacaactctgatgcaaccccacctccgtacacaaatttgtaaggtgctgttcgtcggtggcactttctatgccaaaaatggtgccggagttgtccaacgtgtgtccgactccttccggcgccagtttcaggacaacacgcgcgagaaggcaccttcaattcaggtacaaacatatgtgaaaattcttggttggaacaaagccaaatttaattatttttataattgttttaaattactactaattgccactaattgtctcacgcctttccctcttccattcccgctcaagggatgtgtcgcagaaattgttgtcaaaggccagcgtcagcacatggacgcactgctggaggcgcaaaaaaggcgagcggcgcggacgggcggaaacggtggcgaccaaatgttcgcggtgcgcaagggatgcgccagctgtgcgccggaatgcggagggtcggttgtcaaaccacggaccagaattgcaaaattcgagaattcatataaattagagcaagaacgggagaggacctatcggaaatgcagcaaatggtttaattggcacggcattttggcttttttttagtgcgccatgttttcgtgccgggtacaaccaacaaaagagcgagtgccaatgtggccaaatttatgccgcaaaatcggactcatttggccgaggctgtcaatggacgacggatagcgaaattngccaaatcgagcatgggaaacgcattcgaccatcattgccgt

SEQ ID NO: 42347 - DNA, 668 bp, Heterodera glycines
aaaaattttttattaagggtttctttgggcgcaaaacacgtaaaacttaaccaaaaaacttaatttctggtcatttaaatgattattaaatattttataacgttttcgaaaaaggaaaatttttaaaactaaaatttttttattcatatggggttgcaaaaaaaagaagctttttatcgagaatcacatttgataaatgagccccgtgaaagtagtacctgagaaatttcaaaaaaaacctactaagagcctagtagcaaaagcccgagaaattctccgcctcgaatttctaaatgtgtcataagaaatccccaattccttcacaaattttttctgtttgccttggccgttcatactccgcttccttctggtttcacattttaatttatgattcatcatatacaccagggatggtattccgaggcccaaaaaatttttggaaatcggaattccgggggtcaaaattttttcggaaatcggaattccgaccccaaaaatgtcggaaatcggaaatttttgaaaaaataaaaaaatataataaaatattctaaatattttaataagctaaattttatattattattcacaaagattaactcagggttttttggataaaaatctgttaacaaatcgcattaaaaattacaaatttttttcccgggcggcgc

SEQ ID NO: 42348 - DNA, 196 bp, Heterodera glycines
tgggctgccaccggcgcacggccatgggggcgcggcggcgcagcggctgcgggatctggcccacggccaagccgctatgacggcgccgaggcgggcgcgtctgccacatcttgagcatggtggcgccggccaccggcagcagcacgcacatggccaacagggcgacgaaatcagccattggccacctcctgcgccg

SEQ ID NO: 42349 - DNA, 1117 bp, Heterodera glycines
  unsure (1)..(1117): unsure at all n locations
gattttggttctcataaaaagttgataataaatatttttcgattacagcttcaccaaactggcctcgnncgnggcccgcccctttggcgnnnagagcccccgcccaatccctccgacaattaaaagacgccgcccgcgcattcattgcgcagcaccgaccgttacacattgtaaaatgaaatgatgggagagtgagtcaattaattaattaattaatggaattaaacgttttctcccattgacttttgtttttggtgaatgaagtgccagcatttaaaaaaacgaaatatttgatgatggtaaaagtttggtcccggatttcaaccgggatttgctgtttttttgccggtttttgctcgattttctggacccagaaccgccggatctcagtcccgaattttcctatactcaattaaaatggtaataaaaattggcctgctaggcgtggccgggaaaatttgaaaattttcatcacaattgttaccagttttgcactaaaaatggccaattttcaatgttttagattaaattttattaaaaagttttaatgaattctgattcagtgggtgtcaactggcctaaaggaaaatgtttttgattaggctttaaatttgttatttcatcaaaaaatggttcataaaaaaaagaataaaaaataattaattaataaaattatgccatattttccaacaaaattcttaaacttaatgttttgaaaatttagcttcatcattgccttcccctttcaaaaattgaatttttttgattggaaaaatgaaattttcattgtaattacctaaacaatttcaactgtaaataaattaaaattcaaattaaaaatttaaaaaaatgcttcctttcataaatgcagtatttccatttaaaattttttatttaagctttaataaattctcttttcaattaaaattttagcatgaaaatttaggcgtttgaataaatttaaaacaaaatttatttccgagttacgcaaaatttgtttacaattaaattgaatttgttttgcgatttagatggtgatgattatgatgaagataataatggttatgattatgattaccctgaagaattacttcatttatgtacatatgtcattggg

SEQ ID NO: 42350 - DNA, 826 bp, Heterodera glycines
tttgtaaattctctgaaaaattaaatggccgttgcttaccgccccgcgtctcatgctcgagagcatttgtaatgtagaaatttgttacaaaaaagagatagccattttcctggcatacccatgaaatttgtaaattctctgaaaaattaaatggccgttgcttactgcaccgcgtctcatgctcgagagcatttgtactgtagaaatttgttacaaaaaagagatagccattttcctggcatacccatgaaatttgtaaattctctgaaaaattaaatggccgttgcttactgcaccgcgtctcatgctcgagagcatttgtactgtagaaatttgttacaaaaaagagatagccattttcctggcatacccatgaaatttgtaaattctctgaaaaattaaatggccgttgcttaccgccccgcgtctcatgctcgagagcatttgtaatgtagaaatttgttacaaaaaagagatagccattttcctggcatacccatgaaatttgtaaattctctgaaaaattaaatggccgttgcttactgcaccgcgtctcatgctcgagagcatttgtactgtagaaatttgttacaaaaaagagatagccattttcctggcatacccatgaaatttgtaaattctctgaaaaattaaatggccgttgcttaccgccccgcgtctcatgctcgagagcatttgtaatgtagaaatttgttacaaaaaagagatagccattttcctggcatacccatgaaatttgtaaattctctgaaaaattaaatggccgttgcttaccgccccgcgtctcatgctcgagagcatttgt

SEQ ID NO: 42351 - DNA, 662 bp, Heterodera glycines
gcgcgaggctcttctcctaattggcccttcaggctataatattttggtcaaagaatattctctgctgatcaccccgtatataaaattccaaaaatgtgccggcatctctttgacatctcattttccgatcactttttgtgtctgtttgttaaaagccaattggagcttcaaaaatcatcaccacctttgcattcctcacctttatgtgaccagttttggagacccacccaattccaccgcccccacaaattctgtccggttctgttgcgcgcgcttcacacccaatttgcgttttggtcggcgcccaaaatttcactgccggcgccgtcggcccgccccgccccgcggcgctgtgctatttggatgatgatgatgatgaccttcaagcacaaaaagtgacatcggcagaggggatcagctgcgggggggggggagcttttcctgtgacttataactgcccaataaaaaaatatacggaccgatcaaacggtgatcggtgggtgatcagcggcagcaaatgcatatagcggatgtgtgtgtacgcgttgttggcaaaaagccgcccgtccgtcgtccccccccccccgcccgccgggggcgcgtcattgtcattcccacattcccacaatttcccaccaccatctattttcgatacctcccct

SEQ ID NO: 42352 - DNA, 370 bp, Heterodera glycines
  unsure (1)..(370): unsure at all n locations
gcaaagggggccagcgagggggggggggggggttcgcagcgaagggggggccggtgtaaaagaggtggggggaggtggttcgcggcgagttgggggtcgcaaattttcgaaattttcttgtcgtaagtcggaagtttttgaaaagttccgacttttatcaaaattcggaaatccgaatttgtgccatccgtgctggtgttgtcccacatttttggcaaatgactgattgttgttttccaatcaaattgtttagcattttctccgtgccaatgccatttcttccgtcacttacgaaattcatttttctgttcgtgcgccgtcaatacaaatggtgccatttgaattggtgaacgaatggacaannaggaaa

SEQ ID NO: 42353 - DNA, 943 bp, Heterodera glycines
tcatccaacgggagaggaacggcgactatttggggaaggtattcatctttctctgtttatttttactcatttttccaaattttggacggtcaaaacggtgccgcacataaccgacgcgatcattgaatgggtggagagagtttcaaagatttctgttgatggcagcggaaaggcaccgcaaatttgcattgtcgaggtcagttaaatctgcttccgatctcttagagaaaaattgcccttacttcgcttttgcattttttatttatatttttttagctcggtggcaccattggtgacattgagggcatgccgtacacaatggttgcgctttgaccctttttgcgcgattcattttcttctaattttaaggctttcagcatggcatttcgccgcaaaacataccgtaatcgttttctgactgtgcacgtgaccaaattgttgcacgaggcaaacaatttgtgctagtatatatattagttaaactatgtttttcagtcgggcgaaataaaaacgaaaccggcgcagaatgggctgcgcagtcttcgcgagacgggcctttaccccgaccttttgctctgtcgttctcaaaaaccgttgacccaagcgctgcgctccaaaattgccagctttgcccaattggacatcaacgaaatcatcgacgtgtacgactgtcacgacattcacagtgtgccgttgcttttgctgcagcaacaaatgaaagagttgctgatcagccaactccaactgcccgacatgcgaacgaaggaggacttttccgccttctacagatggcaacagctcagtgaaaagcaagtttaaaaaaaaagatagaccctaggcttcggaggggctgaatccaaaaatttgattttttgccagaaaatgatatttagcattttatggtccatttcccaaaaatatggtaaaatgggggggggggggg

SEQ ID NO: 42354 - DNA, 1071 bp, Heterodera glycines
acgataagcgatgaaagtcttaatttgaagttaatttaaaccaccaaaaaataggcaatttttggtaaataaataaataaacacactgaaaataattaaataattttcgaattaaagtttctgttctgttttttatccctctgataattttaattaatcctcttgagttcttactgattgttcatttgcgagtttgagtggcttaacattgtgcaaagaatgttcagcaatcggttcctcatatgcacagaatacagatgcaaatctgtgaaaattataaattatttcctatattttttaatttattgtcctcttttcctttttcctctctttcggagtttactttctctctccttctcacgccctctctttttttgtctctttctagttgtctctattttcctttatctcttcctttatttccccccccctctctctctctctttcctctcttccctttacactctctccttcccccaatttcacccttaatttcgtcttcttcttcttctttatccctctccgttgtctcctccaataatcgcttttccaactgtgccgtgctgaatgggtactccgtctcgtccacgtcaaaagcgaccgttgcggcgatagtttggcccaaaaacagcagagaattggcatcgcacggaggttggacaatggcatcgatcagacggaagggaatgtcattttggatggggaaaatgctccgattttcgatcagatggaccaaaaggcggcagagaagcggcgaacggcgaatgagactcagattttcggtggcacttgtcctgttgaaagtgccaacggaatttgcgcatttttgaaaagcaaaaaaaggctcactcagtgagcagctcaaaaaagtgttccaacaacaatttccacacgtcgcgcgacgccttccgccatacgtccaaatcgcagagcaaatcctcgaaggtgagcaggtccgggatcagcacctgctcagccgacccgtcgtcgacagttccggccaaagtgaagaccaaatggagaatgtgcgagttcatcaggcatattttgtcctccaacagaaccgcgaga

SEQ ID NO: 42355 - DNA, 1033 bp, Heterodera glycines
aatcgtaattacgctcaaaaagcttctcaaacaattttactatcttcgaattccttctacaatcgcctttatacatcccattatgagcgctaaaattatcagagtgccgaaaatcgcatgtgatctaagcctagaaaaaatggtctaagtaaaaatcgtaattacgctcaaaaagcttctcaaacaattttagcgcttccaattccttctacaatcgcctttatacatcccattatgagcgctaaaattatcagagtgccgaaaatcgcatgtgatctaagcctagaaaaaatggtctaagtaaaaatcgtaattacgctcaaaaagcttctcaaacaattttaacgcttccaattccttctacaatcgcctttatacatcccattatgagcgctaaaattatcagagtgccgaaaatcgcatgtgatctaagcctagaaaaaaatggtctaagtaaaaatcgtaattacgctcaaaaagcttctcaaacaattttagcgcttccaattccttctacaatcgcctttatacatcccattatgagcgctaaaattatcagagtgccgaaaatcgcatgtgatctaagcctagaaaaaaatggtctaagtaaaaatcgtaattacgctcaaaaagcttctcaaacaattttagcgcttccaattccttctacaatcgcctttatacatcccattatgagcgctaaaattatcagagtgccgaaaatcgcatgtgatctaagcctagaaaaaaatggtgtaagtaaaaatcgtaattacgctcaaaaagcttctcaaacaattttagcgcttccaattccttctacaatcgcctttatacatcccattatgagcgctaaaattatcagagtgccgaaaatcgcatgtgatctaagcctagaaaaaaatggtgtaagtaaaaatcgtaattaccgctcaaaaagcttctcaaacaattttagcgctccccattccttcctaaaatcccctttaaaccctcccattatgagcggctaaaattatcaaagggccgaaaa

SEQ ID NO: 42356 - DNA, 962 bp, Heterodera glycines
ttttatttgtccaatgcattttctgggaaatcttttcgcgaaaagttgaaaaatttcaaaacggcagacaacagatgcatttcaaacaattcaacaatataatataaaatttaggcaaaaatttttgttccttcctctttggaaatggtcttaaattttgcttgtaaatattcagataacaagttttttttactgaaaattttttacacactacaggatgaaacgcaataaataatgtttgtagacaaaagaaattggcgaaaaaaattgcctcaacaatcagtggtgaaactgaaagaaaaaaacttccccaaaaaatcggagcttttccgacggcatcagctgcatttccaacagttcaacagtataaataaatattaggcaaatgaaaaatttttttccttcctctttagaaactgtctaaaaatttttgttgttaatattcagaaaacgtgttttttttagtgacaatttttttcaagagaaggatatgaacaatcacttataaggctcatgcttggagataaaggaatcggaaaaaaaaattatctcaacaatcagtcgtgaaacagttcaataattcggaagcagtgccatattgggaaaagatgcacaagtagagtaggctcgaaataaaggcaactgccgaagattaacaaaaattcaaatttattggccccgttctgctttgacaggccatatctcgccagggagtggcggtagaccctttgttgatacatttgaaaatgtagagcgcgtctagctcattcgaataacatcaaactggtttgtttttgtcacgaaacaacccgctgatggccacgtcgaagaaaagtcccaaaatttgacatccataaaactccattttttcatcggccagcgtgtttaaagcaaacccgaaactgataggaaatttaaattgatcataatagaagtttaatttttatttgtcccatgcattt

SEQ ID NO: 42357 - DNA, 975 bp, Heterodera glycines
gagagagagagaagagagagagggagagaaagcgagagagagaagagaaagcgagagagtcggagaaaaaatcgagagagagagaaaagtgcgagtgagaaagcgggagagagagagagagagagaaaaaagcgatagagagagttagttaccgtatatttgtttgggttcaatgcaatattctccgttcctttcaaaaaatcatttagtgttggaaattgctcaaaaatcccatcgtaaaattctctccgaatgctaatgaatgagcgaatgtgttgctcaactgaatgcattgaacggattgtttgacagagcgccacacttttgtcactcaaagttgaaggaatttctaccaattgtgcagcaaatggtcgatcaactttaaatatttaaatcaaattttaataattgtttctttttcggtaaaatttggaattattatgaatgttttttaactcaaattatttgcattattatcatttaagtagcgaattagtcattaaaataaatgctaatgtttttcttaattccgccaatgaaacgaaaatgaaaaatttcgttggaaatacaaacccttatagcagctatagaagtgattgatttataatcataaaaaacaactcattttcaggaaatttataatggtttttccaaaaaactatgatttttataatacccccttggcggatttaagaaactcgctggcatttccaacaactaaaaatattaaaagtgccttaactttgataacaaaaaatgtccaacaaattttcttatggtaaatgaaaaataaaaaacaaaaactgacttttataagaggtgcctttgtcaattgattcaaagtttgcttcgtaatttaattgctgattccttaaataataattaatgatttaaaaatatattaattaattttacttttttatccgtcggtgtcatttttctcacaatttctgtgctgatgatgctgaagaaact

SEQ ID NO: 42358 - DNA, 762 bp, Heterodera glycines
tgtgtgaaatggatacgacaatcagtttttacacctatcacatttaaaaatacagttttattcactggatttcagctcggttatttgtcaaaagagaaccgggtgttcgcttgtgacaaggaccacaacattgtctcgttcaaacttttgttgtctgtcttggagtaccaaacggcggtgatgtgcaaggattttgacacggccgatcaaattttaaaaatcattcccgaaaatctacacacacgggtggcacaatttcttgagaagcaggtagaaatagaaaggttactaataattttaagcattgtttttttcatagggatttaaaaaacaagcactggcgattagcaaagatcctcagcatcggtttgagttagccttgtcacttggtgatttgcccgccgcttatgaaatggtattgaatttaaatgagaaaaggaagggttttagggatttgttgaatttaggccaagcaagcggacagtgaggaaaaatggaaacaattggcacatgcggcggtgattcccttttaaactttgatcaaattcttttacaccatttaagacaatcaaatctgagctccgtttggcaggtgaatgccttgctaaggccaacgatttcgggggccttcttctgctcgcttcctgcgccggttcgaatcgtttggtaaattatttacgcgttttcatgcggttcttcatttctcaatcatttacaagttcatttttgctgccggtttaagcaagaatttcattaataaat

SEQ ID NO: 42359 - DNA, 1141 bp, Heterodera glycines
cttgggctttccccagtaaaaggggtacaaattttgggacttttccgcctctggcgggggcttaaaagcattttgctgcatatttaaaagttaaaatatttttgtatatttttcacaatttatttcaaaaagccaaaaagtccgaacccaattttaaaaactaaaatagtgcacaaaaggggagccgccgcacggcggggcttaaaagcattgtacagcataattaaaaccgaaaataattttcgtatatttttcacaatttatttcaaaagacaaaaaaaatgattcaatctagagtccgaaatagtgcacaaaagggagggatggttagacgaaaagaggaatttttagaaaagagcgcaccccatctgatattcccatttttccgttccacaactggccaaaggcgactgtgctcattgacacgtagttgtccaataaggtacttggactttccacagtaaaatgtggtacaaaattttggaactgtcccgcctcacggcggggcttaaaagcattgtacagcataattaaaagctaaaataattttcgtatatttttcacaatttatttcaaaaagccaaaaagtccggaaccaattttaaaaactaaaatagtgcacaaaaggggagccgccgcacggcggggcttaaaagcattgtacagcataattaaaaccgaaaataattttcgtatatttttcacaatttatttcaaaaagccaaaaaaaatgattcaattttgaaacgaaatagtgcacaaaagggagggatggttagacgaaaagaggaatttttagaaaagagcgcccccatctgatatttccatttttccgttccacaactggccaaaggcgactgtgctcattgacacgtagttgtccaataaggtacttggactttccacagtaaaatgtggtacaaaattttggaactgtcccgcctcacggcggggcttaaaagcattgtacagcgtaattaaaagctaaaataattttcgtatatttttcacaatttatttcaaaaagccaaaaagatccggaacacattttagaaactaaaaaagtgcacaaaagggggagccgccgcacggcaggtgattaaaagcattgttacgcataattaaaatcgataaatcattt

SEQ ID NO: 42360 - DNA, 360 bp, Heterodera glycines
  unsure (1)..(360): unsure at all n locations
ttatttacggtttgataatgatgccaataattgctggacgatatggggtaaaaaattgttttaaaatatgggaaattacttaattattttttaattacatttttattctttcggtaattttttttgttggtttttaaattgaattcgaatgcaagaaaaagcttgatgcttatacaaatatgtttagtcaatttagtttttcttttcttaaaaaattcactattttttgcataataaaaaaaatttatttaaatttttcancaaaatctttttaggagtgtccccctcatcttcccaccacaaaatcaacccggggtgggatcgtcggcaaaatgttaatgtaaaattttttccgactct

SEQ ID NO: 42361 - DNA, 1002 bp, Heterodera glycines
tttaccgtatttactgaaatagaaccacctcccccccttgaattagagacccccttttaggggggttgaaaaataccctttagtacggtagattaatttctgtacttatttgtggcgtgcccgtaaatcccatagaaaattggacaaatcaagcgaaaaatgagcaccgaattgattttgttaatgagaagctattaacaaatttattattagagtcagctgagagtcagacggatttgacatacggtaacttattttgtatttaaatgtctcaatggataatatgaatttaaagaataaataaaatctaaaataatttttaaaatttggtgcctaattttctgaatccatttaaatattgaaaagcgcactcatttccgcttaacaacgcataagtgatcagctgatccgcttcttctcgtgccgtgccatttccccgtgtccccgcgttttttgctttgatccgtccaatctcaaccgattgttctcgtccattctctcccaccgttggcagttcaaatccgtaaatttgcttttcaaatgcgaaattttgtcctctgatcggatcaaaaactgtcagacggatatccagtgatcggatggtcggaggccgttttgggcatgtcaatttgatagaaatatttgctaaaaagttggaaaacattgattgctctgatcattaaaaccatcgagcaaacgcaatagatctgtttaatctttttgtctatcctaatttaagctttgctttttatgagatttgtcaacaggtgtggcttattctgatcaagttttgtccttacagcaggtaaatgaaatcactcactttcacttactgaccattcgccagagcgatcagatatcaatatcattttagtgatcattaaaaaataatcatccaaaagctaaggcttaagactaatcagagaccaaagtttagagtatgaacaggtcaatctggtgaaaaaagttagatttaaaacataactttcagcaagaaatgct

SEQ ID NO: 42362 - DNA, 872 bp, Heterodera glycines
tatttttcgatagccctaaatgttttctattatcctgcaaaatatctaaaaaattctttaagtttaaaaaaagttatcgacctgagaagctcaaaaaaccaagtttttttgaacattattagtcataactttcttgaaacttaaagaaactttttgaaattttgtagtctaatagaaaacacttaggcctatataatgatatcaagaattaaaaatttagttgcttttgagcaaagttatatcaaaaaatattttcatttgatggtttttgacaaacgcccattatgattgttttttgacaaacgtcttagcaccgaatattattgtttttaatacaatgtccccaattaaaattaattatttacaatgagaaaaaaataatttggaataattaatttctgcaggccattaaaactaaaatttttaaaatttattccacccaataaaggggaccatgaaattggtgagcctgtgatttttttttttttgttaattacagttggaaaattaagcaaaaaattgggttggaacaggatttgggaaaaactctctttaatatcaaaattccatacaattaataggcgaccataaaaaaacaaacataatgccatataaattcaaaacataaacaaatgtcaccattgttttccaaccttacatactgtatgtccgtccccatttcaggtggcaaaaaacatcggagtacgtaatgcttttttgtatacaaaattaaaaaaacaaaatttttttgtaaaaatttgaaaatttttcagacacaattccccattatgaaaccgttgcgcagagaatgcgcaacaatcgcagcttcatgcccttgcgggtatggaggctgtgtgtttgttaccaagaag

SEQ ID NO: 42363 - DNA, 1565 bp, Heterodera glycines
  unsure (1)..(1565): unsure at all n locations
aatttgtgcgagattaccgcccctattcctttcttgtgatgcaatcgactgccttaatgatctcaaactaggcattgtaatgtatgagtagcaattctggattcgaaatttcctgcttctcaaaattctgttaccaggtaagcggtggcaaaatgtagcctggcgagcattttctcaataatcgatttgaaaattgctggtgctgactttataccgaaggccaatcgctcgaaacgatattcccttgtgcattcccaacctgctgaattggattcgtcgtccaattcgttcggtctgtaaataggcatctcacagattgatttgttaaaaattttccaccgttgtgagttacaaaaatatcatctggaattggtagtggattttgtgagtcgagaagcgcgttgttcaagcctcgctgaagaatcaatgcatgacattcgtggtgatccgaccgcagacacatgcgccgtgatatttgcgcctcgacaattgcgccgcccaataaaaatagacatttgcgccacacatttgcgccgccctacaaaacacatttgcaccgttagtttaaattataaaattaactaaagtccacttgtattaatgttgcttattattttgtttttcttcacatcaaatttgcctttaatgctgatgtaggcattaacaaaataaaaaattaggtgtctatcgttgtgattgtttttttgcatttcttttaattgctttttgtagttgtacaataatttacgtaaaattcgttgaaaaaaggtataaaatattttaaaatatatttttgactgagcggatcaaatgtccatttttgcttcgcggcgcaagtgccgaggggcaattgtccgcggagcaaatttcgcagtgcaagtgtcgattttgctggtgctagcgcgtttgttaaaaactgccacccatgcgcgtttgttaaaagtgccagaatgataaaaaaaagcgaaaatatttgacagaattatgctctagctatcaatcttatctaataagagaggcggaacaagaagctaagaaaatgacaaattgcgaaataaatgaatttccaaaagtttcggtaggaaaactgaaaattagaaactctctttcaatttcaatgggatgtgttcaaaatcccggatgtttcccctaatctgcgctttgacttggactgatccgtaccgtttgctgatctcttttcgcatttgtttcagccattttaaggcaaattctgcgcgactcacatcacatggagaatgaatcttaaagaaaacaaaatggcattttgcaaaattggcatttttatttgcgtaatttttcaattggactttttggtcgattatttcggcaatttgttgttcaaatgtcccgtaaattctgtcgaagagcagcaaactgaacattctgtttgngatggttctcaatttattatgattgttcttcaaagtacggtcgtccttcatgttggtgatgaatccgatcagagcaccgctcaaatcgtggaaatacggggtgtcaaggcacgcatttacaagtgcctgacattagacatttgaattaaaacc

SEQ ID NO: 42364 - DNA, 832 bp, Heterodera glycines
acacctcaaaccctagagaagtgtcgttcaaactccgtcctttttgctaaggtgcactattttgccgaaaacgtacgatcctaacgagctttttgaaaagcgaaacttctgactcaaaacacctcaaaccctagagaagtgtcgttcaacctccgccctttttgctgtggtgcactattttgccgaaaaaggacgatcccaacgagctttttgaaaagcgaaacttttgactcaaaacacctcaaaccctagagaagtgtcgttcaaactccgccatttttgctgtggtgcactcttttgccgaaaacgtacgatcctaacgagctttttgaaaagcgaaacttctgactcaaaacacctcaaaccctagagaagtgtcgttcaaactccgccatttttgctgtggtgcactcttttgccgaaaacgtacgatcccaaagatttttttgaaaagcgaaacttctgactcaaaacacctcaaaccctagagaagtgtcgttcaaactacgccatttttgctatggtgcgctcttttgccgaaaacgtacgatcctaacgagctttttgaaaagcgaaacttctgactcaaaacacctcaaaccctagagaagtgtcgttcaacctccgccctttttgctgtggtgcactattttgccgaaaaaggacgatcccacgagctttttgaaaagcgaaacttttgactcgaaacacctcgaaccctagagaagtgtcgttcgaactccgcccgtttttgctgtggtgcactcttttgccgaaaacgtacgatcctaacggagcattttgaagagagcgaaacgttctgacccaaaac

SEQ ID NO: 42365 - DNA, 728 bp, Heterodera glycines
cactcaacccaccaacatttcaatcactcggtactcaacccaccaacattacaatcactggcactcaacccaccaacatttcaatcactggcactcaacccacaacccaccaacatttcaatcactggcactcaacccaccaacatttcaatcactggactcaacccaccaacatttcaatcactggactcaacccaccaacatttcaatcactggcactcaacccaccaacatttcaatcactggactcaacccaccaacatttcaatcactgggactcaacccaccaacatttcaatcactgggactcaacccaccaacatttcaatcactggactcaacccaccaacatttcaatcactggcactcaacccaccaacatttcaatcactggactcaacccaccaacatttcaatcactgggactcaacccaccaacatttcaatcactggactcaacccaccaacatttcaatcactggcactcaacccaccaacattccaatcactggactcaacccaccaacatttcaatcactggcactcaacccaccaacattccaatcactggactcaacccaccaacatttcaatcactggcactcaaccctccaacatttcgatcactggcactcaacccaccaacatttcaatcactggcactccaccccacaacatttcgatcactggccctcaacccaccaaaattttcaatcactggcactcaa

SEQ ID NO: 42366 - DNA, 1237 bp, Heterodera glycines
attcttttcctttcagtatctcctgcaaagtttaggggcgcttctgataagtttctgaaaaaaaagataagcctaaactttttggcctgtttaaaaaggaattaaaaatttttaaaaattttattcatctccctttttgatagaaaaagcatcagagtgcctaaactaacatgtaaataaaatttggtgcgtttcagaaccctttctgaaaaaatatttaagaattaattttgcaaaaaataaataaaaacgaaagactcagattttcgaaaatttttttgagccagctagctcggcgctcatttcagtgtaagttagtcctttaccggggagtatccctgcaaagtttggtacgcttctgctcaattagcaaaaaatatgagtgatcgaattttcactaaaaaagttaagcctacattttttggcatatttaaaaagcaattaaaaaatttttaaaatttaataattttcctgcaccgaaggtactcactcggcctcttcgcggcctcgtggtggggccttcgccccctatatgcatggaaacccaaaaccgattcgtcaattcccacgcaaaatatgtctccaaattcattcattcgtttggcattcggctgcttggcgctccaaaaaatgtgtccatttttccgtggtggtcgggcgagtccctctctcccctcggggggcgggaagttgttgctttgctggcgatggcattggcatgccccggtgactgttcattgagttgttgctgaagtggatcctttggccagacgaagtgccgcccgtccgtcctcttctcctttattcgttttgtttttagggacaccaattgccctttcgcccgggcgaagtgccgagggcaatttccatattcacatttcggcacggtccgatgcactcaagcaaaaattatggcactatgaggcaagaaaggcgaaggcgctaacttccgccatatgacctcccaccactcaaaacacttcactcttttagtgggccaatttgaccaccggcaatcgccgggcaaaaattttgccaaataatcccacacaatccaaccaaattggcttccttcacccatccaacccatcatcaaaaccattctctttttcaatgaatgtatagaaatggagagaaaaagagagtggcgtcagagaggcaaaatgttggccaagtcttggtatgatggactgactgactgctgccttggcttggctaggactcttcccgtttatca

SEQ ID NO: 42367 - DNA, 1192 bp, Heterodera glycines
ggggatggaatacgtacggaggggggggggggaaacgctaaatgctccgacattttccgcccattgccattttctcgaaggctcttccgattggccggccaaacgtcggaatcaataggactaaaatggatggatgtgaacatcctgatcgaggctgggctgaagagccgacactttgccaattacccactcaaacacagcaaaagccactcttgcctagggcattcttataaaacatgccctgaggcaaaacgtcggcattttgtaaaaaccgaggggggttcaatggtcaatggattcgtttggctcagagacaagtctcattaaaatgatcactttttgaggcgaatgccactgactaattaatattaattaataaattgcctctccattcaatttggccaatttgccattcattcctttgccttttatcgttagtaaattattttaggcgcagcactttccaagctccactaaatttgtttttttgtgaataacagtcagcaaaaacaaagcaaaaatggacgccatcaagaagaagatgcaggcgatgaagatcgagaaggtcattcgattgagcatttaaaaaggaacaaaaaaagacaacggaatgccaacaaactttggcattttaaggacaatgccatcgaccgggcggacgccgcggaggaaaagtgccgtcaaacgcaggaacggttggagcgtgttgaggaggaattgcgggacacgcagaagaaaatgatggtgagaggaggaggcaaatttgaatttaaaacattggcaaaatgttcaattgcaggcgacggagaacgaattggacaaggcgcaggaggacctgacggctgccaacaatttgttggaggagaaggagaagaaagtgcaggaggtgggccttttgccgattttggcatttccaatgcctttggggaggggcggcaacggcacaaacccaaaaataaattcttattttgtacctatttgatttggccaattcacttttcctccgtgtgttatccgaattcccaaaacggtgacgaaagcgagaattgcccgggcgaagaagcaaagaagcaaagactggattttcgatttgcgattgcttttccttcgctttgctttccctcggattttccccaccttcgccaggggacggaggcgaagaaaggcagcggaaaaagtgcataatttgctt

SEQ ID NO: 42368 - DNA, 522 bp, Heterodera glycines
aggccgcgaagcggccgaatgtcctccaaaaaattaaaaaacgggcgcgaagcgcccgtcctgaggccgcgaagcggcccaatgtctcacaaaaaattaaaaaacgggcgcgaagcgcccgtcttgagtccgcgcgcggccgaatgtcccccaaaaaattaaaaaacgaagcgcccgtcctgaggccgcgaagcggccgaatgtcccccaaaaaattaaaaaacgggcgcgaagcgcccgtcctgaggctgcgaagcggccgaacgtctcccaaaaattacaaaacgggcgcgaagcgcccgtcctgaggccgcgaagcggacgaatatcccccaaaaaattaaaagctgccgaatgttccccacaaaattaaaaaacgggcgcgaagcgcccgtcctgaggccgcgaagcggcccaatgtctcaacaaaattaaaaaacgggcgcgaagcgcccgtcttgagtccgggcgtgatggtgataatgttaatgtatgatttacgagttccttaacaaggtatta

SEQ ID NO: 42369 - DNA, 1226 bp, Heterodera glycines
taatccgttccgcagagcctcttcaaaattttttccattaccgcaagagctgcggaaattgtgaattaattctcagaaaaatggctatctctttttaggacaattttctatctcgtaaccccgatgctaatccgttccacagagactcttcaaaatttttccattaccgcaagagctgcggaaattgtgaattaattctcagaaaaatggctatctctttttaggacaattttctatctcgtaaccccgatgctaatccgttccgcagagcctcttcaaaattttttccattaccgcaagagttggggaaatggtgaattaattctcaaaaaaatggctatctctttttaggacaattttctatctcgaaaccccgaggctaatccgttccacagagcctcttcaaaatttttcccttaacccaagaagtgggggaattggggattaattttccaaaaaaagggtatttctttttaaggaaaatttctatctcggaacccccatggtaatccggtccccaaaagcccttccaaattttttccattaccgcaagaagtggggaaattgggaattaattctcaaaaaaatggctatctctttttaggaaaattttttatctcggaaccccgatggtaatccggtccgcaaaaactcttcaaaattttttccattaccgcaaaaggtggggaaattgggaattaattctcaaaaaaaggggtctattcctttttaggaaaattttttttttcgtaaccccccggggttattcctctcccccaaagcccctttttaaattttttttttttcccccaaaaaggggggggaaagaggggatatttttttttccaaaaaaagaggtttttttttttttttagaaaaattttttttttcttttaacccccccgggggtatttttctgccccgggggccttttttttaattttttttttttttccccccgggggggggggggggggaggtggtatttttttttttaaaaaaaaaaggttttttttttttttttaaatttttttttttttttctccccccccccgccggggggtcccctcccccccccccgccccccccccactttttttattttctttttttctcccacgaaaggggggggagggagagagaaagaaaaaaataaaaaaaaaaaaaaaaaaattttttttttttttttttttttttttttttttttttttccccccccccccccc

SEQ ID NO: 42370 - DNA, 152 bp, Heterodera glycines
aatcatgagcctgcgcatcagcatcgtcgggatgggccacaccggcacccaggcggcgcgccgcctgctggcggccgaacccgatatcgccctgaccgtctacgacatcgatccggaccgctgcgaggacttccgcggcagcgccacgctgg

SEQ ID NO: 42371 - DNA, 1212 bp, Heterodera glycines
ctatgtccctttccactttgatttcaaaagcatacaaatcatcacaaggatggtaatttccatcatcatctacttggatgaaacgccatttataaaatgcagaaaagcaaaatcgaacaaaaataattgggtttaattatttgattcctcataatcttaatattaatattacaattatctattaatttcaataatatattttccaaaatcacaattcaggatttaattaaccacggtcgagatcccacactatggcttttaattcaattccataaaaagatcgtcatgtgcattcttgctatcattcaataattcttatcattctttatatatctgcaaaatgtaagaaaattttattgcttttcaaaaaagttatgaccaaaaatcgtaaaaaaatttgtttttgtccataacttttttcaaacttgatcaaattttttgaaacatggtggatagatagagaattttaagggctattgaatgataccaagaatgtttaatttgcccgactttaacaaaagttatgacgatttttttgtcgaaaaacagtacgagttggggcagtacgagttggcctagtacgagttgggtttttaccctctcgcctatcgccaaactctcgctctcgtctttttggggactctcgcctctcgccaaactctcgctctcgtcttttctgagacaagtcacacccctggtatatatgctataaagcaagagcgacacagaaattatgcataaagcattgcataatttattcgaatgggcaaataaatggcaaataaattttcaattcaaaaaactttggtattatatttgggtacaaaaaacccaaaagaaacatataaatttgatggaagtacaataaatgctgtggatacaattaggaaattaatttatttaaatttcacacaattttattaaacggtcattcgtatacggcgcattgctataaaagccctccttcctctcccattttctttcattcgctcactttttccttccctttttgcttctgcaaaggatttcctttttttctcgtttttcaaaggaaattgttgatttaacaattcaattttgctaatttgtaagcttatttaatccgtcgaaaactgttaataatttcccctcaacaaaatgtcagccagccgaaaagaagccgagcaaaagatgtcaaaagcaatgtaaaattaaaatgccaattttcaattt

SEQ ID NO: 42372 - DNA, 111 bp, Heterodera glycines
tctctgctttcgaagccatactctctcatgacttctttgatcgctagctctttgctcaatgcactttctaattcttctcaagcattaaataaattggaggttcttcaatgt

SEQ ID NO: 42373 - DNA, 787 bp, Heterodera glycines
ttttaatttaaatacccacctgggtgctgggtcgttacttaaaaaccatcattatgcatatttttgtcgaaaaattatttataactttgctcgaaagcaaccaaatttttaattcttgatatcatttgatagccctaagtgttctctatcagtctgcaaaatttcaaaaaatttcgttaagtttcaaaaaagttatagctcgaggaactcaaaaaaccttcatttttggccataactttttttaaacttaataaaattttttgaaattttacaggctcataaagaacatttagatctatcgaatgatagcaaggattaaaaatttggtctttttagagcaaagttataagcaaaaattttcattatgatggtttttaagtaatgacatagcaccaatgtggggcccccaaacggaaaagtaccaaaaatttttatattaatttcatctacatataaaaaatctaagaaataaaagagttttaaagtggtgttcccgggggaggcgcctaatatgtacaaaaaatgggaacatgtcaggggggcggggagagttttgtttttgccggcggaatgggtcgaatgggcgctgccatttgggcgatactaaatgggcgccagttctcgaacaaaatataataaatgcatttgataattgtgatgccagaaggaacggagtgtgggagaaagtggaataaaggacctgaaagaacctctaaaactagcgcccgtagctcagttggttagagcacggcacggattgctggggtcgtgggttcgagtcgcaccg

SEQ ID NO: 42374 - DNA, 1125 bp, Heterodera glycines
ccccggggtcgtttgggccccaacccaaaaatagaaaaatgtgtttttttaaaaattaagattctaaaaactaagcctgagggatccctcgccacttggcataagttaggtttaattaacattcgctcattttttacaattttacttattccaaatcctattattttttaatagttaaccaatttgatgtacattctgatttggacatttttcagaaatggctaacccaattgcaaccaaaaaacaaaaagtaaaattgtcttacgaaggccacctttacaccttcgctaaaatgagttctgatgggatgacaaaattttggagatgcgagttcaaaaaatcaatttcacattatttttggagtttctccggggaatttctcacaactatcgaatgaacccgtgaatttctgttaatttttacattttttattgttaaaattattgttgaatttatttttaaaatgtttattttacattttatgctgaaaattaaaaagttgtttttactgcgatttttcatttttctgtacttggggcccaaacgacccttgggccccaaaaagggaagccgaacgcgggggcccaaacgcccccgactcaatgtttagactttggccgattcagtccccgcccataattccgttcaaagcgcaggcgaaagtttaggcgccacagaaggattttttaatgggaataaactatcacaaaaagtgcccaattttccgttgcccaaaattcatgtcataaaattattcttcgatttgttttacctaacttatattcttcaattttccaaaaaaagaaagacggcggtgtttttttcatccttggacttcagcttttttaatttgcctttggctttggcaacagcgcaacatgccctttccttcttggccattccttctgttatttgttggcatggcgtgtccccccccccctcagcacccaatttttcccaccaattcggtttctcccctttactctccccctttaatttgtcattctattgacctctctcatcaaaaaagatcaaattcatttttgactattaaattaaattcaattagcttaatatgtttaaaaagatgagcacggcaaaagaggggaaataggcaaagaaaaa

SEQ ID NO: 42375 - DNA, 1756 bp, Heterodera glycines
tttatacgaggttgccgtttaaaacattggcatttgcccgcaaaaccgaggcttttcttttttaaatgaaagtgagattttaaatttgcggaaatctttcctcaaatactgtaacatttcattctgtttttcatcaataaaatgaaccaactttttaaattttagtgtgcgaaggtgggcagtgggcgagggcgtatgaaagtccagaaaataggtacaggttccggatgctttttaacttgtcattttttcagctggactaagccccggccaataagacccgaataaaaaaaaacaattattttgctgtcaatttttcaaataaattccatataaattaaatgatattattttatgaaacaaaaagataaaaaagtgatatttttgccaaatcattttattttaattttccatttttaagtttatttttttatttatttgtttttcttttttttgcgactgactttttgctcacttgaacagaaataggaattaattcaacgagaatcgaaataaaaatctccgattcgcaagtaattttccttttctttcaaatgattatttgacgcatggcggccatttaaaaagttttgtctgattttttaaaagaattaaaatcggattaatttattttattcaaatgggggaaggcccaccacgaggccgcgaagcggccgagtgagtaccttcggtgcaggaaaattattaaggaagagagttcattatttatttgttttttgcataattaattcataaatatttttttcagaaagggttctgaaacgcaccaaattttatttacatgttagtttaggcactctgatgctttttctatcaaaaagggagatgaataaaattttaaagaatttttaattcctttttaaacaggccaaaaagtcggtaggggctttttagtgaaaattcaatcactcatatttttcgttaattgagcagaagcgtaccaaactttgcagggatactccccggtaaaggactaacttacactgaaatgagcgccgagctagctggctcaaaaaattttcgaaaatctgagtctttcgtttttatttattttttgcaaaattaattcttaaatattttttcagaaagggttctgaaacgcaccaaattttatttacatgttagtttaggcactctgatgctttttctatcaaaaagggagatgaataaaatttttaaaaatttttaattcctttttaaacaggccaaaaagtttaggcttaacttttttttcagaaactgatcagaagcgcaccaaactttgcagggatactgaaaggaagagaaataacctattttaaatattatctagtcagttcatttaaataatttttatccaaaaaatttttttttgggttttcggggcagtccccctgaaccgatgcgcccagatttatggggagaccgaatccttcgggaatagcttccctatagtctgtactttaattctgcgttggatttttgctccccataaatgtttgagtaccccaaacggacacttgaaaaaatcgatttttttgttttcggggcagtccccccgaaccgatgcgcccagatttatggggagaccgaatccttccggaatagcttccctatagcctgtactttaattctgcgttggatttttgctccccataattgtttgagtaccccaaacggacacttgaaaaaatcgatttatttttgttttcggggcagtccccccgaaccgatgcgcccagatttatggggagac

SEQ ID NO: 42376 - DNA, 1355 bp, Heterodera glycines
  unsure (1)..(1355): unsure at all n locations
tttttgtaccttggtgagtggacaacgacgagcaccgcatatgatcagacttttcagcaaatcaaccctgaaaaattttgacagatatgagcggataaaacagagaatggtttattaagtggcattttgagacagtgtgacattttttgggtaggacccgcccaaaaagaatggcagaactacgtcaaattcactaatttcctagtgaaattttccacgtcatttctcattataaaatctcattgaacggactctaaccgaatgagtcaattaaattttttataaattgaaaatgggagactatcgagcattagtgaataattgaaaagaaatggcacagcgcacaaagcgcagtcggtacgctgatggagccgattaaatacaatgaaagttcgagttcgctcgaacgcgcggcatttttttaatcatttaatttataaaattgttaaatttttccacggggcggggcgaaagggcaaggtggtcaaaacgtcgcggtccaaaatatgggtaaagaataacgaacaatgtagccccaaaaatgaattaacccccaaaaaatcaattaattactcgttcaatttggcggccaaatgccgtggcgagtccccgtgcgcattggccacgttcgggtcagcgcccaggcagagcagcaagcgcgtgatctgcagattgcgcttcgaaaccgcaaaatgcagtgccgtcattttgccactgtccgcctgctcgtcaaggccggcaccgtaggagagcaggcacatcaccatccctggataatggggaaaacttttttttgtttttaaatgggcgcaaaagttgagcaaattggattcagcattttaattaacttatttatgtatgttcctggaactcaaaaattctggaagatttaaaaaaaaaattcttataagaaaaatcaaaattctctatgcttttttgagatttggaaagtcatttcgctattgagaacatttttctgtttttttttctttgttaaactatcgaaatcggagttaaaatggaacgttagcaaatgatttgcttttaaaatttttggctcaaaaattgttagaaatgttttgaaagttaggaaggggtaagaaatttttcattcttcaccatgctattgaagaaaaaaaacaaattttttctcaaaaaatgaaagtaaataatattaaaactttcgaaaaaaaattttttttttgaatgccaattttaaagagcacatttatctagtccggccttaccaaggtcttcacgcatcacgaaactgatgtaacnggngtaaagcccggctttgttcctcacattcaggtccaactctttgtgcttcagctggagcaaactcatcaacg

SEQ ID NO: 42377 - DNA, 388 bp, Heterodera glycines
attgggtgatcactagatgaaaataatgggttaatcaaaactccccttaaatattttttttagaaattttaaatttatcaggctactaaatatttcctaaaacggtgagatcactgaccaattaatcacttcctactactgaacaaatttttaaacatcaataattgcgaatttttggaaaaatctgttaagaaaatcggcaacaaaaattaccaaaaattttttggtggccttattaactagtggcaaaaaattataagaggccgaagaccaaaaaaaaaagagaaaaagaccgtcgctcggcgcggggtgggggggggggttagcccttcccccaccgaagccaagggtctggctacgtccttggggggggggggggggggtaaaa

SEQ ID NO: 42378 - DNA, 1722 bp, Heterodera glycines
  unsure (1)..(1722): unsure at all n locations
ataactttcccccttttttttcattgctttttcaattcctttacatttttcttcttgtccaatgttgtaaagttcattcttgagcaaattccattcatacttttcgtattttaacttggtgtgttgtaaatctctctcatttatcattttttctaattcgcctaataattcaccaacaatttgctgtatatctgaaaaataaattttatttttaattttattgtaacgaaatcataaaaagagcacgagagtcaaaatcgagaaaaattttcaattttattgacattaatcgctcataatttatatataatttttaattttaccatgaagagaattgtaattaagttgaactgcattggcaaaattctcaagcttttctccaaaatatggctatatcatttgccaggcttaaataaaacataaatgatcaattttaaattaatttggatttttttaaatatttattacactattttgtcatattattttagataatgatttttggccttttacgctaattaaaatctcattttcatttaaatatcaccttttgtttgtacataattcttttttttttctcaataaaacttggaatttctacttcatttctttttaataatttctcaacaaaatgttcgacattaaaatattttggttcaatttgtacacacaatcgtattgcaaatgtgagaagcaagtggaatttcaccttctcgttcaaatccaaaatctttattttcatgagtgctttaagttcatcctttggtgtaaaattttgaagcgttttcactaaatcaatagtctcagcaattcgaaaattgttggttgcaccaattaaactactaaaattaaaatgaattatttaaataacactgatttaatttaaggatatttattttagcgtcttaaaaataaaataaaaacattttgataaaaaatagtctcttaaaattagtttgaaaaatttaaaaatttaattttgttttatcaacctgtgctttgaaattaatgtaattaatgtgctgagtcgctgctgaacaaccgaaagtgggagagaaataaattggcgtttttcatcataattaattcgtttgaaaatttgctgagagtttcaaataaattttgactgaattttattttttattcttttaacataattcaccttcttttgctcattttgcataaatcaattgtattttaataggtaattatttgctccaaaatattcaaaagttcatttagcgaaaagattttctccgaataagacagtttttctttttgcttttccgcgtaatttttcatttttttaacattgctttcatcgcttatctcagtaatatatgcttttaaaattttgaattcgttcgaatatattaaactttttgtagaataatttttctcttctgtgtcatttatctgattttttaattttaattgataattgaataattactttcaacgcttgtgcaaattgtatcaccgctaaaaatttgttaataattatttaattgatgaatttaaaaaaaaactagcgcttaatcctaatgataaaattcgcataacctttctctttctttctctcctttttggcttctctcaaatttgtctaggatcctcacgctccccctccactcactctccacctntctctctttctttgtttctctcatctatctactttctctctctctctctctcctctttctctctgtgtttccctgt

SEQ ID NO: 42379 - DNA, 474 bp, Heterodera glycines
gggttagccgacatttgctgataatttcgtttaaaggttaaataaatttaacaatatgaactacaatttaagtgaaacaaataaatgattttaaaaaataaaatatatccaaataagtttaaaaaataaaatatatccaaatatataagtgattaatatcaaaatattctacgctataagtcagtcatcgcatttaaacaatttcaatttgccaaagttgtgtgatgcatacaaaagcaacagtgcaagttgcttttcttctttctgaattcgttttggcgacccatcaacacctaacaaaaaaaaatttaaaaaagttaataattatttaatttattaaccataaaaacaaatttggtcaaaagaagccgcaggcgattcaaacaaagcagcaatttaacgaagagattataagccatcttagatcaatacagtatcgcctcgcagctaacaattttgacttttgggaatgaa

SEQ ID NO: 42380 - DNA, 928 bp, Heterodera glycines
tcaaaccctagagaagtgtcgttcaaactccgccattttcgccgcggggcactcttttgccgaaaacgtacgatcctaacgagcttttttcgaaaagcgaaacttccggactcaaaacacctcaaaccctagagaagtgtcgttcaaactcccgccatttttcgccgtggtgcactcttttcgccgaaaacgtacgatcctaacgagctttttcgaaaagcgaaacttctcgactcaaaacacctcaaaccctagagaagtgtcgttcaaactacgtcctttttcgctcgtggtgcactattttcgccgaaaaaggacgatcccaacgagctttttgaaaagcgaaacttttgactcaaaacacctcaaaccctagagaagtgtcgttcaacctccaccctttttcgctcgtggtgcactattttcgccgaaaaaggacgatcccaacgatctttttgaaaagcgaaacttctgactcaaaacacctcaaaccctagagaagtgtcgttcaaactacgccatttttgctatggtgcgctcttttgccgaaaaaggacgatcccaacgagctttttgaaaagcgaaacttctgactcaaaacacctcaaaccctagagaagtgtcgttcaaactccgccatttttgctgtggtgcactcttttgccgaaaacgtacgatcccaaagatttttttgaaaagcgaaacttctgactcaaaacacctcaaaccctagagaagtgtcgttcaaactacgccattttttgtatggtgcgctattttgccgaaaacggacgatcctaacgagctttttgaaaagcgaaacttctgactcaaaacacctcatactctagagaagtgtcgtatcaactccgtcctttttgctgtggtgcactatttttgcgaaagaggacgatcctcacgatctttt

SEQ ID NO: 42381 - DNA, 438 bp, Heterodera glycines
ccaatttgcttttacttttcccatttttcttccgttggcactttcatacaagcatcgaaatagcggtgcttttcgctgggcggaccttccgggtctttcattttcaaaggccgttgatactttttgaatccaacatcatatggcgttatggtgatgttcagcatgaattgttcacttccgtcgggaagaaaatgttcgtacaattcatgccaaaatggtccacatgccggacaaatggcacaaaggcaaaagtttgtttagttttggcacaatgccaaaagtgctttttggcacagcgcctggcgttgtgcgatggaatttggttggtgtttttgtttttggagcgaccaatgtttgggaaacgcactaaaaaataatattattttaaattgtgatttttaaatatcaaaatttgacttttatctttgcacaatttgg

SEQ ID NO: 42382 - DNA, 142 bp, Heterodera glycines
cattttctaatttttcttataagttgcacaatcattttttattttaaattttgagtcaaatctattgaaaatctctcaaaaatttcaaatttcctcaatggcgtcaaacggcaccaccggacaaacttttccataaaaatct

SEQ ID NO: 42383 - DNA, 894 bp, Heterodera glycines
aattttaaaatgaaatcgaacaaaatatttattttttaatttttaatcatttttttccaagatcgcaatgactgaatagatatcatattcttgatcagtaatgatttaattatttggcaaaatttaagacaataaataatcaaatccattcaaagaaaaaaaatgctaaaatcttagcacaaaatgtgctcattctgctcgaattggccgactatttccaagtggactggctgaagtcgcgctgtgaggcgcatctgatcaattgcccggaaattccaataatcgaccgttttttgttgatcgatcactattgtctcgacaattttaaggcatatttttcaaaatattccaattttttaaaaatattttcctcatttagaattactttttgaatttggcggttgacaaattgcgtgcattttacaaggctaaccgcgaccaattgtcgccagggaaaacggctgtcagtgatcaattgttaggggaattggtcaaccgactttgtggatgatttgatattttgcggaaaaaacagtaatgaattggggacaattaattaatggggtgcggatttaagggatgaaaatttttgaaaaaggcacctaaaataggcacgaaaaaatgaaaatggcaaaaagagaataagtattaacaaattacggaaaatttttttataaaaataagaaaaaataaatcaaaggctttctaagattttcttttcggaaatgagaataaatccattaagtaaaattaaaattttaaggtggctggcaagattggaaaattggataaatccaaaatggacaagaatttgagggatgttaatatgctttttaatcaaaatgtcaatttttttgtattttttaacataattataagcatatttgtgccttt

SEQ ID NO: 42384 - DNA, 520 bp, Heterodera glycines
  unsure (1)..(520): unsure at all n locations
tcaatggcccataantttggggttgattgaccttctccctactctcatcccccgccccgctccgttgttttcatcccccgcccatccgcttgtccatttgacgcgtggccgcccgccccttccgccgattgcgcaaatacttcgggggacaatgactgaatgaatgaatgactccgccgactgacaataatgaccacagcgtccggggggcggtggcggaagagcgccccggggggagaggggcgggagggaccaccgccttgcactctgaggcacgggaagggactgacagctgacggccggcgaccgacagattggggacgtcgccgccgccacggttggtcggtggtcgcgggtttgccgggtaattggccgagaaaaagaaaaaaaaggggggagagggaccccccccccccctccccccggggagactaccccggattaggagaggggaggtgacaacaggtgacccttccgaccagtgacgacccgcgaactcttttgacactctctgtcctct

SEQ ID NO: 42385 - DNA, 795 bp, Heterodera glycines
attaatttattaatttattttgcttttgataataattctttttatgtttttattactgtaataaattaaataaaatataatttaaatattcagtcattaaatttattaattttatttcatctaattaaatgttttcccttttttgtgccttttccatcacttttttttctcttccttttacctttaatttcattttctgttttttaaattaattcttcttttaatttggctgcctaaataattgcctaattacataattaattaattaatccatttaatttccaattgctccccgtaataatccgtcccccctccttttctctcttaacacattcttcttgatgatgatgtgacggtgctgctgctgcttctgatggcttctcccccccccccaatccttcgccatttcccccgggggaccctcttttccaaaaggcgtcaatttccatcccccctttttttgcatagacagccgatacaacaacattattattatcatcatcatcaccatcattattattattatttcattttattatttcatttttgttttggcttccttgggggggggcaacttattcataataaaaacgccgcggggcgactgcgaaacaatccaacacaaagccccggggggagggaaacattggagtggtgggagaggggggggggggaagggaagccgcattttgcaacaaaataaaaaggtttaaaattgaaattcgggttttaatttggcttaaaattgtttttccaaggtgaataaattaatgctctcggaatccaaaaaaattc

SEQ ID NO: 42386 - DNA, 796 bp, Heterodera glycines
aaaaatacaaagaaaaataatgtacaccgcccggcttcgaacttggcccccccctcaaaatgatgcctcagaatccccaatcacacagggattctgaggtcttgactatgtcaaaagtacaatctgttacgtattcgtgatcagcaccctcaaatagccctaatgacatgttttttgaagatatttggtgaaaaaatttttcaactcaaaaatcctatgctcacccctttggtcccgaatctcaaaatcacttttatttttataaaaattcttaaaaaagtgataaaaatgccaaataaaatttatattatagagaaaaaaattgcggatttttgtagtattttacttttcccgaatagcttttcagaaggcagctacgaatttttttctgaaaaatcgaaaatttccagaaattctgaaataacttttttcttttttgaaataaaaaactcaaataaatcccataaaattctccttatttttctctatttttaaagctttattatagttaaatcgatgaaaccatcaccgagttatgaattttccaatattaacccaaatttccaagggccaaaaaattgccaaaaaataaagaatttttaaaaaattccaaaaattatgaaacttaaaatagacattatattcgtactcagcaccttattttaccccagaaaaatatttttcacccccattttcgtccgaaaaaaaatttccgaaaatttctagggggcctagctcgaaaatttttgaaattttccagtcattaagcacaccattcgatagcatttaaattctc

SEQ ID NO: 42387 - DNA, 826 bp, Heterodera glycines
tagagtcaccattgagagcttagcggattttacctactgctagctgccgacaaatctcaatgcctggggaaggaactcataaattatgccgtgagggaatttgaggagggtgtgccaaatgaatgggcggaaggcgtaaatgggagggggggggggggatggacggtaaaaaagaaaaaaaatgacaaaaaaaatataaatttttatattgattatagaaaaaaagaaatatccgttctttttttagtttttatctttttatcaatccgctaggaagtatgactttatttgaacagttttgatgtgttcgatcttctcactgggactcaatctgcagaagaaattaccaatctcaccaattcttcggcttttcaatcacatggacacaatctcagcaactccttggcatttcaattacaggagaatttgatcaccagcacttatctaagcaatcctcggcatttttcgttttcgggctgtcttaggggttgaaccggtagagggcggaggcttggccgcttcgcggcttcacttccatacaattgacctcactttcttcacttttcattggcaccatcggtacccaaatctcgcaaaatcttctttacatcatcggatacgcaaaatgaaaaaaatcacttttatttgttttcccttttctgtccctttttgacattcttttctcgactctgctgataaaactaattatcattatccatgtttggtatcgatcatctcctcttattatgcttttaattggccatattagcgctttcctttttctttgtctgccaattctttcgtgctttccttttctttcattcat

SEQ ID NO: 42388 - DNA, 1351 bp, Heterodera glycines
atgaattcaaaaaattgcaaattttcttgaaatttcccgttacgcttggacctgtcgcgattttgaagcctcgtcaattttttgtgtttgtgattgtgccaagaattttttttgttgactccacagattttgggcaaattccagaaaattgtatcgaaatttgaacacatttgacttagagcaaatcacaaaaatccatttccaattgaatgaaattcattcatttcctccctcttcggcacaatgccaaacattaaatgaaatatttaaatcccgtgccccaagagagaattgtcaatttttaattggggcgatttgcgccaaattttggcgcacaattaatttgcgattgttgtcctgctcgctggcgcgccaattatgaggtcaattcccggatcaattgatgcggaacatcgcaaaccgttgagcggcgaaaatgccaaagcgcagtgagtgagcaaaagaaatgggcaaaatgtgtgtcaataattgcgatcaaattagacacgcattcgatcgatcggacaacttggtgccctttcccctgtccgtcccaatcgagaatttctcgaggaatttcagattaccccctgatttagaggtttattctcatttttgggtgatcggggtgggacagggatggcattccgaggcgtcacaaaaattttcgtaaatcggaattccgaggcgcaaaaattttttcggaaatcatacttccgtgccattcctaatccctattaggggaaatattaaatctaaatttttttgttcaaaattgtttgtaccgtagcctcatacagtacattttagtaacattgctcttctcctatgtaatctgaattttttaattaattaaattgtgaaattattaatttcctttttctttcatggaactgttggatttgttcaacgaacgttcgctggtgtgggaagacgaggaaaaggtgaggaggcaatttgtggcgcaaaaagagatgagattagtcattttcaccgcgcacaccttaaaacaaaacaaaaaaggatcaaattacgaaatgactaatttttgcaatttttctaaaaataattttttttttttcatttttaaaataaaaatttttctttaatttcttaagatgatctttctattcgactacgtcaaaggtgcgttttcccattttattatcatttctgaatattttgcttaagccttggctttgaacccctaagaaaaaaaaaattaatgaaattggcaacattttttcagctcacgattttgtcaaccttttttttttgtctttgatcactgatcaatggctgtgatcatcgattgatcagattaaatctgaccatgattttgtatgtttaa

SEQ ID NO: 42389 - DNA, 1202 bp, Heterodera glycines
  unsure (1)..(1202): unsure at all n locations
aattaaaatcacgatgcatataaaacttggggggaccgaaacgggggggggggaatttgctaaggttcctagtgatgcaaacaagggatggcattccggagccccaaaaattttcggaaatcggaattacgaccccaaaaacgtcggaattcggaaattctttcaaaaaatataataaaaattttctaaatatttttactagactaaattttttaattcttaaccaagtaaaaggtgatttcaaaaaatatttttggtatatttgaatatttgcttaaaaaattattcaatgattttcatcataacttttttcatgtcattttacattttttagaatatttttgagaagagaatattacaccttttttgcgacgtattttttcaaaaatttttgagaacatgggggagggggagaggcccggcggtgccgataggcgtcgccggggaaatttttctaatttttaaagcgatttgttaacaattttgtccataagatggccaaatttagcgattttgaggcaaatttctcaagaataaggatttttagggtccggcgatgccgataggcgccgccgggaaatttttgaaaatttgattacaacttgctaaaaaattttgtataaaaaatgacctttttttatttaaaacaaatttttccaaagagaattaaagattttggttgactccaactagggaaaaattagaatttaacgaatttttgggaaaaattatccattttccctcttgctttttcataaacaaaaactacttttaaataatttatatttaaacaatcgcttcaataaaaatttctttttaaaaatcttatcaaaaattgccgcggattcaaattgccgcgttcgcgaatcgcggaccgaggaaaaaaatgccgcgaatcgcggtcgcgctccacccctggtctctaatgtttatatgaaaaaattactgcaccatcttctgcttttttttgttgagtattttagctatctaaaaccnggtaatatttttttacctttttttggtgcctttttgggagtttttatttttgttttgtatctattttgcggtttttcttactttatattcagggaacggatttatatgttgtgtttttttttgcgcatatgctatcgcatgaaaagctcaaaaatagcatttttacctgttttcctttcaattagagcgagtttttagcacatata

SEQ ID NO: 42390 - DNA, 1418 bp, Heterodera glycines
tttttttttcttctaaaatggtttttaataccatatttagccatttttaaagttttactttttatttagcgaattagaaaaaattttacgaaatttagacctcaatttgaaaaatttatgtccacatttttcgccattttatccatattttgtggtttttggtccatgttttatggccatatttcgcgattttatttatacccatatttttttatgccctagttataacagtttctttcttggtcaattgcctacattcttggtatcaatcgaaagcttaaagccccgggaattcataaacacaagaaaataacaaatactgacattaaaaaaaaattacaacgagaaaacacatcgagtacattcaagaataattttttgtattgctcttagcccagaattttgggttcgaaaaaaaaattctacaaactataagccttcgtttgataccaagaatgtaggcactgaccaattaagaaaaaaatgatgaccaaagaaaaaatatggattattccaaaatccctaccgattatccccccccccccccaaaaaatggatttatcattcatatatactaatctacctatttccttttttcgtatagtggccttgtgataactcaaataatgcacgaactaatggctaccgacaatccgagtgactatctggtggaacagtttgagtcgaagaagaaaagtgccaaaggtgagcatttggaagatccggataaaaaaagtggtgccaagaaagggtcaaagaagaataaaagtgccaatgagcaacgcaaagacaactacaacaagatcatgaagctgttgatgcagcagaagttgcacccgttcgactttttggccggcactgctcaaactgagcaaggggcggaacaatttcaaattggcggcatacagtatataattagtggacagatcgcgaacaaaaaaaaatgggagaaaaaggtgaagggaaaactgaagacacaaagtgaaatggacaaagcgaatgatacatgtggtcgattggccaaattggtggcaaacacgctgtacgacaacaacacggacccgcaggtgctttaggagtacgaaaaaaaactaagaatttcaccaagcgatgggtgcggtttcggatcaatgatcatgcaatcaaaaatctatttcggctcagtcccaaaatccgtgccgaaagcgaagaaaaagtcgagtttttctcaaaatcagcggtgccgaaaggcgccgttgggataaggacagatacgaacccttgtttgaaaatttatttttccaccgttgactcgaattcgagtcccgacctaggaaatatgtcgaattgattacagatatgcgatcagcgacacaatgcatattggtacatattttggattttttagctcctttttctacatttcttcagttttttga

SEQ ID NO: 42391 - DNA, 789 bp, Heterodera glycines
tgtttggtagagccagactagagaaggcaaatgttggcactaagtttgcggtcaaatccccaagagaaaaaagagatagccattttttcggcaagaatttttttcgttagcatttcaaatatcgtgtgagtgtttggtagagccagactagagaaggcaaatgttggtaccaagtttgcggtcaaatccccaggagaaaaaagagatagccattttttcggcaagaatttttttcgttagcatttcaaatatcgtgtgagtgtttggtagagccagactagagaaggaaaatgttggtaccaagtttgcggtcaaatccccaagagaaaaaagagatagccattttttcggcaagaatttttttcgttagcatttcaaatatcgtgtgagtgtttggtagagccagactagagaaggcaaatgttggtaccaagtttgcggtcaaatccccaagagaaaaaagagatagccattttttcggcaagaatttttttcgttagcatttcaaatatcgtgtgagtgtttggtagagccagactagagaaggcaaatgttggtaccaagtttgcggtcaaatccccaggagaaaaaagagagacattttttctgcaagaatttttttcgctagcatttcacatatcgcgtgagagtgtgggagagacacactatagaaagcgaatgttgtgaccacgtttgcgctcacatccccacgagagaaaagagatagacattttttgtgcaagaatttttttcgctagcatttcacatatcgcgtgagtgtgtgggaga

SEQ ID NO: 42392 - DNA, 895 bp, Heterodera glycines
ttgtgcaaagcaattattttcttggaggctgtaattttctgtagtcatttgatatgcatctgctatttttctagtcacaaacaccaatatttttcggcccgaattttataggcgtgaaaagtactgatttccaacttctttcgtttcggagacacccaaaatttgaaaaacgtctgtaatttagcttttttaaatcttaattttttgaaacccgaattgagaaaatatgaatgtatttctgcgacgccttctatacttaattcatccataatgggccaaaaattcataagttaagaccaaaagagggattttagtttcagccggaatttctataaaaatgttcgtgtgtaacctatctttgtctattcggataagtaagaaattgaaatattcatattactttgcctcccttaaagctttataatgaaagcgtcgttgtctatttaggatttgccgtcgcaattctgtaattccactttggaatccaaaggaatttgattcgcttttacaaaatagacagtgccgaaatttgtagatcggctaaaccttaactgaaacataccatatcagcgagacgccatgctgatttgttgtaatcataataaaaaggcccctattgtttaattcggcctttcctataagcacaatgtgtttgaggggctctacaaaatattgcttgtgcaaagcaattattttcttggaggctgtaattttctgtagtcatttgatatgcatctgctatttttctagtcacaaacaccaatatttttcggcccgaattttataggcgtgaaaagtactgatttccaacttctttctattcggagacatccaaaattgaaaaacgtctgtaatttagcctcttttagatcttattttttgaaacccgaattga

SEQ ID NO: 42393 - DNA, 896 bp, Heterodera glycines
  unsure (1)..(896): unsure at all n locations
aaataaaaaaatcgattttttcaagtgtccgtttggggtactcaaacaattatggggagcaaaaatccaacgcagaattaaagtacagactatagggaagctattcccgaaggattcggtctccccataaatctgggcgcatcggttcggggggactgccccgaaaacaaaaaaatcgattttttcaagtgtccgtttggggtactcaaacaattatggggagcaaaaatccaacgcagaattaaagtacagactatagggaagctattcccgaaggattcggtctccccataaatctgggcgcatcggttcagggggactgccccgaaaacccaaaaaaaaatttttttgaataaaaattatttaaatgaactgactagataatatttaaaataggttatttctcttcctttcagtatccctgcaaagtttgctgcgcttctgatcagtttctgaaaaaaagttaagcctaacatcggttcagggggactgccccgaaaacccaaaaaaaaattttttattgaataaattatttaaatgaactgactagataatatttaaaataggttatttctcttcctttcagtatccctgcaaagtttggtgcgcttctgataagtttctgaaaaaaaagttaaacctaaactttttttcctttttaaaaacaaattaaaaatttttaaaaattttattcatctccctttttaataaaaaaaacatcatactncctaaactaacatataaataaaatttcntncttttcatatcaatttctataaaaatacttattaattaattttntaaaaaaataaaaaaataattcctctctcnncttttcnaaacttttttcctnaggagatagctcggcgctcatttcagtgtaaattagtccttta

SEQ ID NO: 42394 - DNA, 1169 bp, Heterodera glycines
  unsure (1)..(1169): unsure at all n locations
attccaaccgcattctcagaataattacgccgatactaactgttctggaatttgtttctctgcgcgtttgtttgggaaaaatttggaaaattggctatctctttttctgctcaacagtaataggaattccaactgcattctcagaataattacgccgatactaattgttctggaatttgtttctcggcgcgtttgtttgggaaaaatttggaaaattggatggctatctctttttttgataaattttatacacatacaaatgctctcgagcatgatagggagggcggtgcgcaatagaccttttatttttgagggaatttttaaatttatactctatcccagaaaaatggctatctctttttttgataaattttatacacatacaaatgctctcgagcatgatagggagggcggtgcgcaatagaccttttatttttgagggaatttttaaatttatactctatcccagaaaaatggctatctctttttttgataaattttatacacatacaaatgctctcgagcatgatagggagggcggtgcgcaatcgaccttttatttttgagggaatttttaaatttatactctatcccagaaaaatggctatctctttttttgataaattttatacacatacaaatgctctcgagcatgagacggagggctgtgcacaatcgccattttatttcacagaggatttttatatttagaggttatcccagaaaaatggctatctctttttttgataaattttatacacatacaaatgctctcgagcatgatagggagggcggtgcgcaatagaccttttatttttgagggaatttttaaatttatactctatcccagaaaaatggctatctctttttttgataaattttatacacatacaaatgctctcgataataggaattccaaccgcattctcagaataattacgccgatactaattgttctggaatttgtttctcggcgcgtttgtttgggaaaaatttggaaaattggctatctctttttctgctgcacagtaataggaattccaaccgcattctcagaataattacgccgatactaattgttctgggattttgttctcggcgcgtttgtttgggaacatttggaaaatggctatctcattttcntgctcacagtaataggaattccaacc

SEQ ID NO: 42395 - DNA, 1172 bp, Heterodera glycines
tcactcattttttaattttacattttgacgtcatttacccaaccactgattcaaaaaagttatgaccaaaaatttttgaaactttgtttcctggaaacttgtcgaaatttttaaattttataggctaaaagagaactgtcaggctaatcgcgtatatacatcttataagcattttctattgcctttaggccgaaaaaaagcattatacccaaatttgtcggtgaaaaaccatggcaaattcaaaaaatttctttctagggagcttgaaaacgaaattagtatgttcaaaaatattgccaaatatgatgaaaaggtattaaaagcttgttcttgacacagcaagcaaagcggaaaggcaagaaggacaatcggaggaggagaagaaagtgatcaatagtggttatctgatcaccgctaaccagcaaattgatcagcctcaattatatgtgataggtgatgatcctgatcagcaaacaaaaaaagcgattaattgaaaataagacatttattttgtgccttttaaattccatttaagcaaaattacgacagagcaaataaccaataatgaaagaattgtaggaaaatatcattgaaaacaattgggagagatgattgacgatcacaaaactcaacagaagtaaagagacggacgaagggaggcaaaaaggcaaaagcgcaaattttgaacgagaaaatttttgaaatcgtttaaatgtgaatttgtcgtcaaaaactttgatacaaaaatttcgataatttaaaacgaataaactgggatgtaaacggcaaaacatgaacagattttcctgtcaacgcacgggcatccatggcacaaaagcatcgcctttcgtcgcctataaaaaaaaattaaaaattagcaaaaaaaatctaggaatttgtgtaaacatttgactcaactataaaaatttccaattttgagcatttataaaattttacgagcatatgaatattttaaggccgggtaaatttttaattttagataataaaatttgcattcaattcatttttgttcagtgcaaatggaaactccaccttcacaatttcgttgttcagcaaacccatcacatagaacagtttttgtttcacttcttgatcagacaaagtcgacgcaaaaatcagacggaccctttccgccagctaattataagaat

SEQ ID NO: 42396 - DNA, 1052 bp, Heterodera glycines
cagcgaacgtaaaaaattaaaggaaagaaagaagcgccgttcgctgcattttttcctccgcagaaagagagtaccctaaagagagatgggaacaaagaaaacatacaaaaagagaaatagaacgaaaatttctctaagtgcccctcctctattaaaacccatcataaatttggtttttcttttccaaatattctcccatttcacctcccatttttatccctggtccctttgtattcggacgatgaaatctttcgccttttactaaaggtttccgtgcagggggacgcttatgggttaaacccaatttttggacagcgccttctccagggagggcgcgaaaaattgttcaaggcgcattttatcactctaggaaaaattaaaatttatttttcgtcgggaccaaaattctacacaattgccggtgcctggacccagttgaaaaaattggaccaggatccgaaacccagcgtttcaggaccctccaatgtccggccctatttttgcctaagtatccttacctggcatccagcaccctattaataggtcttgtaaatcccggttccgacaaaacttcatccattttctaccaacgaaaataaaatggcggacaattccaacgaagcgaaagaacaaatggcgaaagcaataatgtattgtttgtatacaattaataaatttatttaattaattacaaagaaatgtcttaaaaaagcaaaaaattaaattttttcgaaattttgatattttttaaaatcaccaaagaccgcgaggagaaagcctaattgacgcgttattttcgcaattttacgccccctttgtcgattttttaaaaattcaaaatttcgcccaaaaaaagcaataatttctttgatttctttcgagaaaaagtttattaattaaacagcaatatgcagagccaaaatttcagctcaatctgtgccgattgttggctcaaagagttcaatttttcttgcgccctctcacctgggcctcgaaaatgctctggcccaccatccgatttgactggttttgtcgaccaacattttaaaaca

SEQ ID NO: 42397 - DNA, 1259 bp, Heterodera glycines
tttttggtttaatttccaataaactgatcaattacccactaaaagtgctttgatcactcaaaaatttttatataaacataggcattctttacattctcgacaattttgtctcgtctgacattttgttaatatttgcacaattgactacttttaagaaaataaattccataataaaattaaaattttcgaattagaaaatattgaaattcctgactgatcggaacaacaaattatgtggtgtaaatgtgtgaacaaattcagcacagttcgctccgaatagcgatcggctgatgggcggcaacatcaataggttctggaaattaattttttttttttgttgttaaattttaattttaatttgtctaaaaatttttttttaaatatttaaaaaaaacaaaagtggacacgcattggttgaccaacctcaatcaaatagtaggactgcaacagcacacgacgcaacgcaaagtttggagacgaacaaaaaagacagaacaaataaaagaaataatcaatcaaaaataatcgatacaacagcgatatacagagtgagagagagagagagagcacaaaattgaaggacagcagagaaaaagagcaacaaagagactacaaatgtacggtaatgtagcgactagcagcagcagaacaaaatacggtaatgaaaacaaacaaaaagcatggtaatgtggaactaagtcggacgagatgcagtgagagtgagttatacggtactgttgggtactgttcactgtaattgccagtgtgaacccaactaggaaattcatgtcaataattgatcagtttctaccattgctggaatgatcaccaaaaataattattctgatcagtccgaaatgggttcacattggcatagtaaataagtccaacaagaatgggcatactgtataactaggggtaccataagatactgtacccaagtggtataacataacacatgaatgggccaaccattcatttctgatcaacatagtaaaggtggcgcgagattcaaaccaaaaaaggtgaaaaaagtgcgcaagggtaaaattgtcaaaaaaatagtttaatattttggacaaaaaaaatcgggacaaattgccaaatataagtaaaccgacaaatggtcaaaaagaaagcaatgcgaaatttggccaaaagcaggggaaaatgtccacattccagaaaataaaaacacacaatatggtacaaatggtcaacaagacagatgaccaaaagtgggacaaatggtccaaaaa

SEQ ID NO: 42398 - DNA, 933 bp, Heterodera glycines
  unsure (1)..(933): unsure at all n locations
cccagagaaacggagaccactttcaagcaaccatttttcttactctatcgactggtatttttttcggaaaaatttctgttttttcccggaaatagaaaatttttttggcctgagcgggacatttgagtcccgggtccataactcgttaggggttggttttatcgaaaaaacgccttagtgcaaaattgtagagcttttaaaatgctatcgaatagtgtattatatggccggaaattttcaaaaattttcgagctaggccccctagaaattttcggaaaattttttttggttgaaaaatatggtgaaaaatttttttctgggtatttttaaggtgctgagcacgaatctgatgttcattttcagtttaggaaattttagaattttttaaaaattcaaaaatatttggcaattttttggccctcgggattttgggtaaaattttgaaacttcgtaactcatttcaatttaggatgaatttcatgcaataaagctttaaaaatagagaaaaataaggagaattttatgggatttatctggtatttctatcttcaaaagaaaaaaagttattccagaatttctggaaaaattcgaattttcagaaaaaattgcataactcagttctgaaaagccattctgtaaaattaaaatactacaaaaatccgcaattttttgctcgattttatgaattttattttacatttttatcacttttttgaaaattgttacaaaattaaaaatgattttgagattcgagaccaaaggggggtgcacatgatttttgagtgggaaaattttttttcacaaaaatcttccaaaaacatgtctttagtggttatttgggccgctgatcacgaatacgtgatcagatttcaattattacatcgttaagccctcagaatccctgtgtgattggggattctgaggngggggggg

SEQ ID NO: 42399 - DNA, 1653 bp, Heterodera glycines
acacgggactcgtcgtccaaaacaatccgtgagtgatcttctggtcctcgttcaacttaccgaccgcaatttcggtacttgacaacctaacggttggtcgtttggtcgttgttccgctccgtctttgcccattcccatcaatatttttaaaatttttgagacgggatattgcccttctgcaatatccgacgggactgaaagttcaaatgcctgttctctgaaagggagacctccgtaattaggaattggaatcacattagattccctttcatcaagaatggattcccaatcttcccattccctgtcgtagccctttttagcccgccgatttgttgttgatcaaccattcgaaagagacgcgttgtgcctttttcaaatttgtttgcacttcatccggtcgtacttctggtctctgccagacgagttggacattgacagtttgcttcgccaatttctccatttcgaatgaacgttggacagcggccgcagctcccatcaatcgcactgaaaactggttaaggggaaaacagaaagagtccagactttctttggcaccaattaccaccgtttttccatgtgaacgaatttcatttccttttagaaaaggagttaccaggggtaaaatgtaattttcacccatccaccattcttgtggacttgtgattttggccaaattaaggtaaaggagttgattaagcataattcgacctggactgatttcggttaattgccgggcatagatggtttgggggcgaagcatttgcgcagaaatgacggtggctgatctgaaatccccacctctgtatcgttttaagtcggttacaaaaccgggttgaaatgaaccaataaccaattttatcacctccacctttatggcaacagcttgaacgttgatcctgccttgtacgaaccacgagcgcaacgaatcgaccgggtttaagtcataggacaatctttcaaatccctccttccactcaaacttactgaccacaactgtgtctcccatttgaaggcgtctctcggcacttaccaaagtatcaggaattcccataaaaaatggaccttgtccactcattttcccacccacgacacttttcacgtcggtttgacacaccaaatacttcaaaacaccgccttccgcgccatgttcttcatttgaagacattggcacaggcgaagcgatggcacgtggctctgaccacgagacattggagaattgagtcgcagtgaagtcttgaatagtttcgatttcaatattttctgtgtttctttccacagactgaccttctcccaattccatgcctcgttcaaattcttcttcaagacctgcggaaataccacgagttttatcggtttcaattactttctcgacggctaacgccgtttccatgatcaatcctttctgtgtagctgacgctacttcaaatgactccaaattttgcggaatagtctccgtctcaatcaattcaatttgctctgcggctgacgccacttccaaagatcaataaatccggtgtggctgacgccacttccttaccaccaacagctgcgttcgaggcggccatgttttcgttccaacgatgggctgaacgttttttgaccattagaattagaattgcttggattagcacgaatgttgcttaaattgtttta

SEQ ID NO: 42400 - DNA, 1362 bp, Heterodera glycines
aaaaaatttgtattttttaatgcgattggtaaacagaaatttgtaaaaaaaaatgaccaattgattaagttctggggtttttaggatgcttaacatgaaagaaaaaaggttggaatattttctaaaattaaaattttaattaaaataatggtaaagaaaatgtgagggaatattctatccaagtggggaattgaacccaggcgaaaaattatgaaaggtagaaagtttatccaccacaccacatgtgcatgtgtgtaatcacatgactaaatgaaataaataatttaatttttttttctcaaaaaatttctccttcttcaccaatttcctactcttttcttgaccagacccccattcttaccagtgcaaatttttaccggcggtaccggtactagacaaaccggtaacggtaatttcatttttgaaaaaaccggtaccggtaacggtaccggtaccaaaaaacccggtaattaccggccagtaccggtaccggtaccggtaccgctcaaccctagttttgaccgaaaaattcggggtcttatctccgaatagttaatcaattattttgcccaaatttattgcccaaaaattatcggaatatcatttccgatttcaatttaatttgtccaaacccatattctctaaaatttcagaatttcatttccgagtcacattttttcgtccaattctcaaaaaatcttggattcttattccgttttacatttatttgggtccaaattcattttgtcctcggaatctcatttccgagtttcacgtttattttctgtcccttcccatttgtcccaaaattatcggaatctcatttccgagtttcacatttcttttgtccaatccaattttgtcaagaaatttcggagtctcatttccgagtgcctaaattctattttatttttctcctctcataaatgtttaaaaatcgagtaagcccaatcgaaatcccagtcattcccacaaattagggagaatcgtggtcggcctaaaatttgagtaaatttgtgagtttcagagcaattttctgtacacttcaacaatttaccgatttattttttgacaatttggagtctcaactccaattgtacgtgctaaaaggttggttttaaaccgcttttcaccccccccgccggttaagtgttcaaaataagatttagggtcaaaaataagaacattttacaaaatttctttaaaccggttatttttcggtttattcgaacaaaaatgtattatatttatgttttttgtctccccattatcgctttttacaatttttgggaggaaattagcaagttagtgcgttcgtgatcaaaaaactagattttttaaaaaaattttgcggtgaatttt

SEQ ID NO: 42401 - DNA, 904 bp, Heterodera glycines
ccctggattgcatcacctattttatttattggtggtctccgccttttgctcgccctttttgaatttttttaaagttttggcttgtagtcgcataacaggaaagtaccaaattgttttaaattttttaaatccatttttggttaattttttcaatagtcctgaatttaagtcatgtttagatttaaagcaaaaattcgaatttaaacattatgattttcgctcaaaccaggctcggggttctaatttggccaaatggatcgagattcgtgcccaattgaccccgaaatctcaaaaaatatatatttttttgttgatttggaaataaaaaaataatttaaaatatcagaaaattactaatgttaaaatggggctttcctatttactaaaagtctgtccatccatttttacatgaatcatcctctcttttctgttcccttcggtcttcgtactttccattttgtgctccttcccacacattctctgcctcctatttaaacaaatttccaaatatgcactcatcacattccaatcggggataaagcatttttctctaactgcctgctcttcactctcttgctcctgctctcatcagtcggtcgccgcccccctccccccccccccagtccatccctccgccgtgcccgcctctctgtccatttcgagccgtgtactattttgcctatttttctctgaggcgccaaacgtcgccctcccccctccccatacttgaaccctacataagcgataaagatagggctgccagatgagcggatttgtcatcattttgccgagttttggatttcacgcgtgacaaatgatgaagtgggatgtaaaggatggtgaattgaaacggaaaaaagtgaatttaaacatttgcattgtgacaaatttttagatgcaaaaa

SEQ ID NO: 42402 - DNA, 1137 bp, Heterodera glycines
  unsure (1)..(1137): unsure at all n locations
agttgcctttatttcgagcctactctacttgtgcatctttcncaatatggcactgctcccgaattatgaactgttcacgactgatgttgagatattttttttccgattccttatctccaagcatgagccttataagtgattgttcatatccttctcttgaaaaaaattgtcactaaaaaaaacacgttttctgaatattaacaacaaaaatttttagacagtttctaaagaggaagaaaaaaaatttttcatttgcctaatatttatttatactgttgaactgttggaaatgcagctgatgccgtcggaaaagctccgattttttggggaagtttttttctttcagtttcaccactgattgttgaggcaatttttttcgccaatttcttttgtttacaaacattatttattgcgtttcatcctgtagtgtgtaaaaaattttcagtaaaaaaaacttgttatctgaatatttacaagcaaaatttaagaccatttccaaagaggaaggaacaaaaatttttgcctaaattttatattatattgttgaattgtttgaaatgcatctgttgtctgccgttttgaaatttttcaacttttcgcgaaaagatttcccagaaaatgcatgggacaaataaaaattaaacttctattatgatcaatttaaatttcctatcagtttcgggtttgctttaaacacgctggcctatgaaaaaatggagttttatggatgtcaaattttgggacttttcttcgacgtggccatcagcgggttgtttcgtgacaaaaacaaaccagtttgatgttattcgaatgagctagacgcgctctacattttcaaatgtatcaacaaagggtctaccgccactccctggcgagatatggcctgtcaaagcagaacggggccaataaatttgaatttttgttaatcttcggcagttgcctttatttcgagcctactctacttgtgcatcttttcccaatatggcactgcttccgaattattgaactgtttcacgactgattgttgagataatttttttttccgattcctttatctccaagcatgagccttataagtgattgttcatatcctaaaaaagaaaaaaattgtcagtaaaaaaaacacgttttctgaat

SEQ ID NO: 42403 - DNA, 951 bp, Heterodera glycines
atcgtagattgacacaagttcgtcatgggactaaattttttaaaattatttttctgcgtttaatttaaatattttaattattattttacttgcaatggccaatcccaaagtttggtgctttcttcctgatctactttaatttgattcatttaaaagaattgttttttcttaaatttaaatattttatttaaaataaaaataaaaatatttaaaataaaaattcttttattatttatataaaattgactattttattattcattggccacttttatataggccaaattttacgagagttcatttgagtaaacaacattttccatcaaagaatttgctcgaagctcttttgtggccataaacaatcaacaaaatttggccacgatcaacataccctaattgttgtcgttcagttcagcaacaacagttgtggacctaaaataacaaattttttttgtttatgtttaacaaaaaaaaaatgtaacgaaataatgaacagatttcaaaaagaaaattcagcaaaaaaaaataaaaaattttgttttcataaagcttagcatgttgaacagaaacaactgctgttttattttgaggatgagattgtttgtgtaaatatatattatgtccaaaaaatttttactgatcacgggagttttttttattttggcaaatttttttgatatttttgcgttatttttgggggcagggtcgttttcgtacgggccgatgtcgtacgagcacaagtttttggctataacttttttatttatcgaccaaatccaacattgttggtgtcattcgatagccctatgtatcctctattagcctgcaaaattttgaaaaatttcgttaaggttcaaaaaaagttatggtcagaagaattcaaaaaaccagattttccaactttttttgctcgaacttttttttaaactgaacaaaatttccttggaattt

SEQ ID NO: 42404 - DNA, 1485 bp, Heterodera glycines
  unsure (1)..(1485): unsure at all n locations
aacagaatgagcagcatattctgacacattttggcacttcctattggcattttgtttcgttgggcaatgatgttgcatgcatacctttaaaatgaattcattnntgacattcnngttttcattnntaccgcaagtttantnnttattgtnntttactaaatgtaattgtactcttgcgatatgaacagtcggagagcattgtgtcgaaagagtttcgctttgacttgttacagaatataatctatagcgtctaacgttgtctcgtgctgctgttccagcaagagatgcagcaatgttgccacgccgcttccgcgcgacatatgatgcgagtagagatgcagaggcgacgtcaaacacctgcgaagagtgcgccatgccgcattccatgagacacaccactgtgtgcaatgtgacttatatgcaacggaagttagtattgactaagctacagatcctcgcacggagccaagactcttgaactacatgatccatcggcttatcagtggatctagcgtagaagattacccatctctatttcttgtcacatcatgttctatatttcggaattgactccctctcgcctgaacctgaaacccagaaaaccccgaaaattgatgctattgtcattcaaaatgtccacaaacatttaaagtttaatctttcgctccgttagaattccattgaggaagtaataccaatggaaaacgaatcccgcccaaatttcctcaaattaaactaaccaataatgcccccacaatggaatcctcccttcccccaacctaatctgaaaatcctaagcttaatccttctacaccaaataccgactattcttcatttccttccgacacggctccagtttcgaaaagcaccgaatttgttgtcactatcccagccatgggaccgaccgaacgtcccaaaatacgtgtaccatcgcccagatgactcctcgcccatttcaagtggttactgggattactggttaccaacccaataattcaaatgattttcctttttttccaacacggcacatcccatgtacaccactccccaacgtcgctggcgaagctcgaccgatagcccgtgccgctcaattcgattcgttttgacacccctccccacatacccgccgggcggagtgtcgcacttgtgaccggaagtgttgtgtaaagagatccgaattttccccctctcccgtttgcaactcccctccctcccccgttccttttttcattacgaagcgatcatcccagctttcagttactcacattaaggatataatttttgctttctctttttcatcgccaataaacagcaattccttttgtgaaataaattggggcattcttcgtaagttacgagacttcttcgcccctgcgcttaaaatttgaaaaataacaatgaagaaaaatttttggcttgaagaagcaaaaaaagctcttcgggtatcctcaccgaaatttttttctggatacgggcctgacactg

SEQ ID NO: 42405 - DNA, 653 bp, Heterodera glycines
gtcttgctactcccccaagtaaactcgtatttcgtttccgtacccgcccggggataaaatgaacgatagacgtatctgtggcatctttgcgcatgtgtgctcccaaatttaaatattttttgtcttaatttctagatccttacgaaaaaaaaatttcgagtggaaacgagctgctctcaacccctgtccatgatttccgtcgacattttgcaaagttctctgctcaatatctgtccgatgcatcaacttgcctccaagtcgttcattgtcaccgcgttgtccatgagcccgcgctgcgccgcctccatgtacggacatcgcacaatgctcagctccacgttcaggtctgtccaccggccgccgctccaccatcacctcgcactgtccgctgagcgatctcccgagccaacggtacggcaaccgctgccccggctctcccccccccttctctccccaaagagaatggatgcgattggatgctcaagtgagggaatgaatgaatgttcgggaagaactcacacatttccttgcccaccccattgcttgcttttgctgctccgtttgttttttcccacctctttgttccctacggcggatccgaggacgggagagaaatgattggaaggacgggggagggggaggggggggaagcc

SEQ ID NO: 42406 - DNA, 1343 bp, Heterodera glycines
aaaaacctaccgtatccttcaatgtttttcagagagagaattattaaattaaatatgcaaaattgttcacttgtcagctaattatctaaggtttagttaattttccttaccattagagcgccaaaaaattggaccatttccaatttgaagtgttcataaattttgtcgacatttgcttggtttttatcagtcagaaattcgttttttgttaattgttggccattttcgctaattagttgattaatggcaacattttgtagcaaatttgtcaccatttcatgcacattttctaatgttcgttcaatacttatgccattttcgatttgctcgcaaaaattttgacgcaatttttcaaatttggcaggtattttcttctcatatttcatgctgcacataatgccaaatgcctgtttttcagcccgttcatttgacatttgaccttcaaatattgccgaatttattccattatgccatgagaccgagtctaataatccatagacatacacaaataaatcttaaaatatcttttttaattcgttttaatatttttaaacacttccgtgccattcttccgcttttggcacattctgcggctgttcacaattactttttgaaagtataaaaaataaaaatgtgagtttccagttgagcgtattcattaccactgtcatttaatttgtctaaaaaataaataaattttttagtaattagtgtttttatctaaaatttttgaatatttattcattttattaatttcatttaaattttttcattgtaatataatttgtatattttttcttattttaaaataaaataatttttttcaatttccacaaataaaattatgtgcatatgtattaacgatttacgtattgattatattaagtaaagcaattcagaaaatagggacaatccttgaaaatggatccgctagaaatacctacggacatccctgaattgtccttgaaaatgcgtgcttttcgaattttttaaattttttcaacactcaccttgtaatatgtatatttttcggtttcaataagatttattgcttcctaactcatcagagaaaatttttatgccattcacccattttttttcatcatttgaaacgtgacatgtgacgtaaaaaattttatatattattttcatagtattgaatttttgcaattggttgggcatcttcccatttttatttttttataaataattaatttttattaatttatacaaaaaaagcgaaaatttcttcaaagtttaacaatatacaaaaataaaacaaaatttatttgcctatttataaaagcataatgtgccctatttgttaaagcgatgaatcctac

SEQ ID NO: 42407 - DNA, 791 bp, Heterodera glycines
aaaaatgtctatctctcttttctcttggggagttgaccgcaaacatggtgccaacactttccttctctagtctggctctcccaaacactctcacgatatatgaaatgctaacgaaaaaaattctcgcccaaaaaatggctatctcttttttctcttggggatttgaccgcaaacttggtaccaccactttccttctctagtctggctctaccaaacactcacacgatatttgaaatgctaacgaaaaaaattctcgccgaaaaaatggctatctcttttttctcttggggatttgaccgcaaacttggtaccaacatttgccttctctagtctggctctaccaaacactcacacgatatttgaaatgctaacgaaaaaaattcttgccgaaaaaatggctatctcttttttctcctggggatttgaccgcaaacttggtaccaacatttgccttctctagtctggctctaccaaacactcacacgatatttgaaatgctaacgaaaaaaattcttgccgaaaaaatggctatctcttttttctcctggggatttgaccgcaaacttggtaccaacattttccttctctagtctggctctaccaaacactcacacgatatttgaaatgctaacgaaaaaaattcttgcccaaaaaatggctatctcttttttctcctggggatttgaccgcaaacttggtaccaacatttgccttctctagtctggctctaccaaacactcacatgatctaggataggtctacgaaacacacacacgataaatgaatggcta

SEQ ID NO: 42408 - DNA, 1080 bp, Heterodera glycines
  unsure (1)..(1080): unsure at all n locations
tcctcccgtaaaagnnttggtccgttcggtgcccaacactcatctaaccatcggnacatatgagntggttgtgtacagtttcctctgggcattgttgaccaggaacagcagcaacaacactgccaccaccaccctcaaaacgcaaccgcccgctgccgccgcctgctgaaggaggaagaggaaaagccgatgatgcaaacaaaaagcaattaattactataattaatcatcatcctctctctccatttctatgtccatccaaccattcatttgtttatttatttcatttcaatttgttttaattgtcttgacaaattgtgaatacacactcgcgacatattaaaaactcgctaaaaaaccacaacaccgccaccttttactttagagcaaaaaacactgacatgagagaagaaataaaaaaatgcctggatttccgacgtttcctttttgggcgtcagaattccatccccggtgaacatgacaacaacaaagggtatagatggttttcatcaagtatttgattttttccaaaattttaagaaaattaatcgggcgttaaaactcatacacagatattgtagagctcaaaaagagctttcgaatgaactattaatttatggagaaggcaaatttaaagttttatatgattttttgaaatttttgatctgggagccctgcttatagtattacattgttagcttttagtctctaataatttagaatggaacgtaattggagcagatgtgctgtgtttttaattattaaattaaacactcaaaaaaagtttttttttgaatcaaactttttttcaaatatatccaaattaataatagttcagttaaatttttataactattttatttaccctgttgtttttaaatgtttattaattaaattatacgttgaaattaagcgtgctgagtcgtttcctaaaaaccgccacccgaagtgaattaaagacaataaatataaaaaatagttattgttatacaacatttataataaattaatataaatctctgtatttttaaaagtttcttattctttaaagtgttcaccaaaaacatgaactgtcaagca

SEQ ID NO: 42409 - DNA, 959 bp, Heterodera glycines
attttcggcactctgataattttagcgttcataatgtcgatttataaaggcgattgtagaaggaattggatgcgctaaaattgtttgagaagctttttgagcgtaattacgatttttacttacaccattttttgctaggcttagatcacatgcgattttcggcactctgataattttagcgttcataatgggatgtataaaggcgattgtagaaggaattggatgcgctaaaattggttgagaagctttttgagcgtagttacgatttttacttacaccatttttttctaggcgtagatcacatgcgattttcggcactctgataattttagcgttcataatgggatgtataaaggcgattgtagaaggaattggaagcgctaaaattgtttgaggagctttttgagcgtaattacgatttttacttacaccattttttgctaggcttagatcacatgcgattttcggcactctgataattttagcgttcataatgggatgtataaaggcgattgtagaaggaattggatgcgctaaaattgtttgagaagctttttgagcgtaattacgatttttacttacaccattttttgctaggcttagatcacatgcgattttcggcactctgataattttagcgctcataatgggatgtataaaggcgattgtagatggaattggaagcgttaaaattgtttgagaagctttttgagcgtaattacgatttttacttacaccatttttttctaggcttagatcacatgcgatttttggcactctgataattttagcgttcataatgggatgtataaaggcgattgtagaaggaattggatgcgctaaaattggttgaggagctttttgagcgtagttacgatttttacttacaccatttttttctaggcgtagatcacatgcgattttcggcactctgataattttagcggtcataatgggat

SEQ ID NO: 42410 - DNA, 1003 bp, Heterodera glycines
aaaaaaaaaattaatttatgtgtctattttcttattaaatattttttttactttcaaatctataagatttatttaaatttttataatccctacgaacatttacaacccttctcgtaccccaggcaaattcattttgcgatgtcacgtatatatttattgttcgagcattttttctccctatactttaaaagtatgaaatgatctactaattattatatattttttcctattttttccagttcaaatcggatatttagtctagtatttttattcgcaaccattctttgatattttttcaatctctgtattaaaaaatgataaaaaattatctctttcctcaactaaaatatctttaaatccgtgcaatgaatcaaaatcaacatattttatactgtttttttctttcttttcattaaataaaaaaatttttactaacagaggtaaaaaactacttttttaggattttcttgtaacataaaattttttacgggaacgagaaaaaggcgggaatccctttcgggaatcccgccccattctttttcgtttcccgttgctgttccccgaaaaattttttacaggactctatcacaagttctttaacaaaaatgtaatgaaaaaaattttttgacgcatctcattttttatcgactgttcaaaaattttcaaaatttttccacaaaatatgttattttctttcttgataaaatttgatttttgaaattttatttatgggttaatacatggaaagcaataaatgtttaatgcgaaaaaggggaaaacgggagaccaaagaattggttaatgaaagtttaattctttttacaaataacaaaagattaagaaatttttatttttttccaaataacaaaaaaagataacaataataaagattaaaaatataatgccaaatgtagcaaaaagcttatacaaaatgaaaatagaaaataaaatctggtaaaaagtaatataatatttgcaaaaaggaattttaataaaaaataat

SEQ ID NO: 42411 - DNA, 952 bp, Heterodera glycines
  unsure (1)..(952): unsure at all n locations
tgctatttcactctgatcagtaattaatgatcagctactcttcctgagagaaaaaattccaccctgctgacctactatacttactgttgatcagataatcaggaaaaacgcacccgacgagtcggcaacatttgccgtcactccgtctgtgccattgttgttgttgctcgtgatgccgttggtgccattattgtgttctgttgtgccgttgttgctgcgcaacattgtcgcaagtgcagcagcccgttgcgggggccataaggcggcagccaacaaaagttgttgttgctgctgttgttgctgatgaaaatccatggcgcaaaaattgctggaaataatttaaattgaaaattttaattaaataaaattgaaaattgcttaaattacatggaataaataatacattaaataagaagaatatgaagaatagaaaattttacaattgatttaattattatgacagcgaaaaaagttgttttattggaatttaagaaaataaaggttcaccatttttctagggggggggggcttatgccagtaaatttttgtaaaaatttcgtcaaattcacccgaaaaggattttcatgggatttcgccaaaaaaaaaaaattctcaaaaatattagtttcaagaaattccttaaatttatttgcatcagttttattcatttcgccgattattgcttctattgcagggaaagtaccaattaagcgtaaaaattaggaaaaatgtgaacaagttaagtttttttaacgaaatgggtcataagatttccaaaaaaaaaccccaaaaattccccagggtataaggttcagaaatatgaaaaaaattccccatcggttccgtaagtaaaacgcgccacaaaaanttcgggggaggggagcacaaagtatgagcagtagcaggcaagctgagctgagctgnagaggtggtggttccggctgcacgaccc

SEQ ID NO: 42412 - DNA, 655 bp, Heterodera glycines
aaataaattttgttttttttccttttttccgatacgagaaatacgagaagaattgattttgacggacagcatatggaatagtaatggaccaaaggtacagtctaactaaatttataaattattgtaatataattgccaaattaatagtacataaaataagtaaatatattttttacatggatcccaattttaaatttgagaaaatcagcgaaattaaaaaaaatatgtttaaaaatcaaaagttaaaaaaaaattggaatttgaattaaaattgttgtaaaatttatactgtctataaatttgtctaactgtctaattcagacaaatcttaaatcagtacacttggtagtcgttatttattacttaaatatataccattttataaatttattttttacagggctcccgtttttttttaaattcgggacaatcgcttaaaaaattcagattttaagcaaaaattcaattttttttttcaatcattttttacctttaagaaattaaaattggtagaatttttgataagacagatcagtacacttggcagtaaactgaatatttattctttcaatagtccagaatttataaatcttttctatacaattttaaatttaagctcatctcattaacgaaaaatatcatcacaagaatttcg

SEQ ID NO: 42413 - DNA, 828 bp, Heterodera glycines
ggccctaaagttatggattgagctcacaattaaggcacctaatagcgcaaaatggcactgaaaaaaggcacaaaaatcccgacttaggcatgaaaaaaggcatttaaatttttttattaatgatttttagggagtaaaacacgtaaaaactaaccaaaaaactaaattttgctgatttattgataattcaattttataatgtttttcaataaggaaatttttaatcaagaaaaaaaatgaattttggcgttcaattcgtaaaggtatattctctgaatttttttagatcatttcttaggggtgtatttttccgatttttttgaatttttaatggaatttttcgggaaaaaacgccaaaaaaggcaccaaatcgctaaaactaatctttgtggtttttttagaatcaaggagcaaacacatgttttttggctgccttttctatcattttccaaaccgtgattgttgttgctgttgtgccaatttgttgggatgaatgatcattgttgttgctttggcacatggctgtgccgaaaatggcattcgaattggtgggaaacgcggaagcggatgacgacgatgatgaggaggaagatgatggcagattgaatgatgccaatgaatgaacgggcgcagactgttgattgcctatgtgaaatgatgaggaaataaaattattaaaaaattgccataaattaatttgaatttataattttaaatcaaatgattttatggaaaattacattacaaaaaagatttagaaaaaaaaatatttccataaaataaaaaataaataaatggaaaaaattaaatattttatcaaaaataaaa

SEQ ID NO: 42414 - DNA, 1264 bp, Heterodera glycines
tctagagtcaaaatatactggcgtccaaagtgctccacacaaaaatgacccccctccactcccccactaataatagacaaaaaaaacctgctgattctgctgattctgctgctgaaaaacctgatgattctgctgattctgctgctgccgctggtactgctcaatctgtgcccgagtccgtccgcccactgtgtccggaataagctccgaaaaacgttcaccctcaccaccgccttcgacaagcgcctcgttaatccaagaatacattaaagtaatttccgctgaactttttaatagggagagttaggtatattgagttgtgtctcataagtagtaacgtttttttatacttcttttattttttgcatgagtgtgtaacagacaaacaaatactcaatattccccctcattgtttatgatctcctcccaatgggggcccatattcaaagatcaataacttttttttaatggacgaatttcgctgattcgacaattaaggaaagggctcgaaatgatggatagcatgcaaccaataaaatataaaatcttactaaaacgctacgaaattatgagaaaatcccataccaacctacatatgtgagaaaatccgataaatttattgaatggtgaatcgccaagagctacataaagttaggcctaaaaaatagggacatcgaccggatatatagcatttgccataaaacgagtctaaaatcttcttcggattgactgtatgtatggcgcgtcaggaaattcaaatttaaatttaagagccaaatgtcattttatagtcacaaataaattgacatttccattgataggctatttttctacaacttgatttttctgaacctgtaatattgtggggtgaggaacacaaaaataaagaattttaggaaaattggtcaattttgaaataatccatcccctgagtttttaaaaaagtggaattggttcaatccaccccaccctgtgacactaaagaactcgctttatgtggtttgtggattttatgatttatttaatgattcaatttcgccgctgtttcgtttatcgtctggagcctagcttttataaaccgaaaacctgagaaattttattcagttttgttccgtgaagcgagaatgtccgttatcaaatcgataaacaaatgcctgtgtcatttttgacactaactatgtacagtatgtattcaaaatccgagtcccgaatcgaaaaaaatttagtcaatttttccaccattcgatatactctactcacaatc

SEQ ID NO: 42415 - DNA, 636 bp, Heterodera glycines
tcaattttctctgttaattttaagatttgaaaaagccctttatgaaattatatggattttttatattgattttttacccttgtcttttaggcacaaaaaaataaataattaattatgcgaatgcagtgaagattttaataattctgtcaagaaattgccaacaaaaatttctcccacaacgcaacaaaaaaaaagaaaattaaagaaattttaaattaattaaaataacactcgttcagcaggtgaattgaaatcccaaaaatggagtgaagtttcttaaacacaaccaaattaaatataatcgtggtgtcattgataaagaattattgtaatatattacaaaaatagataaatttaaaaaaatgttagcgatttgacgctcaagcgactccaaccgaatgcgaccccttcggccatatcagctgcattcctgcagagtagagagcgggtacggaccggattcgtatacggatttttacggatccgtagtccgtaatccgtatttttttgggccgatacggatttatacggactacggattttccggatttttaattcgtaagtccgtaatccgtatcgatatcaagtccgtatcctgatcctgatccgtataaaaattatgctacggattacgga

SEQ ID NO: 42416 - DNA, 997 bp, Heterodera glycines
aagtcaaacaattactcggggagcaaaaatccaacgcagaattaacgtcccggctatagggaagctattcccgaaggattcggtctccccataaatctgggcgcatcggttcggggggactcgccccgaaaacaaaaaaatcgattttttcaagtgtccgtttggggtactcaaacaattatggggagcaaaaatccaacgcagaattaaagtacagactatagggaagctattcccgaatgattcggtctccccataaatctgggcgcatcggttcggggggactgccccgaaaacaaaaaaatcgattttttcaagtgtccgtttggggtactcaaacaattatggggagcaaaaatccaaggtaaaaataaagtagaggtatatcgaagctattcccgaaggattcggactccttataaatctgggcgcatcggttcagggggactgccccgaaaacccaaaaaaaaattttttggataaaaattatttaaatgaactgactagataatatttaaaataggttatttctcttcctttcagtatccctgcaaagtttggtgcgcttctgatcagtttctgaaaaaaaagttaagcctaaactttttggcctgtttaaaaaggaattaaaaatttttaaaaattttattcatctccctttttgatagaaaaagcatcagagtgcctaaactaacatgtaaataaaatttggtgcgtttcagaaccctttctgaaaaaatatttaagaattaattttgcaaaaaataaataaaaacgaaagactcagattttcgaaaatttttttgagccagctagctcggcgctcatttcagtgtaagttagtcctttaccggggagtatccctgcaaagtttggtacgcttctgctcaattagcaaaaaatatgagtgatcgaatttacactaaaaaagttaagcctacattttttggcatatttaaaagcaattaaaaatttttaaaatttataatttcctgca

SEQ ID NO: 42417 - DNA, 1266 bp, Heterodera glycines
gctaactctaagggatataagtgcttaatagcacgttcaataattgatttttccgaaattctgactcttgcggttcgttgtgataaaatttcttctattttccccaatttccaacaatttcttggagtttgtggttcagaaatgatcaccacgtccccaagttttggtgcttttcctggcgtgtgtttgttcccttgatgacgttcccttagacccaataaattggaatctttccaattttgccaaaatttttcagccatattcattgccttttggtaggtttgtactagattggcagtgttggagttctcaaaaatatgatcactgtctaagttctcaacagatctagtgtttatttccaatttatctttgccaatgttgggtaaaattaaatcaatcggtcttaagggctgaattggatttttcatgcagctttgtatggcaaacacattggttgatgtgttttcttgcttctcagacgtggtggttgcgacttgtcctctggccattagtttccgtttttcacataatgctgggtgatgtccggtacgttgacaaagaaaacattttctaagttttcttggacaatttcttgccatgtgattattgaataggcaaatgtagcacattgcttttgcttctatttgttttcgcctgttcacaattgaactaaatttgtcacaatctaaagcgaagtgtttttcagcacaaaactggcatggaaatcgcgacggacttctgcttcgactcgggcttgggcttgatgaatttgattctcttcttcgactttcattgggccatggtgaaccgggttttcttcccggagatcgtccgtatcggctcgattgtgaggatgagcgtaagcttgatccttccgatgaagttgaagttccacgccatggctttggcttaacagcacccgatgattgtcgattatcctttttctcttggtctttgtatctgatagccaagtttaaggttgattccttttcttcactcttatgcttctctcttttggatgtgtgatgagtctgttcgggattagccctttgaactatgtcattgatttgtttaagctgctcaacagccgctttaaatgtttccctaaataggttggttgaccaatccgaaccatgaggcattgtactcagcttgacgttttttaagtctacatatctggtcaacacctttttggacaatttctgttccagactcatataaatttaaagggaactcaaatcctgattataatgctcgagttgtcgg

SEQ ID NO: 42418 - DNA, 1353 bp, Heterodera glycines
tcccttcccttcccttcccttcccttcccttcccgtctcattttgttgttttaaatcagctgaatatatttcgcttttcagccttcgtaatatcaagttttgtgatggttggacaggcccataaccagataaaaaattgttatcctaaagttgtcatttagctgtttccagcaaggttttctgggcagctgattacgaatatgttttacacagcatccataaatacaaatttcctcaaataccagggttagggattcggaattgggtcttattcgtaaatagtagcgatcctgaataattctgaggatttttgattaatattgaaaaactcatacgaagaaaatttaaatttaggagaattagaaattgcagcctaaccaatagtttttcatttcaatattcccgcttaccccccattagttgcgagattaggcctttgactatttacgagcctgtgattgatcaatttttgtgattttttgcctcattgatcattttcatgcttgtaattatgacaattaagcagcgttttatatcctgcctttttccatgtgtttagtataatttacttttggttcaaaaaattgaatttttatttaagttggcggtttaataataaatttatttaaacaattaatggcagcggcaacaacaacaatgccgtcattttattttcacaaacatttttttcaacgaatttttcctggcaaaccttttttcgtgcaagtattttcggcaggttaaaaatgccaatgaaagtgtaaaatcaaaaaaaggtgaatttcatttgaaggcgttctcgcagcaaccggcgacattttgtgccaaaaattcattgaaaagcgcgacaaatgggacccatttcgcacgtcgcgctttgctctgacgacagccattgtcattgtatgtttagtttaagggtacttgcctagtttgcaggacagattccacatacattttcaaatgcctatagatgtgtttttgaaattaatgaaaataagttttaggggatttttagggtcgctgattcgaacaaaaataaaattaaacctcgccaacgtgacccttgacaatactgattttgccgttttttttcaatgcacttttatttaggcacccatccaatttcattggtttcgcttcatggaccgacgtattggcaaccccaaaagggagggcccggctggcaaagtgacccttcagacggggctcaagcgggtgctggtggatcagagtctgatcggttggtcaaccgttgggagactatttgaatttggtgtccttttgttgacagtgagacatcaaaagtttcacagttcgaattccttccatttgtttttgaaaatgaaagta

SEQ ID NO: 42419 - DNA, 898 bp, Heterodera glycines
tggactcatcgctcggcagagaaaatgaggcacccgccccaagttcgagacggttagattgcccccccccgcctcctcagctactccggaaagccagaggactggacgaccttttggggctacccgacatttgaggatttaaaaaaaatttggacaaattttacttttgattttgccagagttaattcaattttgtgaaaataaaagtatttttaaaatacctaactctgtttccgggtcaacagcgaggaggtagcagttaggagcagcgatcacaattggtaaaaatcaaaagcaaccgttgggttcatgagaaagcatttagaaaacagaagaaagaaaatatgagccaaagatcggaattatataaaaatatttttgcttatatgcatttaagaaaggagctcaaaaaattatattttttcatttcagtgtcgttaacaaaaaaaaaatatatttttggaaaaaaatattgcaacacagacttatacgcaatgatttgaaaattgtgaccgatcctatttaaaaatacatttatttttcacaaagttgaattactctggccataattaagagtaattttgtagaattgggctgaatacttaactgtttatattttattttattttttcattaaaatcccccagtcgttttgtacccaaaagtagagtctccaagttgagtatccgcacaagtctcttacacgcttcgagttatacttccatcgagtccatcgtcgataaggcatcccatctatggaaaagtagtttctcctaaaatagtcacgtggttccgaagtccccaccatgaaaattgtgacatttctaagaaaacttccatattaagtatgtttttagtggtggggagaggtaagtcgacgcaaaatcattcaaagagt

SEQ ID NO: 42420 - DNA, 1045 bp, Heterodera glycines
  unsure (1)..(1045): unsure at all n locations
ttttattagtgtaatacaatatattaccattggattgtcccacataaagctggaccatgctggaataaagaatttagaagtgattattcaaaaagatgaaactcaaatcaatttggatcactgatgagaaaaaggggttggtcaattgttcaaataaattcaaaataacttaattcatcttatttctgagaatttttttagggtttttcgatatttttttgaattttaattcactttaaatccagaaatacaatattaaaaatctcaaatttaaaacaaattttactgcctccgggatgccataaaaaagctattttttagcacccaaataatttttaaaatttttatgtaaatattaccgaacgagttttgagggaacacgtgggcctggccgaggaacggaaatgtgtccgggatgttgtaaatgccattggaagtgcggatgaagcgcaaatgggtggaagaaatggcaaaaatacgccaaacaacgaaaacgagcagcacaaccgcaacgaagaacagaagcatttataataatgataattataatataaataaaaatcgaaattattaaatttttaaatgtgaaaaatcattaaaatcatattcaatttatttaaaactgatcaaaaattaaatcgaatttaataacattaaaatcctcgtcggtaaataattttaccctttttacagaatgttcattttgaatttaaataagaattagtttattaaatttaaaaaaaaatttttttatctataaattggcatttaaaatatttttaataatttttcccctcatattaatgaatgagtcttaaaataagacatagcgaaaattgaattaacgttattttggcgttgtactgtttttttgggttaaatccattaaaaattgttgtaaaaatggcattgcccttccccaagcaacaaaactaatttttgcgcagagaatacgtcaatttaaaaaaaattaaaaacggaaaatgattgtgtaattggcgaatggtgggcgaaacttgctcccccattttttgttgcaacanaa

SEQ ID NO: 42421 - DNA, 1572 bp, Heterodera glycines
tctgaaacgcaccaaattttatttacatgttagttcctccctctgatgctttttctatcaaaaagggagatgaataacatttttaaaaatttttaattcctttttaaacaggccaaaaagtttagacttaactttttagtgaaaattcaatcactcatttttcgagtagtgatcagaagcgcaccagattttgcaggggcctaaaaaggtcaaggaaaggcgtctctgcgttgatttagcagtagtacctatgaatttaaattttctatgaatttttaaagttttttgaaatttttttaagtgcaaaagtggtggtgtctgcaaaaaattttcaccgggtttaaaaaatctaggaaaattagtaagcatttgtagtgttccgatacgtatccctgcaaaatttggtgagcccctgatcaattacaaattatttatggacgatcaaatttttagaaatttttatttatttttgcataattaattcataaatatttttttcagaaaatgctctgaaacgctccaaattttaatttacatgctagtttaggcactctgatgctttttctatcaaaaagggagatgaataaatttttaaaaattttaattcctttttaaacaggccaaaagtttaggcttaacttttttttcagaaacttatcagaagcgccccaaactttgcagggatactgaaaggaaaagaattaacctgttttatcacattagcttgtcatcagtttttataaaaaattttcaaaattctgagtctcctattattttatttttttttcaaaattttgaagggcggagggggggcgaaggcccaccacgaggccgcgaagcggccgagtgagtacctcggtgcatgaaaattattaaggaagagagttcattatttgtttattttttgcataattaattcataaatattttttccagaaaatgctctgaaacgcaccaaattttatttacatgttagtttaggcactctgatgctttttctatcaaaaagggagatgaataaaatttttaaaaatttttaattcctttttaaacaggccaaaaagtttaggcttaacttttttttcagaaactgatcagaagcgcaccaaactttgcagggatactgaaaggaagagaaataacctattttaaatattatctagtcagttcatttaaataatttttatccaaaaaatttttttttgggttttcggggcagtccccctgaaccgatgcgcccagatttatggggagaccgaatccttcgggaatagcttccctatagcctgtactttaattctgcgttggatttttgctccccataattgtttgagtaccccaaacggacacttgaaaaaatcgatttatttttgttttcggggcagtccccccgaaccgatgcgcccagatttatggggagaccgaatccttcgggaatagcttccctatagtctgtactttaattctgcgttggatttttgctccccataaaaatttgagtaccccaaacggacacttgaaaaaatagattttaatagttcggggcagtccccccgaaccgatgcgcccaga

SEQ ID NO: 42422 - DNA, 934 bp, Heterodera glycines
caaattttaacgcatccccgtgcccccggtgtgcattcggccgtcggtggtgtccaatctgaaggcgggctccaacgagggcgacttgaacatgaagttgacggagataaagctgatcaatgacatcctgaagaagcacaagcgcagcggggcaccgataaaaccattgccgaatcgtaaaaattttcagtttttggtttttcaaatgccataaaatttttcctcccctcccctacttgtccacctatgtcgtgcactacacactgcccaatgttcaacaaataatccgttttaagaaccgcttaaaaatattgtcgatgtttttttcactcaaaataatcgtattactcgacagaaaatttaaaaaataaattttatggattaattttaagaagtggatacttttttttgttaaattttacattaaaaatctaaattatcttagatttataggaattttccgtggcggcgcctgctggcccgcctgaccaaagccaaattgtgtggctaggctcatgtttttaaacgcataaaaatcccaaaaagggcatagaatcctaaaaatactgataaggcaacaaaaaaagagcatgaaaaactaattttaggttttctgttaacagatgtcaatggggccaccctcattcaccatgttcggtgatgcattattgtcactgcacagatcagcaccggtgggttgtgtactgtttgcaatacgactcggcagaactcatgagaactgcgtcttccacccgctgttttacctcccagagattttttttttaattctagaacagaaatttttaatcatagaaagttttttataagaaaattcaaaaaaaattttatgttgaattactaatttcttatgaaaaaagactctaagatttctttatgaaaaatttctatttgggaattttttaaatttctgaat

SEQ ID NO: 42423 - DNA, 1241 bp, Heterodera glycines
cagatcagtcttctgtcaatgcatttcggcgctgagcaggtgaacagacgcatctacggcttcaaaggccgacttttttcgcaaccattgccaattcgttggcgactgaatgcgtctttttgggacggtgcgtcgcattcggtaggcattggcatactgtggattagttccccttaattcttcacaataagtcaatttttgttttaatagctctacaacacttttttgcacacaaagaatccgttaaatttggattgataattaatgttttataattgccctttatctctcaaatttagccaacggatgccatcgaagcgtgggccgaactcgtggaaatgatgttcagcaatgtccgcgatggtctgtcccatttctcatttgacggtttttgacgaatttttaggcattgccctttcttttaaaaggcaaattcaatataaattgcaattttttggtgggttttcgttaattgcccatttttcttaattaggctattacgcggaggtgcgtcgaaggcgccggtgcagcggcggcgcctccggagagaccaaaagtggccaaaatgaaaagatcataaaatgaaacacatttttttcactttgttgttgattaagagaaaacgaaatttttcagagaattttacctaaatttgaagcattccacggattttcgggtttcaagtcaatacggcacaaggaaaatatattaatcaaaatgctaaatgatggaaggaatccggactactgcttgagaaccaaatgcacaatttatgaatccatttttaactgaattattttttttctatatatttagtacttttcgtaccttttcaaacatattcatatatagaaatttctaatagattaaaaaataatttttgaatggtgccgtttagaagctgttgacaagctacttctaagcgattgaacaacttataagaagttgcaacatgaatattgtaaaaaagtccgaatttttgcatgtttttatttgtaacttttttacatgtcggtatatcgtcgtgatttttggaaagccgatagatcttgttaagctttccaataataccaagtttgttaaaatggtcaacaaagaaaaaagttatgattagggcgaggatttttagtggcaaaaaatcccaaaataattaactaaatagtgacaaaaaaaatggcaaaatagtggtggcaaaaatagaggcgaacaagttccaaatttaggggtgtaattttttaaat

SEQ ID NO: 42424 - DNA, 1211 bp, Heterodera glycines
  unsure (1)..(1211): unsure at all n locations
gcagaaagccaaaatgaagtgatcatcttagacttctcgcgaaaagcaggatcagtgttgtaagcctaaactactaagaaaaaaaattantcatctgaaaaattcaattgacatgtgtgaggccaaggattctgatctgcctcttcatgttgcggacaaggtgaaaaaaacagtagcggacactgcatgccggaagcactgtgcggaccgcaccgaccattgccaactcgaagtccatcgaaattgtctgcggcgcgaaattcggacatcgttccaaaagaagctgtaacatgcgcgtataaattgcggcacacttcgatgttaaaagacagtagcaaattggaaatacccaaccatctctcctaaaaagattgaacattgtgataacacaattaactttactttgccaacaacacataaatttggctgaaaagcgatggcgtcaatgaaaacgtgccgtccgcgtaaatgtaactcatctgatgggcccaatccgccgtagaagctcttccaaaaatgagaatccttaataccggttcaatgatcagcatttaatgtataaatgatgtctcaccgttggggtccattctgtccttgaatttgaaaaacgccggtgcccgccaatagaaattgttcctcgtcaatttcagttcgcttgtaaatacgataggtatttggaatttacaactgctccaaattgagaggttggactcgcggtgcattttcatcacggcgcaaacgtttgattacctaaaaaagaaaataatagcaaaattgtttttggatataaacccactttttttgtggcgtatctgctcggaaaacctgataacacaggtgtgcatgtgttttgcagcacttgagcccgtatagtcccacatgcttggcccgtttcagcaccatgtttaatgagtccaggggcattcggccgccttgcggcatcaggacgggcgattcgcgcccgttttttaattttttgggggaacattcggccgcttcgcagcctcaggacgggcgcttcgcgtccgttttttaattttttggggggaattcggccgcttcgcggcctcaggacggtcgcttcgcgcccgttttttagtttttgggggacattcggccgcttcgcggcctcaggacgggcgcttcgcgcccgtcttttaattttttggggggaattaggccgcttcgcggcctcaggacgggcccttcgc

SEQ ID NO: 42425 - DNA, 1306 bp, Heterodera glycines
  unsure (1)..(1306): unsure at all n locations
cccggcaggtcaaacaagctctctgatcctccgcgacgagaccggcaccgcgatcggcgccgtccaaatacaccctaaagccctcgacatgatctgccaccagcagtcggaagcctggctacgttcctaccacatcgaagttttgtcggtcaagcggtgccccagggccggatcctgtcgtgacgactattgcggccttgtccgtccataaacacccgtcccgtaacttaaatcagtccaccgatttcccggcaataccttctgtcaagactcaaccagtttttgggggaatgattgtggtctccccacctcggcctgtctctattaccggtatttcgccaggccgactagcgcgcgaacattcgagctgatcagttgcccatcctggggagtgcagctcgatattcatcttgagatggagtcctcaggcggccaaactcgacagatcggcttaactcttcaccccggcatcaccacccattggggaaatttttccctcacccccctcgccatttctcttccccccctcccgactctcggatcgaaattcgtgacagacggtcgctcagctgccatcgccgatcgcctaccgacagacctccattgcttcgacgaaacggcagccgtcgattttaattgttctgtcgatggacacctgccaagaatgcttctccgatcactcggcaggaagcgtcgaatgccactgtagggatctcgaccttgactagctaatggaaaacccagaactacggctccccattacaacggcccgagtccgacttcataaccggggcccggccatatttgcgacacacgcctattcgccggttcagctccacctcgtcatggaaaacgtcacaattcagctccaactcgccaagtcgctgtgtcgaatagaacagcctaggctgattggatgcttcagctgctcgacgggggcacaattcgactatttttgcccctccgatttcgatcagtcgttggccaccgtttcctgcactgatggccaactctttgtcgttaactgcgccccgactggtaccagggggaggcaaattttgtcttatgaccattccaacattgccactgaatgtgtattgagatgccccgcaggggaaacccgattttggctgaacggaacactacagtacattctcgccgccgccattgtcgcggcaattgctcttattttgttcgtcaaattttcgcccattttcgccacttatcgtctaatttttcgaaattgtgcgggagtactgcttatcccgtcagtcaccccccaaaattgtcgntcgaattaacatgc

SEQ ID NO: 42426 - DNA, 1066 bp, Heterodera glycines
tcaattcctgagataggtaacactgggtacaaaaatgaccccccccgaaaataaggacagaactcgttcaaaaaatcacaactttcaagccggacaatcaaatctttcctttgaaaaagtcattgcttgccttttattggaaattggccttttttggtctgttaacaaatcagttttccgccggaccccctcccctcgcccgttcaccagaagttttatggaaaaactgcacccgcaaaaaattgttaaaaatcttattgtttgatcccgaatgcactgaaatttacgattttgcttatttcctccccaaaaatcgttaaattcgacaatcggaggcgaaaaaaataatacattattgatcgaataattttaaaaataaatctgttctgtttttgaaaaattgtcgatccgagccctgggtttaacgactttttaaaattttcatttttttcgaaaatggggggaacaaggtaaaacaattcagggggatgacaaaaaggataagtaccgtatgtccaacggtttctgtgatgacccgctaataggggacgaatgtttaaacgccaaaaaacgttatgccatccaaatgtctacgtcaaacagagagagggagggagggagggagaggaccaaatttcagttaataaattgacacacgcttaatgaccatcaattcaatttatttcggaacacagatggaaataaagtgataatacacagcaaatgatatatgcatacaaatgtacaatacatcaataaatacagatcacgattatgagacatcttctttatctttgcataaagtgaaaaacttttaccttccaatgggtttttcaaattttcaaaaaattcacaaaaattgtatttcatttaaatcaagtccgggcttcgcaattgtcaaaatgaatacaatattcgtgatcagcgactcagaaaactgacgaatacatattttcatttattcaaacatagacaaaatttaaaaacctgaccctggcgccaaaacgtgggcgccaaaacgtcggcgccaaaacgaccttggcgccaaaacgtgggcgccaaaacg

SEQ ID NO: 42427 - DNA, 665 bp, Heterodera glycines
ttcaaattttacaaaaagtagagtttcaaataagtaaaactaatttttttttaaggggggaaaatttatcttttattattattgcccgggtccgggtacccgaccgggtcccagaccttgatacccggttttttcaataccccggacccgattttttgaaaatccaatactcgctatccgacccagtcaggtctgggtacaacctggtccaaaagtatactggtaagaatggggtattgttcgatttgttgatcaaagtcgcggaaagaaaaaaaaatacaaaaaaaaaattaatgtttattgaaaatatcataatttatcaaacatgtggcatccgtcagtggacaatccgtcagtgaaggacaatccgtcagtgaaggacaatccgtcagtaatggacaatccgtcagtggtaatggacaatttgtcagcaaatttttttagcaatgatcaaaattttgcaaaaatgattgttaaatttaataaaaataattattaatagatttttaacatttctaattactttatagtttaattaattgaccatcgcgagaaattatcatttagttctttaaaaatgattattcataatttttataaaataatacaaattattagccaagcttttttagcgacttaaattaattttcacatgattttaaata

SEQ ID NO: 42428 - DNA, 853 bp, Heterodera glycines
  unsure (1)..(853): unsure at all n locations
ttcaaaaaattgnatcgtccataaataatttgtaattgatcagggggctcaccaaatttttgccgccccccccccccccccgctcagagcacgacatatatttcaacaaaaaatttgaaaaattgactagagaaatcgtacgctaacggatgacctaatggaaaaaaatccccgaaggagagaatttaattaaatccattccttcgggggtccgtgccgtgtgccgcggggtaagcagtgctggtttcgtttcatcacggcccccatccttttgactagtcagctagcgttgcttaacttgtcagatcggacgggtacgcatgtttccacttttccaagcaccccaccgaaagttgaacgaaataaccaaaatataaggaaaaatttaaaaaattttttattctttagccttattcataatataagcctaagaggaccttgttaacatgtaaataaaattaggtgcgtttcagagcattttctgaaaaaaatatttatgaattaatttttcaaaaaattggaaaagtacgcaaaattgcaatgtctaaaatttttaaagaaacattatgggacagttaaataattatatgaataagcattcttctcagctgttaccctgcaaaacctggtgcgcttctgagcactactcgaaaaatgagtaaattaattttcactaaaaagttaagcctaaactttttggcctgtttaaagaggaattaaaaattttaaaaaattttattcatcttcctttttgatagaaaaagcatcagagagccttatttaacatgtaaatagaatttggtgcgtttaagagcactttctgaaaaaataattatgaattaatttgcaaaaa

SEQ ID NO: 42429 - DNA, 202 bp, Heterodera glycines
tttcttgaaatttctcaagaaaatggtccggctcgttctcccctaatagtcatatttggtagcagtccgtttccgccctcatggaaaattaaaaaaattcaaaataaaaattgttgaaaattttcagagatttaaaagcatattcaatgaaatttcttataaaattttttttaatttatcggacggggggggggggggagag

SEQ ID NO: 42430 - DNA, 945 bp, Heterodera glycines
tgctcagcagtaataggaattccaaccgcatcctcagaataattacgccgatactaattgttctggaatttgtttctctgcgcgtttgtttgggaaaaatttggaaaattggctatctctttttctgctcaacagtaataggaattccaaccgcattctcagaataattacgccgatactaattgttctggaatttgtttctcggcgcgtttgtttgggaaaaatttggaaaattggctatctctttttctgctcaacagtaataggaattccaaccgcattctcagaataattacgccgatactaattgttctggaatttgtttctctgcgcgtttgtttgggaaaaatttggaaaattggctatctctttttctgctcaacagtaataggaattccaaccgcattctcagaataattacgccgatactaattgttctggaatttgtttctcggcgcgtttgtttgggaaaaatttggaaaattggatatctcattttctgctcaacagtaataggaattccaaccgcattctcagaataattacgccgatactaattgttctggaatttgtttctctgcgcgtttgtttgggaaaaatttggaaaattggctatctctttttctgctcaacagtaataggaattccaaccgcattctcagaataattacgccgatactaattgttctggaatttgtttctctgcgcgtttgtttgggaaaaatttggaaaattggctatctctttttctgctcaacagtaataggaattccaactgcattctcagaataattacgccgatactaattgttctggaatttgtttctcggcgcgtttgtttgggaaaaatttggaaaattggctatctctttttctgctcaacagtaataggaattccaaccgcattctcagaataattacgccgatactaattgttctggaatt

SEQ ID NO: 42431 - DNA, 949 bp, Heterodera glycines
accagccaagcgaggcggcccgccaccgacacattgccacgcagcagccatacacagggctttcacacgtgcagcactgagcggtataccacagctccaacgtatggaagcaccccaaaagcatggctcgtgaggcagctgccccgtaatgttgggcagcgtccacaagtcatctcgaacgacctgtgcccatcagcggacgggggcatttggtggtgccaacgctagcccaacaggacagcaggtaggtggtgaataggaatcacttgggtaatgatccagcagcaggttcacctacagctaccttgttacgacttttgcccggttcaagccactgcgattaaatcggttccagtctgcataccgaccgaagccggaacactaaccgtccccgaatttctcgaaatggctcagtcccgggcagcgacgggcggtgtgtacaaagggcagggacgtattcagagcgagttgatgactcgcccctacaaggaattcctcgttcacggacaataattgcaatgtccgatcccaatcacggcaaattttcaccggtttaccaacccctttcggggaaggacaagcacgctgattttgccagtgtagcgcgcgtgcagccccggacatctaagggcatcacagacctgttattgctcaatttcgtgcggctgaacaccgaaaatccctctaagaagttgtgcccacagaagcaatgagccaactatttagtaggctagagtctcgctcgttatcggaataaaccagacaaatcgctccacgaactaagaacggccatgcaccaccatccaccgaatcatgaaaaagctatcaatctgtcaatccttacggtgtccgggccgggtgagtttccccgtgttgagtcaattaagccgcaggctccactcctggtggtgccttccgtcattcctttaagttcagctttgcaccatac

SEQ ID NO: 42432 - DNA, 815 bp, Heterodera glycines
agcatttcaatcactggcactcaattctcctacatttcaatcactgggactcaacccaccaacatttcaatcactgggactcaacccaccaacatttcaatcactgggactcaacccaccaacatttcaatcactgggactcaacccaccaacatttcaatcactgggactcaacccaacaggatttcaatcactgggactcaacccaccagcattccaatcactgggactcaattctcctacatttcaatcactgggactcaacccaccaacatttcaatcactgggactcaacccaccaacatttcaatcgggactcaacccaccaacatttcaatcactgggactcaacccaccaacatttcaatcactgggactcaacccaacagcatttcaatcactgggactcaacccaccaacatttcaatcactgggactcaacccaccaacatttcaatcactgggactcaacccaacaacatttcaatcactggtactcaacccaccagcattccaatcactgggactcaacccaccaacatttcaatcggactcaacccaccagcatttcaatcactgggactcaacccaccaacatttcaatcactgggactcaacccaccaacatttcaatcactgggactcaacccaccaacatttcaatcactgagactcaacccaccaacatttcaatcactgggactcaacccaccagcattccaatcactgtgactcaacccaccaacatttcaatcggactcaacccaacagcattctaatcactgggactcaacccaccagcattccaatcactg

SEQ ID NO: 42433 - DNA, 963 bp, Heterodera glycines
gttttcggcaaaagagtgcatcacagcaaaaatggcggagtttgaacgacacttctctagggtttgaggtgttttgagtcagaagtttcgcttttcaaaaagctcgttaggatcgtacgttttcggcaaaagagtgcaccacagcaaaaatggcggagtttgaacgacacttctctagggtttgaggtgttttgagtcaaaagtttcgcttttcaaaaagctcgttgggatcgtcctttttcggcaaaatagtgcaccacagcaaaaagggcggaggttgaacgacacttctctagggtttgaggtgttttgagtcagaagtttcgcttttcaaaaagctcgttaggatcgtacgttttcggcaaaagagcgcaccatagcaaaaatggcgtagtttgaacgacacttctctagggtttgaggtgttttgagtcagaagtttcgcttttcaaaaaaatcgttaggatcgtacgttttcggcaaaagagtgcaccacagcaaaaatggcggagtttgaacgacacttctctagggtttgaggtgttttgagtcagaagtttcgcttttcaaaaagctcgttaggatcgtacgttttcggcaaaagagtgcaccatagcaaaaatggcgtagtttgaacgacacttctctagggtttgaggtgttttgagtcagaagtttcgcttttcaaaaagctcgttaggatcgtacgttaaaatcattgggatcgtacgttttcggcaaaagagtgcaccatagcaaaaatggcggagtttgaacgacacttctctagggtttgaggtgttttgagtcagaagtttcgcttttcaaaaagctcgttaggatcgtacgttttcggcaaaatagtgcaccatagcaaaaatgggcggagtttgaacgacacttctctagggtttgaggtgttttgagtcagaagtttcgcttttcaaaaagctcgttaggatc

SEQ ID NO: 42434 - DNA, 1011 bp, Heterodera glycines
tgaaaatatttttaacaaatttaattaaaaaaatacatccttttctatcaattaaaaaaataattaatttaaacttataaaatttatttatcaaaaaaaaattaaattaaatataattttttatttattaactcaacaaaatattttattaattaaaatcattgaaaataacgtaaaaatgcacaaaaaaataatgttacaccgtccggattcgaacctgcccccccccccctcaaaatgatgcctcagaatccccaatcacacagggattcttaggtcttaacgatgtcaaaagtaaaatctgattacgtattcgtgatcagtggcccaattaacccataaagacatgtttttggaagatttttattgaaaaaaatttttcactcaaaaatcctgtccaccccctttggtcccgaatcacaaaatcacttttatttttatatctttttttaaaaatgtgataaaaatgtaaaataaaatttatattatagagaaaaaaattgcggatttttgtagtattttacttttctcaaatagcttttcagaaggcagttacgaatttttttctgaaaaatctaaaatttccagaatttctggaataacttttttcatattgatgttagaaaacctaaataaatcccataaaattctcctgatttttctctatttttaaagctttatttgctcaaaattggtcaacccttaggctagatatgaattttccaatattagcccaaatttccaagggccaaaaaattgccaaaaaataaagaatttttaaaaaattccaaaaattttgaaacgaaaaataaacatcatattcgtgctcagcacatcaaaatagcccagaaaaatatttttcacaccctttttcgacccccaaaaatttttgaaaatttctagggggcctagctcgaaaatgtttgaaaatttacatcatgtaaaacacaattcaatagcatttaaaatgttctacaaaaatgtctaaaacatttttccttaaatcacccc

SEQ ID NO: 42435 - DNA, 757 bp, Heterodera glycines
gttggtgggttgagtcccagtgtttggaatgccggagatttgagtcccagagattgaaatgctggtgggttgagtcccagtgtttggaatgccggagattgagtccgagagattgaaatgctggtgggttgagtcccagcgattggaaagcctgagaattgagtctcagagattgaaatgctggtgggttgagtcccagagatcggaatgtcattgaaagttggtgggttgagtcccagtgtttggaatgccggagatttgagtcccagagattgaaatgctggcgggttgagtcccagcgattggaatgtcattgaaagttggtgggttgaatcccagtgtttggaatgccggagatttgagtcccagtgattgaaatgctggcgggttgagtcccagcgattggaatgtcattgaaagttggtgggttgagtcccagtgtttggaatgccggagattgagtccgagagattgaaatgctggtgggttgagtcccagcgattggaatgtcattgaaagttggtgggttgagtcccagtgtttagaatgccggagatttgagtcccattgtttggaatgccggagattgagtcccagagattgaaatgctggtgggttgagtcccagtgtttggaatgccggagattgagtccgagagattgaaatgctggtgggttgagtcccagcgattggaaagcctgagaattgagtctcagagattgaaatgctggtgggttgagtcccttagatcggaatg

SEQ ID NO: 42436 - DNA, 914 bp, Heterodera glycines
ttaatgacaaaaatgaaaagccgaaaagaagaccaaaataaaaaataaaatatcgctagcaattttaaaatccaatttttaattcttttgtgcggaagctacgaaatggaaatttttgaaagcatttgcgaaattaaatcaattacttttcgtcaatttctgtgtttggttttatttgatcagatgaaaatttttgacttttttacaagcaaaaaaaaaactctcggtataattattttataattgttttataatttccatatttttatttcaatttaatttggttatttgttaaaaacattagttaaaagggaaataaaatggaaatccacggaaattataaataaaaacatgtactattaataaacgtaaagatgagttgccaattgaacataagtattattgaaaatccatttatttggaaaaacttaaaaaatttatcttgacatgagaattgtcttgtcaaaatcttgtccttataaatccgaaacctaaaaaatattaaactacaaagacaaaggattcaaaacctttcctgttattaagtttgaaccgcaataatcagaattattctgagacatcagaatactactgaacatgaattgtaaatcaaaaatacattctgattttgcaatgaaaatcacaactttttcggttattaagtttgaaccttaataatcagaatattctgagtcatcagaatacttatgaaatgaaaggtaaacgcaaattattttgtaatgaaaaccagaattattccggttgttattttgaacctcaatatcagaattaatctgaggcatcagaatactactgaacatgaattgtaaatcaaaaatacattctgattttgcaatgaaaatcacaactttttcggttattaagtttgaaccttaataatcagaatattctga

SEQ ID NO: 42437 - DNA, 1381 bp, Heterodera glycines
  unsure (1)..(1381): unsure at all n locations
ccctatcaattggaaaattttctcaaaaatttatccccaaaatattttttttattgacaaaatttttaattttcccagccctattaatcatagtataaattcggacaagggaattttaagctaacttttgaaaaccgaaaagaatcggcacttttggtaccaatttggagttttaatgccatttattaataagatttttttcaataatagtggttttcaagatttcctaaaaacaaagaaaaagtcttaaattttacaaaaaccataaaaacatacagtaaaagcctcatttgaaatttagcctgccggcttctcaaaaactacaaaatgaggcaaggcatcacgctgggagccctggattataagttagggtgtcaaattatatgcaaataaaatcgtaaatatgcgcgtaaaatatgcatcaaaaatggcaaaatacatatgcacataaatttttccaaattgggggcaaaatttttacaaattcttcatattcattaaatttaagttaaaaacctcgaaaatagctaaatatagtatgaaaaatcatctagaagaataatcgcaaaaatatagctaaatttattaatttttgaaaatattgagttaaaaacagaaaattgacttatttttgcataaatttccaatttttaaaaaagacattttctaaaatattttcgaaaaaccctaaaatgaaatttcttggaaatcttttcagtccttagaggtcaaaagggccgcttatgcacaaaaagccaaaatatgcaaaatatgcatatggtagtatggcctagaagcttcaaaccacaagctaaaacatgtttttcatgcgtttcaggcctcccgcagttcaggaaaaaaaaatgcatctgcatataatttgacaccctaattataacctttattggttgtcttttctgtcgtctgtgagtgtctcttgtcagggattaattagttcaaaagaattccgcattttgaaacgcttcaaaaacggcttacctaaacgcgttgtgctgattttttagaattttccaccgttttcatcacctaagaaatttagaataattaattatctgtttttggctcggtcactctttttttcttttgtgtaagcaattcttcaagagcattgggaagccagagaaaaaaagaaatagtattttatagtattaaaagggaaagagtaatgcaaatcagacactgaaaggaagcaagacaatgcagagaaaagagcccctcggggccaaaaagctagagaagcaagaaattgaatatatancgagagaagtgtaaggagaanagcgagacagtgtgttagcagacactacagcaccactgcagagacaaaaagcgactgatcactgtgttggagcacagcaaa

SEQ ID NO: 42438 - DNA, 942 bp, Heterodera glycines
  unsure (1)..(942): unsure at all n locations
tgtccgattgtctgtctatctctgtctgttgttgtgactctgtttttgtctgtcctctcaccctctctctctcttccttactctctgtttttgtctgtcctctcaccctctctctcttccttactctctgtttctgtctgtcctctcaccctctctctctttttttcttactctctttctctctcattgtccttgcggtttttccctctccccctccctctttcgtctcccctctccccccgcgggggcgccattttggacagagccaaaaacaccgcgaaaacacgccgccgcttcacctctctcgctcccccagcagcagcccctaattttctgtgtgtgtagaaaaagcaagtctcccccccccaaatttgccgtgtctccttttttggatgctttttcaaaattagtgaatggacggaccaatggcggaacactgttatgcatgtgatgtgatgagctttttgccgcttcttctgctgctttttctgtaattagttgcgttgttttcgttcatttcgatgtttttttgcccatttcctcccttcccccccccgccgccgtcgcccaatgatttttcatttccaattttcctcactccatttgtatgcacagaaaaagcgcccaccgtccgaaacaaagcaaaaaaagcggattttatttgatacatacataaaaatgctgctgctattggaatatttatgaacgcaaaacgcgtaaagctaaacaatttttttcgttttaaaataatttgacgaattcaaaaaattttattttcagttaaatgtcaattcgctcggtttcgaaactgataaaaaatacgaaaataaaaaatcctctttaaaatcataaatagggcgaggatttttatttgtttattattttttcagcaactttattttagccgaaaatgtttcattnttacgtcaatattcataaata

SEQ ID NO: 42439 - DNA, 996 bp, Heterodera glycines
  unsure (1)..(996): unsure at all n locations
agtttatgaaaaaaaagttaagcctaaactttttggccctacacagggggaattaaaaatttttaaaaatttattcatctccttttatgatagaaaaaggatnagagtggntaaantagnatgtaaataaaatttggtgtgtttaagagtattttctgaaaaaaatatttatgaattaattatgnaaaaataaataaaaatttgtaaaaatttgatagtnnataaataatttgtaattgatnaggggntcaccaaattttgcagggatacgtatcggaacactacaaatgcttactaattttcctagattttttaaacccggtgaaaattttttgcagacaccaccacttttgcacttaaaaaaatttcaaaaaactttaaaaattcatagaaaatttaaattcataggtactactgctaaatcaacgcagagacgcctttccttgacctttttaggcccctgcaaaatctggtgcgcttctgatcactactcgaaaaatgagtgattgaattttcactaaaaagttaagcctagacttttttggcctgttataacaggaactaaaaatttataaaaattttagtcatctccctttttgatagaaacagcatcagagtgcctaaactagcatgtaaataaaatgtgggcggtctcagagcattttcagaaacaaatacttacgaattaattatgcaaaaatcaataacaatctgtaagaattggatcgtccacaaatgctttgtaactgcacacgggctctccaaattcggcaggcaaaggtagaggtgcgaaacatggggggaaaatgggggggggggggcaattggacggcgccgaaatagaaatttctgaaaatttagctgaatttactttacaaatttcataaaaaattcccaaaaattttccccgaggcgcctatcgccaccggcggatccccattttaccatatttggcggattgaagggtgggaggcgaggcaattggacgccgctgaa

SEQ ID NO: 42440 - DNA, 640 bp, Heterodera glycines
accgatgcgcccagatttatggggagaccgaatccttcgggaatagcttccctatagcctgtactttaattctgcgttggatttttgctccccataattgtttgagtaccccaaacggacacttgaaaaaatcgatttatttttgttttcggggcagtccccccgaaccgatgcgcccagatttatggggagaccgaatccttcgggaatagcttccctatagtctgtactttaattctgcgttggatttttgctccccataattgtttgagtaccccaaacggacacttgaaaaaatcgatttttttatttcataaatattttttcagaaaatgctctgaaacgcaccaaattttatttacatgttagtttaggcactctgatgctttttctatcgaaaagggagatgaataaatttaaaaaaatttttaattcctttttaaacaggccaaaaagtttaggcttaacttttttttcagaaactgatcagaagcaagccaaactttgcagggatactgaaaggaaaagatccatctgttttatcacattagcttgtcatcagtttttataaaaaattttcaaaattctgagtctcctattattttatttatttttcaaaattttgaagggcggggggggg

SEQ ID NO: 42441 - DNA, 611 bp, Heterodera glycines
accaaaaatggtcctctttttggtccaaaacggtggcatttgccaactcggccaaaatgcccgtgtacatcacatcctccagaaaaagcacattgattttgtgagtttgggctaagatagccttgacagtttctggggttgccatataaccgccaccgatcacaaatggcgggaacattttcggcgcgtacatttcacgggagacgtacctgtggcaaagtgccaaattttttttacaagattttcaaaaaatattgccaacgaataatttcaattaaatttcgaaaaactggaatgataagttacggattttttttaaagcccattaggactgaaaaattatgggttcttctttgacctatcataattacggatgaacaggatttccgtaatcccaaatccagtaatatataaccctgctgacggtaaggcactccgttcactgaccatttcttgtaagggccatttgagtcccgtacaggattacgaaatccaccaatgccaacaaatagaagcggttttttggtggcaatgtgacggaatttatgttcaatccaatggtccatcaggcgcagatggaccaccgtgtcgtcgtccaccttaaacagcca

SEQ ID NO: 42442 - DNA, 708 bp, Heterodera glycines
accccaaacggacacttgaaaaaatcgatttattttgttttcggggcagtccccccgaaccgatgcgcccagatttatggggagaccgaatccttcgggaatagcttccctatagcctgtactttaattctgcgttggatttttgctccccataattgtttgagtaccccaaacggacacttgaaaaaatcgatttttttgttttcggggcagtccccccgaaccgatgcgcccagatttatggggagaccgaatccttccggaatagcttccctatagcctgtactttaattctgcgttggatttttgctccccataattgtttgagtaccccaaacggacacttgaaaaaatcgatttttttgttttcggggcagtccccccgaaccgatgcgcccagatttatggggagaccgaatccttcgggaatagcttctctataatctgtactttaattctgcgttggatttttgctccccataattgtttgagtaccccaaacggacacttgaaaaaatcgatttttttgttttcggggcagtccccccgaaccgatgcgtccagatttatggggagaccgaatccttcgggaatagcttctctatagtctgtactttaattctgcgttggatttttgctccccataaatgtttgagtaccccaaacggacactcgaaaaaatcgatttttttgttttataaatatttt

SEQ ID NO: 42443 - DNA, 769 bp, Heterodera glycines
attccagcgctcggacggctgctcatggccaagcggacttcccgggggtgcatgaagaatgctgatgcagactttgccactttggtcaactgaaagaggggtgggggttgctggaatttgatgaattgttgcaccagccgctttccccactgttcggatgaagaatgtcggtgagtaaggtcattgtcggtggatcatttgggtacgaagccgggaaatggagcagtgccgtgaatttgcatcccgcgctaaaaaaattggggaatttgaggatggaaacatcaatctgcacttctccatgaactcactaaggcgttcccggcagcccgtcgattataatgcgccatttgaagagctgaaaaaagagagagtttgtgggactgaaatggacgggtggaggggctactcaaccgattactattctcgcttcgatatagagaattgtcctaaaaagagatagccatttttctgagaattaattcacaatttccgcagctcttgcggtaatggaaaaaattttgaagaggctctgcggaacgtattagcatcggggttacgagatagaaaattgtcctaaaaagagatggccatttttctgagaattaattcacaatttccgcagctcttgcggtaatggaaaaaattttgaagaggctctgcggaacggattagcatcggggttacgagatagaaaattgtcctaaaaagagatagccatttttctgagaattaattcacaatttccgcagctcttgcggtaatggaaaaa

SEQ ID NO: 42444 - DNA, 1007 bp, Heterodera glycines
aaaaagagaaaaaagagatttccattttttggtcaagaattttttttgtttgcgtttcaaatatcgtaagattgtttgataggaccagacaagagaaggcaactgttggttcctagtttgcggtaaaaaaatgagaaaaaagatgttcctagggccagacaagagaaggcaactgtttgtaccaagtttgcggtaaaaaatgagaaaaaagagatagctattttttggtcaagaattttttttgtttgcgtttcaaatatcgtaagattgtttgatagggccagacaagagaaggcaactgttggtaccaagtttgcggtaaaaaatgagaaaaaagagatagccattttttggtcaagaattttttttgtttgcgtttcaaatatcgtaagattgtttgatagggccagacaagagaaggcaactgttggtaccaagtttgcggtaaaaaaatgagaaaaaagagatagctattttttggtcaagaattttttttgtttgcgtttcaaatatcgtaagattgtttgatagggccagacaagagaaggcaactgttggtaccaagtttgcggtaaaaaaatgagaaaaaagatgtttgatagggccagacaagagaaggcaactgttggtaccaagtttgcggtaaaaaaatgagaaaaaagagatagctattttttggtcaagaattttttttgtttgcgtttcaaatatcgtaagattgtttgatagggccagacaagagaaggcaactgttggtaccaagtttgcggtaaaaaaatgagaaaaaagagatagcctttttttggtcaagaattttttttgtttgcgtttcaaatatcgtaagattgtttgatagggccagacaagagaaggcaactgttggtaccaagtttgcggtaaaaaaatgagaaaaaagagatagctattttttggtcaagaatttttttttgtttgcgtttcaaatatcgtaagattgtttgatagggccagacaagagaaggcaactg

SEQ ID NO: 42445 - DNA, 1127 bp, Heterodera glycines
  unsure (1)..(1127): unsure at all n locations
cccaaacgacacttgaaaaatcgattttttgtttttcggggcagtccccccganccgatgcgcccagatttatggggagaccgatccnttcggatttagcttccctatagtctgtacttaattctgcgttggattttgnctccncataattgtttgagtaccccaaacggacacttgaataaatcgattttttatnntcataaatattttttcagaaagtgctctaaagcgcaccaaattttatttacatgttagtntaggcactctgatgctttttctatcaaaaagggagatggagaaaaatttttttaaaaatttttccttatattttggttatatcgttttgcttttggtggggtgcttggaacagtggaatcatgcgcacccgtccgatctggcaagttaagcaacgattgctgactagccaaaaggttcggtgccgtgatgaaacgaaccagcactgcttaccccgcggcacccggcacggtcccccgaaggaatggatttaattaaattctctccttcggggatttttttccattaggtcgtccgttagcgttcgattgctctagtcaatttttcaaaatttttgttgaaatatttgtcgtgctctgaagggcgggggggaaggcccaccacgaggccgcgaagcggccgagtgagtacgttcggtgcaggaaaattattaaggaagagagttcattatttatttgttttttgcaaaattaattcataaatattttttagaacgtgctctgaaacacacaaaactttatttacaggttagtttaggcactcagatgctttcactatcaaaaagggagatgaataaaaatctaaaaatttttaattgctttttaaacgagcgaaaaactttaggcttaactttttttttataaactgatcagaagcgaaccagattttgcgagggcatcaaaaagacaaggaaaagcactgctatgatgctaactccagtaattctgaatttaaaattttttattaatttttaaagcttcactattttatttttttagcaaaattaattcataaatattttttcacaaactgctctgaaacgcaccaaaaattatttacaagttattttaggcactccagatgctttcact

SEQ ID NO: 42446 - DNA, 1006 bp, Heterodera glycines
ttaattcgttccagcattctgtgcttcatcctttcgaggattgctttgttccgtatgttcagaagcattgccctctcattttgcacttccttcggctcgttcgtcttcatttcacgccaaattgaattgggaggtgcgagccattggtctccaacagcgaatctttttcgactattgttttcacattcctttttttccagtgtactctctgccaaaggattcttctttttcccttcgggcggaattgcttcatccttttttgacaaaatgtttgtctcagccgcctttatttcgtgataagcaattttccatggattcgttggctttttctccaccttttttaaggttgcttcgtattccgactttgatttgcttttgttgacgcatgattcgtaaaatcccaatgctccggtcacgaaagtctttggaaattcgagaattctctcttcctcctcgagatccaacgaaatgcaatcctctggtatgacctttccttctgcttttttgacaggtaatgagctttcgtttttcgcttccctctcttcaaatggctttgtaacttcggcacttcttttggcctttcgcccattttatcctccaccgcatgaccttttatcccttcatctggcattcctttgtcgcccatttcttcagccttttcgctcatttgttccgaattggtcagcgttttattggctctttgcccattgaagccttaaacattcttttgcgccgtttgaaggttgctcagaggacccccaagacagcgtcttataaatctcttgttactggacgggggggggggggcctcgccgactcacttttggttttaaagttggcgaaagttattttaaaaagttttgttgatgtttttttaatatgcttgtgttttttttaaatatgtgatcgttaattttcgggaatttttatttccctgaaatttgtccattaatcagaaattttgtcacttatgcaagtacaacaaatttaatttttcttttataaa

SEQ ID NO: 42447 - DNA, 531 bp, Heterodera glycines
  unsure (1)..(531): unsure at all n locations
agctgcaaaaatctcaaaaaaaattattttttatgaatgaccccacttggctccacattcctttattcgttgatcgccttgattctatttattttgacataaatagcacagattttgactaaaaaaaaccaaatttaggaatttttgggtaattttttaagaaaaaaaggttgtttttttttggggccagcatgccgataggggcgaattttaaatttatttctaacagatattcaccaaaaaaattaagattttcccgataaattttcgtttttttaactatattaaattatcatgatttactcaaggaaaattaaaactcagattttttaaattttttttttcttcggcacatttttccaaaaaaacttgatgaatgtgcgaggggagaggtccggcggtgccgataggcgccgccaggaaaatttttttttaaattttgaatgcaatttgttaacaaattttgtacaaaaaatgagcaaaatttgcgatcttgggatatttttaangaaaaaagataggaatttgggg

SEQ ID NO: 42448 - DNA, 973 bp, Heterodera glycines
  unsure (1)..(973): unsure at all n locations
tctagagtcaatttagtcgaactatataaatttttcaaaaaattattcatcttttttatggttagcgcatatgtctctagctttatagaaacggtccccgaatctgcgaggaactacttttttgagaatttctatagattattattctgcatgaatccttcgcttaaattcccatttatctcataaagtcagattaaattaattactccgatttgttttagaattggtccaaacacgcttgctaatagcttttcttttcgaaaagagaggcgaggaaaaataaaggttgcatccaaatgtaatttttttttacattgaagcatttggatggcttgctgtttacagttggctaagtcttctttgcaagaagcagcacaacttttgtttgggccaacgaccccaaaccattcgaatagcaatcgattgggctgactagactccatatttgcaggaatagcaatggcaggtctatcttaaaggcctgacgagttatgtttcgacaaacatcctgtacaccataaatcgattttcaaatttagtcgaactatataaatttttcaaaaaatgattcatcttttttatggttagcgcatatgtctctagctttatagaaacggtccccgaatctgcgaggaactacttttttgagaatttctatagattattattctgcatgaatccttcgcttaaattcccatttatctcataaagtcagattaaattaattaccccgatttgttttagaattggtccaaacacgcttgctaatagcttttcttttcgaaaagagaggcgaggaaaaataaaggttgcatccaaatgtaatttttttttacattgaagcatttggatggcttgctgtttacagttggctaagtcttctttgcaagaagcagcacaacttttgtttgggccaacgacccccaacattcgaaatagcatcgattgggctgactagnactcatatttgcag

SEQ ID NO: 42449 - DNA, 932 bp, Heterodera glycines
cagcagcggaaggttgaattacaaattaaaccagaaatgaactttatttgtttaggcgcttgggcatatcacaccgcgcgccatgcgcaaagctttaaatcggccgattgtgtctcagatttgttgtcaaaaatttttcctgattcaaaaattgcggcaaattacggatcaaaacaaaataaatgcgcagcaattattacaagttttcataaaattaaaggataaataaatcgagaattgccgtcaaattgatcgacttagaggaattggtggagagacttcggccgaagtttgaatcatactttattttttggctattactttgatttatagatttataattggataattcaaattttggagaggcacaaattggattgtggcgacaatgtgaatgcaaattttgggggcgctgcacttgctggacaacggaatctgtggtcacttttctcagtgtgattttgccgatattcaatcactcaatcgatgttttgcaggcacaattaaaacgcagaacagaagtggatgaaggttttcgaggcggaattacccaatcttgtgttgctcgtcagcaaaattctttcaattcccgtgtccaatgcatgcgtggagcgcgtcttctttctttgttcagctcagtggactgatgtgcgcaatttattgaaagttgaaaccatgaaaagtctggcccaaatcaaatcgaattatgatctcacttgcactgaaatgtacgatttgctcatttcctcaccaaaattgttaaaaatgatcatgggaggtgaaaaatataatatttaatacatttttgatcgaataaattgtaaaaataacgatttgaagcaattttgcaaaatgttctgattttcgaccccaaaatctgattttttggacccgatgttctgattttgaaaatttttcgatccgaaccctgc

SEQ ID NO: 42450 - DNA, 1254 bp, Heterodera glycines
tttaattgattcggatgtttttatcgcggttaattaccgccccgaaaactggtttgaatcgtgaagtttatcatttctaactcacttctcaaaattgttgataaattgcaaatatatttttccaaaagtctgttgacactttctgaaaataaattctatactcatgtattttccacttattagattttgcaggcttattgctgcatgttctttgacacttcttcaaaataacctatgccctttattcgttcaaaacagcatctttgttgtttcgctttggattgacaagcccgatgataaatagctaaagcaaaacgcgtgcatgtttggaaagtatcgttcataccaataattgagggtttatttttaaatgaaattttatgataaaccttattatctcacaagctatttaattgattcgaatgtttttatcgcggttaattagagcaacgaaaattggtttgaatcgtgaagtttatcatttctaactcacttctcaaaattgttgataaattgcaaatatatattccaaaaatctgttgacactttctgaaaatatattgtatactcatgtattttccactcattagatcttgcaggcagagagctaaatgttttcaagccatatataaaaatatattattgtcattttatcgtgaaaattcagcatattatttgtttcgatcatttctggattatgagatgataaatatctgtatagaaaaagggtgacagttagtgcaagtaatataaaataaccaaaacaaatacaaaaatgtccacatgaatttgatgaaactgattgataggtcttctggttacaataaattccaggaaagacattaagaaaggatttaactaccaattcattaatgggtaacgatagactatcaaagtaatcgaccttcttatttaatccattaacaaatattgcaacccaatgagagccgggaaactgatgagggtccaaattaacaatcaatgatgccggaaatcgtatggccatcggctcaggtagttgatcgcatgagaagcatccaaggaacttgcggctcgttatttcggacgacgttaaaattctggtgatttggttgctgtccattggtcttactgtaccgttccgtcaaagtgaattttaaccaaagaattgagcgaaattggtagataattagacggatcacggacaatccgaaaaggataatcattgcccaaaaagaaatatgtgaatacacatttgcctcttttggtaattct

SEQ ID NO: 42451 - DNA, 1057 bp, Heterodera glycines
aaaaatttgaagagtctctgcggaacggattagcatcggggttacgagatagaaaatgtcctaaaaagagatagccatttttctgagaattaattcacaatttccgcagctcttgcggtaaaggaaaaaattttgaagaggctctgcggaacggattagcatcggggttacgagatagaaaattgtcctaaaaagagatagccatttttctgagaattaattcacaatttccgcagctcttgcggtaatggaaaaaattttgaagagtctctgtggaacggattagcatcggggttacgagatagaaaattgtcctaaaaagagatagccatttttctgagaattaattcacaatttccgcaactcttgcggtaatggaaaaaattttgaagaggctctgcggaacggattagcatcggggttacgagatagaaaattgtcctaaaaagagatagccatttttctgagaattaattcacaatttccgcagctcttgcggtaatggaaaaaattttgaagaggctctgcggaacggattagcatcggggttacgagatagaaaattgtcctaaaaagagatagccatttttctgagaattaattcacaatttccgcagctcttgcggtaatggaaaaattttgaagagtctctgtggaacggattagcatcggggttacgagatagaaaattgtcctaaaaagagatagccatttttctgagaattaattcacaatttccgcaactcttgcggtaatggaaaaaattttgaagaggctctgcggaacggattagcatcggggttacgagatagaaaattgtcctaaaaagagatagccatttttctgagaattaattcacaatttccgcagctcttgcggtaatggaaaaattttgaagagtctctgtggaacggattagcatcggggttacgagatagaaaattgtcctaaaaagagatagccatttttctgagaattaattcacaatttccgcaactcttgcggtaatggaaaaaattttgaagaggctctgcggaacggattagcatcggggtta

SEQ ID NO: 42452 - DNA, 1013 bp, Heterodera glycines
agccaacgcaacaaattgaaattggtgtcatagtaaggagtcagctgatcaaaaaaaccgacatttggacaattcgtccgttcgacatttacctgatctttgaccatttcacgaagagtttggattttgtccatctcttcgggcgaaatgttttgactaattgaactcattagtatttaagtgatctgttgaaaataataaaatatgagcagaggaggggggggggagaagtgatcggcgcgagaaaagtgcgattttgcggggaaagaaaggtcaatcgatgcgacggattatccgccggcgtttgctgagaattgagaagcgatgggcgcccctttcacttcacttcgctgcactttcttaacaaacgcaataaattcatctccttaaccgtaaataattgcaatttcaaataacagaaaatgagaaagaaataattgaaaatgaacgactgatgggagaaaagagggagagaatgggggggggggagagatcggccgaaaaaaggggaggggagggcggaagatgaaatgaaccgataaaaaagagaagacaaattatgacgaatgtttaatctttaaatatgtatgctcttgaaagttgctctgcctaatgcgctgcccgtcaaaatgtcgccgcgtcgaaatgtcgccgcgtcataatgtcgctgcgtcgaaatgtcgcccaagccaaaaattagtgaaaaagtcgaaaactacattttaaaaaattataaaaaactaagttcattatcaatttatcagaatcgcataaacaaataacaaaaataataaaatttgcatgaaaaaggaatatttcaaaaagcgaatgaataaaaaaagggtgaaaattgggattcaacaattttaagcaacatccatgcttgaatcttcctgtttttcgagtccttcaattttctgcgatccttcacctgcagaccaagatccggaataacatcgtgaattccgcttaattgtcccgcccaaaggcatgttggcctgtttttgctcaaa

SEQ ID NO: 42453 - DNA, 1037 bp, Heterodera glycines
  unsure (1)..(1037): unsure at all n locations
ctccctttttgatagaaaaagcatcatagtgcctaaactaacatgtaaataaaatntggtgcgtttcagaacccttctgaaaaaatattgaagaattaattttgcaaaaaataaataattaatgaaaaagtcagaatttcgaaaaattttaaaaacaacaagcgttggcattttttcaggttaagttagtcctttacaatggagaaggcctgcaaaattaggagagattatatcgattttagtgcgctaggttcgatgaaactttttaaaatataagcctaaactttttcgcctgtttaaaaaggaattaaaaatttttaaaaattttattcatctcccttttgatagaaaaagcatcagagagccttatttaacttttaattaacatttggtgcgtttcagagcacgttctaaaaaatatttatgaattaattttgcaaaataataaataattaatgaaaaagtcagaatttcgaaaaattttaaaaacaacaagcgttggcattttttcaggttaagttagtcctttacaatggagaaggcctgcaaaattaggagagattatatcgattttagtgcgctaggttcgatgaaactttttaaaatataagcctaaatagggaagctattcccgaaggattcggtctccccataaatctgggcgcatcggttcggggggactgccccgaaaaccgggggtatcgattttttcaagtgtccgtttggggtactcaaacattgttgctttattgttgcgcattttcgcacagacagtagccaagatcggattcgttgtggaccgtaataatcctcggaaagcatcacgtcgttcaccaacttggggaactcgttcagcagtcggatggcaactccgttgtggatgggcccaccctgcatcagacaacagccaacccaattctcgccctttgccccaattggtccgcttttcctttgctttctgttttcctccccacctccctcctcattttcccacaatctctcggtacttcgcgtcccttttaaaatttgaaattttt

SEQ ID NO: 42454 - DNA, 592 bp, Heterodera glycines
atggaaaaaattccccgaaggagagaatttaattaaacctcctccttcaggggtccgtgccgggtgccgcggggtaagctttgctggtttcgtttcatcacggcgcccatccttttgaatagtcagccagcgttgcttaacttgtcagatcggacgggtacgcatgattccacttttccaagcaccccaccgaaagttgaacgaaataaccaacatataaggaaaacatttagaaaaatttttattcttcacccttattcataatataaacctaagaggaccttgttaacatgtaaaaaaaaattggtgcgtttcagaacactttctgaaaaaattaatatgaattaattttgcaaaaataaaataatagaagactcagaattttgaaaattttttataaaaactgatgacaagctaatgtgataagacaggttaattcttttcctttcagtatccctgcaaagtttggggcgcttctgataagtttcacaaaaaataataaaaaattaattttgcaaaaataaataaataatgaaccctcctccttaaaaattttccctgcaccaaaggtactcactcggtcgctttgcgg

SEQ ID NO: 42455 - DNA, 1661 bp, Heterodera glycines
aggattggaactttttaaatggattgtcattttataaatcagttttttctctataattatggaaaatggcgatttttaaaattaaaattgtcgatcgatcatttcctttcgacgaagtgaagttactttcctcaatttcaacggcacaaaatgtacagatctttggtcccggctcatcaatgggcactgggccgttgtcggagctgatgagtgcgttcgaagtgctcatcttcaccaccgtgtattcccatatgtttgccaaggtggacaatttttcattttattttgccaaagaatccgtttcaaaaaatgccaatttcgtccttttgccgattcagaagggcccacccgtctctctggtcgctgctcaaaacaaatttctgtcgccgtttgccaatggcgcgccgaccgctgccactcgaagcagcgacatggcacagcagcaccggcggcacagttcgcgcccttcgataaatgtgatttcttcgtttccgtccgcctcgtcagtgaaggcgtcgcgttggggcgcggcggtggcggcacagccatcgtcgtcgacgtcgacggcatttcgctatggcacagtgtcggcaagggcggtagcgcatgcacagccgccgtcgcaaatgaacggactgagcccagtggaaacaaagaattaattaattgacagtgatgaaagagagactcattaaatgagttgaatggagccaatttacgctaattatttgatctaaggcaatgataataaataaagtccttttaaaatatagcgatcactcggttcaattggttattcaagcgattacagtggttaaggagaagctttctctaagcaatttgctgagcgattgaatcatcaaaacaaaaatgatataggccttgaattttttttcctaataattaagtgataaaataaacagaacatcgatgcactttttttctctatcattattagagaccggacaactggggtcggagggatcccgagtcgggatcccgactgaatcccgatcaatcccgaatattttggaaaaacgttcgggacggatcccgagtcgtgatcccgaccgaatcccgatcccgatcaatcccgatgaatttaaaaaatcgctcgggacggatcccgaggtcgagatcccgaatttaatcccgcgggatcccgaagaaatcccgcgggctcccgatcccgtccggtctctaatcattatgcataatttcgtgcaaattctaactacagaaaaaagtttttgtgacgaatctttagtagcggggatgagaaatagtttgccaaaatgtgaggtgatttttctgcactctctctcttagggttcgattgttttaaaaaaagttataaatgccaaatctctccaatttttcgttttgaaccagtccattttttgttagcgtccaaatgtgatgcagacaatttttgaataatttcgtttggactctgctggttaaaatcccttttattaatctgagctatcttatccacatatcgctagtgatttgtgagaaattatccatagcaaattcaaacccacagaatcgagcgagttacagtattgtgaaagttttgaatttttttacgacacgatagcattatacaaaaattctcattcgaaggaattactttgctttgggcagtttcattttat

SEQ ID NO: 42456 - DNA, 448 bp, Heterodera glycines
agggatactccccggtaaaggactaacttacactgaatcgcccgccgagctagcttggctcaaaaaaattttcgaaaatctgagtctttcgtttttatttattttttgcaaaattaattcttaaatattttttcagaaagggttctgaaacgcaccaaattttatttacatgttagtttaggcactctgatgctcagttcatttaaataatttttatccaaaaaattttttttgggttttcggggcagtccccctgaaccgatgcgcccagatttatggggagaatgctcagttcatttaaataatttttatccaaaaaattttttttgggttttcggggcagtccccctgaaccgatgcgcccagatttatggggagaaaattttcaaaattctgagtctcctattattttattttttttcaaaatttgaagggcggggaggggggg

SEQ ID NO: 42457 - DNA, 1241 bp, Heterodera glycines
aatggaaaaaaatccccgaaggagagaatttcttttaatccattccttcgggggaccgtgccgggtgccgcgctgtaagcagtgctggttcgtttcatcacggcaccgaaccttttggctagtcagcaatcgttgcttaacttgccagatcggacgggtgcgcatgattccactgttccaagcaccccaccaaaagcgaaacgatataaccaaaatataaggaaaaattttttaaaaaattttttctccatcttcctttttgatactaaagcatcagagtgctaaaattaagttgcaaataaaatttggtgcgctttagagcactttctgaaaaaaatatttatgaaacaaaaaaatcgattttttctagtgtccgtttggggtactcaaacatttatggggagcaaaaatccaacgcagaattaaagtacaggctatagggaagctattcccgaaggattcagtctccccataaatctgggcgcatcggttcggggggactgcccagaaaacaaaaaaatcgattttttcaagtgtccgtttggggtactcaaacaattatgcggagcaaaaatccaacgcagaattaaagtacaggctatagggaagctattccggaaggattcggtctccccataaatctgggcgcatcggttcggggggactgccccgaaaacaaaaaaatcgattttttcaagtgtccgtttggggtactcaaacaattatggggagcaaaaatccaacgcagaattaaagtacaggctatagggaagctattcccgaaggattcggtctccccataaatctgggcgcatcggttcggggggactgccccgaaaacaaaaaaatcgattttttcaagtgtccgtttggggtactcaaacaattatggggagcaaaaatccaacgcagaattaaagtacaggctatagggaagctattcccgaaggattcggtctccccataaatctgggcgcatcggttcggggggactgccccgaaaacaaaaaaatcgattttttcaagtgtccgtttggggtactcaaacaattatggggagcaaaaatccaacgcagaattaaagtacaggctatagggaagctattcccgaaggattcggtctccccataaatctgggcgcatcggttcggggggactgccgcgaaaacaaaaataaatcgattttttcaagtgtccttaaagggactcaaacaattatggggagcaaaaatccaacgcag

SEQ ID NO: 42458 - DNA, 947 bp, Heterodera glycines
aacatctaccgaaccgaaggaagatgaggagaatgctgacgatgttgaaatattcgaggaattgcctctcacaattgccacaccaaagtaatatttaaagagatacaaaagtaataatttctttttcaaggcggaaggaacgaaatgttttctgcgaaaagcatttcccaacaaatgcgaatgccgttttcgctgtggctgacaatgaaccgcttgaaacacatcccaaaactccaacagcggcccccgggggaatgaccccccagccgaatgggagagtatcgccggtggcctgtaatatcatacaaaaggggtaagaccatcaaaaggctaggaatctgtttcgttaagtattatgtaacaaagttaccttttaaggtcggtaaaggcgaaggattgggacagaatagtgaaaatcacacaaacgccgttgtctctgcgaaaaagtatgggcgacagcagcaaatgcccactcagacaacaacgctcttttgaacgagctcggactattttgtttccttgtgaaacgacaccgcaaaccacgggcaaaaaaattgttacgcgttcagttacgaaaaaattggacagaaaaaaagaggacgagggacaaacgacgccaacacgaaaaaagacggacgaagacagaccaaatgagaagtgcacgccaccaacaacaaatgtggacagacccaccgcacttccattgtccattctgaagtcggacaggaagagatcgcgtctccccacggactcattatgtatttctggaccaaggacaattcgtatcgtactgtcctcctttttagaaaatattcataatttttcgcaagtaatcagattatgcatttttgatatcattatataggactttgttcaactaatagacaagttaaaaatcaaaaagttcattgttcggggcattacgaattggcccagtacggattggt

SEQ ID NO: 42459 - DNA, 1560 bp, Heterodera glycines
tttttatttaaaattactggttcctaaaaaggcggaactcaccacaggataccaaatcatccaattcgttatgtaatcaacccctgaatttatttggtgacaaaaattactataattgcacataaatcggaaaccaaatttattaggcgacaaaataaaataaaatcggaaataaattgaaagagatttgtcttttaataatacaataccaagtctatactgagccaaacacaatcaccaattcgtacatggtagaacatcgaaatgtatccaactttcttcatgagatttgaattgtagaggtggtagacttcgttttcatctgaacggatttgaggatggattccaccgcgcaccatcactctcgccggctgcttcagacatgcgggtagatcggttggctgcattgtgcccaagctgatgcgtttgcggacgctgaatgggtttgatgacccaacgacgtactcaatcacccgcccacataatttcgagaccgcagcgcacttaaaaattcaattccaaaataatatttatctctcttccttacatcattatttgtcgtatgaattaaaatgtcgtttggagccaaatttttgttgtattttccaaagcataaatactgtagaatttccataaagaattcggccgaaaatacctgctcattgacagggaaatacgccgaatccaaatagtcttgctcaaagttcagtttcctcacttcacaagcagaattgaatttcgcattaatgacagacttaaaatttttttcaaaaatgtatggaaactaatgaccaaccagtcgattcttgaatttattgtactccttttctcttgactgacgcaaaatctcaaatttccaattaactgggtcaatcttcgaggaccatcgatttttttctatataattaattacaaaaaataaaataaaaagtcattaatacccgctattccgtcaaacaatcgcatcattgggaggcacatgatcagctctgagactaattcactcggaagttttttagacgggaaactctgatgttccattttgacaaaatattataaatgattcttgatttttgctgattgccgaaaaacgtcgagactggtacaaaagtgtaagctcggagggacctctaccatgaaaatgggcgtggtttatctttcaagacaatccgttctcgaaactcactcattttacacaccttgtctattcgagaaatcattttattttttttacacttgctcccgagtcatcttttcttccttccctccctctttctcatctatttatttaattattctttagctgataaatacagggaccatataattaataaaaacagaataagggaccgtataataaaataaatttattttttttttttttttgctgttaaccagggcgattgcttatttataaagcatcgtttatcctggcattagttgtcttttagaacttgaagtggatcagtttatcattattaattttcgagctgtttagatgccctgtcgtcttgtgcttcatgggtggcggtgtgcagctcatcaggtcaaggttggttt

SEQ ID NO: 42460 - DNA, 563 bp, Heterodera glycines
agctttttgcttggtcaaattgcgaccatcgatcgctttgggtcgcgtgcgcacgccgttggacgtgaaatattcaatttttacacaaaaagttcggctgccctcggctattccacaaatgccttttaccttcggcagtacactcaggcaaaaacaaattagtgtaattagctttaatcgatttatgatcccatttagctgatctccgacctcgcttttaatttgcccattatcaccgaattgcaacacaaatcgtcccggggttggcccattcgtttttacattcatggccatgtgaatgaacagtccttcccgcgcgaagtgccaattcacggtcagtgccctttgctaaattggtagtgtatatcattggtgacggcgggattaatggggacgggggataaaaagagcaaatacggtagattcagggaacaactgtaatttaaattttcaattttttttgccctttattgaaaatgcaaacataaaaataaatatccaacctccctcctccctgtacgagtaagtccttttacaatttattttcacttcactgctttgaa

SEQ ID NO: 42461 - DNA, 1089 bp, Heterodera glycines
  unsure (1)..(1089): unsure at all n locations
ttgtatgagttttgatgacacccaataaatgtgaatgagtaactcacattggacagggcacctttgtacatgccagtgaaaagtccctcttttttgatgattttgatggcacagtccaaagtgtctaaaaagagcgaatgaaagagcaacaaataaatgatccattttttattgcttgctttggttttgttcaatttttaccattttttcttggaaattagcaaaaggaatcaagaaaaccctctgaaattcagaaatttaaggttgattagtgagggtgggtgataaacgagtttatcctgagaatagagagcacacttactcttgtacatgatgtccttgcggcccgactgcatcatcatacgacgacggacggtgtcccacgggtaggagagaacgccggacgacacggtgacgacctgcgcaatggcccagttgacgaagaagttcatctgcttgccctccggggagaagagcattttggcggtgtcgaagcagccgaagtaagcggcgcggtaaatgatgatgccctggacggagacgaagaagccgcggtagagaccgatgggaccgtccgacttgaggatcttcatgatgcagtccgccaaacctttgaactcacgggcatcggccctaaagggacattttatttaagtatttttaaaattttaatctcactttccaacatccgctgccaaacgcgttcgcgcaaagtccaaagggtacacaaaacacagcgaagtggcgccagcggcaccgcccgaagccaaattcatggcgaagaacttcaagaactgcttctccttgtccactctagatttaactttcatttaaccattcaatgttgaacatacccttgcgtgaagactcgcttataagtgtccttgaaggcgaagttcagcgcctgagtcggaaagtaacggatgacgttggccaggttaccacgccacaacgacagaaagccctgctccttgngaaacacgacgaggacgtcgatgatgcctttgtagcgcttgtccgcggtgatgtgaatggaagcatcttgcacctaanngcatacatagtttgaaaactgtgatacataaagga

SEQ ID NO: 42462 - DNA, 1458 bp, Heterodera glycines
atgttccttcattttgaccaccaattcttcatgttccattatcttttccttgataaatggtggtggcagccaaaaaaccggcacatgactgaaccgcttcaacagctgctcaagtctccccgctcgctccatcacattttcgatcgtctcatctcctcttatcgagtcccgcccaaccatcacgatggcaaccttcactttggaggagagaatggcgccgtcaaacgccctgatcacttcggtgattgttccattttcggcaccgataaattgcgatttgggccaaagtttgatcagttgtttggctgaggaatcgccgatgatcactgtcgccgtctcgaccaacagctgtttccggtggatgattgtggctcgcactttttcaagaatgaagttggcttttttcagcatttcgtgccatcccatcttctctgattcgggcaattcggcgacgacgttcggcattggcacttcaattggtgtgtagcccgtcttcatcagcttctctcgcgtgaccgcacatcgttcgacccatgccgtaaaggcactctcaatgtcattttccgtcgggaaaaagccattcttcaccaggtcttcgcgtccgccactgtaagcgatcagttcgaagccgacgggcgcactgatcacaagttgtgtcaacttttggccgccggcgactgatgaaactgcgcccgatttcagtaagaaattactgaggagagccttcattggcgtaccgatcaccttaaaaccaacttttccttcaacattttccatcttttcttctcttccaatcactttaaggcctaggccggccttctcaagcactgggtcgaggtcggcagccgttaattggacacaatttcgatgttccgtgccgagtccgccacattgcatctcccagaccaaaggatggtcagcgttgtccttcactctcacctcgccgtcagctgaatttgcaattgtcctcaattgcccaataaaaagctggcccatattttccgttttttgaaattcgtccatttttatggttccatttccaaatttaacactttttgtttgtgtaaattgtccattttcttcacacgtctcaatatccatttcacgatacaccaaacaaactacactcagcaatgcgttcaattggtttttgaagggatttttaccccgagggagagtactaatatccggtacaccttccggaactttcactagccgctcgattggaacacttataggttcaaaattcggtttatcgactggaaccaattttgctgacgaatcagagatatccaaaattttatatggaccgaactgattccaaagaagttttcggtgggctgcgcgggtatttacgcccggaaatatgaccattactctctcgccgattttgaatttgtctgctgtcacttttgggtgtttgtcatagtgatttttcatctttatgcgcgcaatttc

SEQ ID NO: 42463 - DNA, 1109 bp, Heterodera glycines
  unsure (1)..(1109): unsure at all n locations
ttagtatcggcgtcattatgctgagagtgcggttgaattcccttgactgtagaccagaaaaagagatagccattttccaaaatttcacgatcaaatgcgctgagaaaaaaattccagancaaatagtatcggcgtcattatgctgagagtgcggttggaattcccttgactgtagaccagaaaaagagatagccatttttccaaaattttcacgatcaaatgcgctgagaaaaaaattccagaacaattagtatcggcgtcattatgctgagagtgcggttggaattcccttgactgtagaccagaaaaagagatagccatttttccaaaattttcacgatcaaatgcgctgagaaaaaaattccagaacaattagtatcggcgtcattatgctgagagtgcggttggaattcccttgactgtagaccagaaaaagagatagccatttttccaaaattttcacgatcaaatgcgctgagaaaaaaattccagaacaattaatatcggcgtcattatgctgagagtgcggttggaattcccttgactgtagaccagaaaaagagatagccatttttccaaaattttcacgatcaaatgcgctgagaaaaaaattccagaacaattagtatcggcgtcattatgctgagagtgcggttggaattcccttgactgtagaccagaaaaagagatagccatttttccaaaattttcacgatcaaatgcgctgagaaaaaaattccagaacaattagtatcggcgtcattatgctgagagtgcggttggaattcccttgactgtagaccagaaaaagagatagccatttttccaaaattttcacgatcaaatgcgctgagaaaaaaattccagaacaattaatatcggcgtcattatgctgagagtgcggttggaattcccttgactgtagaccagaaaaagagatagccatttttccaaaattttcacgatcaaatgcgctgagaaaaaaattccagaacaattagtatcggcgtcattatgctgagagtgcgggtggaattcctttgactgtagaccagaaaaagagatagccatttttcaaaattttcacgatcaaatgcgctgagaaaaaa

SEQ ID NO: 42464 - DNA, 1115 bp, Heterodera glycines
ataaacatttttttacttttaatcaaagtaatatgttcttttaaaagttttttgagtatttttggtcacagtttatttagaaacgaatgaaatttttgcaaataaagagaaagcatttagagctattaaacaacaaatgattaatgtttgattgcgcttctgaataaagtcatttcgaatttttaaagaaaaaacccaaggtggcagatgtgcaaacgacctagcaccctttccttagctctgctgggtgacccggaggaccaaaaaaaaattcggtagcttaaattcggtatttttttaatttttagtttttccaaaatgcgtcaacatttcattaatttttggcacactttttgccacatttgtgaacattatatgatggtccaacaggcgcctaccggtgaaattttaataaatttagttaggaggttaggagtgagtatttattaacaattttttatcgaaaaagtttgtttttcttttggaccatacataatatttgaaacacatcaaaatttggaaatcggaatgcggaatctcctgacccatccgctaattataaccacacaaaaaaaaagaaaaaccaaaaaatgaagatgaaaaaatttagatttattttttttattagaaatcttaaatttagaatataataaatatttatggaaaatgaatttaaattaaaatcaataaaaatgtgatgtcattttcaccctgattccataatattattgattattaaatgtgacataatgccactaagaagtgagtgtttaatcatacatacgtattcaattgtttattaaattaagaagaaatgcttacgttattgcacatttattaattttattaaacatacataattattacattttccctaagttctgttgtgtgtatttttttttttataatattcgtttatgaaaatatttatgaagtaagtgccggatatcctgtttttatgacattaaaatttgtcatagttcgtcatctctgtttctttttttgcgtaaatctttgcatatttaaaaagagtttcatattaatttttattcacaatttatcatttgttttcaactactcaaaagtattattaattctctaattaaggctttaat

SEQ ID NO: 42465 - DNA, 996 bp, Heterodera glycines
cctagttctgaccgtaaacgatgccaactagcgatccgccggcggatttattcgccctggtggggagcttcccggaaacgaaagtcttccggttccgggggaagtatggttgcaaagctgaaacttaaaggaattgacggaagggcaccaccaggagtggagcctgcggcttaatttgactcaacacggggaaactcacccggcccggacaccgtaaggattgacagattgatagctttttcatgattcggtggatggtggtgcatggccgttcttagttcgtggagcaatttgtctggtttattccgataacgagcgagactctagcctactaaatagttggctcattgcttctgtgggcacaacttcttagagggattttcggtgttcagccgcacgaaattgagcaataacaggtctgtgatgcccttagatgtccggggctgcacgcgcgctacactggcaaaatcagcgtgcttgtccttccccgaaaggggttggtaaaccggtgaaaatttgccgtgattgggatcggacattgcaattattgtccgtgaacgaggaattccttgtaggggcgagtcatcaactcgctctgaatacgtccctgccctttgtacacaccgcccgtcgctgcccgggactgagccatttcgagaaattcggggacggttagtgttccggcttcggtcggtatgcagactggaaccgatttaatcgcagtggcttgaaccgggcaaaagtcgtaacaaggtagctgtaggtgaacctgctgctggatcattacccaagtgattcctattcaccacctacctgctgtcctgttgggctagcgttggcaccaccaaatgcccccgtccgctgacgggcacaggtcgttcgagctgacttgtggacgctgcccaacattacggggcagctgcctcacgagccatgctttttggggtgcttccatacgtttggagctgtgggataccgctcagtgctgcacatgtt

SEQ ID NO: 42466 - DNA, 760 bp, Heterodera glycines
ctattccggaaggattcgagtctccccataaatctgggtcttcctggttcagggggactgccccgaaaacccaaaaaaaaattttttggataaaaattatttaaatgaactgactagataatatttaaaataggttatttctcttcctttcagtatccctgcaaagtttggtgcgcttctgatcagtttctgaaaaaaaagttaagcctaaactttttggcctgtttaaaaaggaattaaaaatttttaaaaattttattcatctccctttttgatagaaaaagcatcagagtgcctaaactaacatgtaaataaaatttggtgcgtttcagaaccctttctgaaaaaatatttaagaattaattttgcaaaaaataaataaaaacgaaagactcagattttcgaaaatttttttgagccagctagctcggcgctcatttcagtgtaagttagtcctttaccggggagtatccctgcaaagtttggtacgcttctgctcaattagcaaaaaatatgagtgatcgaattttcactaaaaaagttaagcctacattttttggcatatttaaaaagcaattaaaaaatttttaaaatttaataattttcctgcaccgaaggtactcactcggcctcttcgcggcctcgtggtgggccttcgccccccccccctcccacgccccttcagagcacgacaaatatttccacaaaaaattttgaaaaattgactagagcaatccaaacgctaacggacgacctaatg

SEQ ID NO: 42467 - DNA, 1036 bp, Heterodera glycines
  unsure (1)..(1036): unsure at all n locations
tcaggagagagaccggcgatgccgaccgctgcccgtcaatttcgnacaggcgtcgcaaaagacatttcgccaaaatattaattttaaattcaggacagtttcagtgttgaaatttaagcttgattttagcccggccaaaatgaccgggaccgggacttctcccagtcccattggtttgtccaaaaaaagtcccagcaaaatcccggtcccgtccgggctcaatgaaaagcaactaaaatcatcaaatttgaaaaaatacaatttgtaaagttaataaataataattttggttttaagagtataaaaagcatttaagactttcggatcgttaacaaataattaattttagcatttggttaaatttcggtcaatgacttgagtctcccgttcgaaagttttagaattacatcaattcttcaattttatttgagatgaagagattatggctgataaaattaacaaaacaaaaaggtactgatcgaagggctcgacatggacctggctggattcaggcctggatttttcctttaaggccctttttggcaacctggattttgcatggaattggattttagtccagaaaatccagcaggtctaagtcaaatatgaaaaaattccaggtccagcaatgcgtaaaaaacctttattttctgcataatatttttgaatttgttatttcaagtgaactttctaaaaatccaggtccaggcctggttggatccaggccattacaagtctggatttttcctggaccaggattttcctggatttttgtccaggaagtccaggcctaacattaaatccagaccagtttcttaaaatgtagagctctactgatcagtgcaaattttacatttcgtgaaaattatagtttgaacccgattttggacatagacgcaaatgtccctacagataatcagaaataattaaatattttgctgtagaatttatcattggtgcaaattaaatcaaaaatcatttgagtggtgccgtccatttgttctctgattagaaaatgtgttctaagtttgctgag

SEQ ID NO: 42468 - DNA, 768 bp, Heterodera glycines
actatggggtcaagcccagtgttagactaaattgttcctcacgccaaatagcgcatttggcgtaaatttttgcgcgttatttcaaaatttacactggtaaatgccttttttgtattttttattttgatcagccataactcgcttcattcctaacgaaaccgaacaaatttggtatctaaaaaaagattttgaaaaggagaaactttttctaagcgaatgttaagtaatttgacatctcataaaaaagttacgagagtttcaaatttttatcacgttaaaactcagctcattgactgctgattttaaccaaaatgctaaatttattcttttttctattgattctaaatgttcaaagtgattttgtacccttataaccaaaattattagaattttcgaatttgatgttttttcatgtgttagagacatgaaaatagtacgccaaaattagaggaaaagaaatgcaaaattttcatcatcccttaactttaaaataggatagaaattcattaaaactttatagaacattcgatgcagaatttttttctcaatcgatatgcaaaatttggtgtggatttaacaaacagaaaaaaagttaaacaggatgaagtaaatgttgttttttacataattaaaatgaagagatagtacgccaaagagagagaaattacaaagaaaaagagaaacgacgagatagtactaggcttttctctgcacagtggagttgacccatagtgctcacttttctttgcttttggcattatgtcttaa

SEQ ID NO: 42469 - DNA, 722 bp, Heterodera glycines
  unsure (1)..(722): unsure at all n locations
aaatgaatgaatggggtcttacatagacaaaccccaatccgccttggacaccaaccattttgaaggatacaatggcaccgatcatccacggctcctccctgctactctccacgaacacttggtcgcccggtcggtagacgactccttcgtgggactgaaagcactcgtattccatgttctcgcgatgtttgtagatgacctaaagaggggaaaacattggggaaggaaagattgtggtgactttttattgttttgccccttttcaattttttaaatgacgcactttttcatttttataaaggatttgaattacaaattaattcggtttgtggggggtacctacagtattaaaatattttgttgtggggttgggagggcaggggcaccacgagggaattgaactaacaaataagtgtgaccatccgccgatttcggcgtgcgttaccccccccccccccccctctctctcccttttccgactcttttccgtttttttttgtccatctctgacccctctcttttgacgccttctcgtcgcttctcctccatcgtttggcgttgtgttgctgccgttgttcctggcactgttgttggccatggtgacgtaataaaacggctctgcgtcccattgtccgttcaagaagtcgtccgccagttctttgacccgtgtccnctgcccaggaaagtccaacatttgcttgtcaatctgccaacaacaaatg

SEQ ID NO: 42470 - DNA, 1160 bp, Heterodera glycines
agagaatcggctgattcgggttcatttcgtttgcctcatatcgccttttattgaatgttttatgtctcagaaaacattgtcgtttctttccacgccgtttctctctctgaactttcccttggcgaggcgccgtcggtccgttgccccgaggggacgcgagtggtggcattaagcgaattggcagagagacagctgaacgtccatccgatcaaatatttctctggcacaattggcgtgaaaccattcacgcagaatcgttttgagtatttggtcagtcaaaagggtttattgatagaacgtccaaggagtgtttaggtatttttcgacaatggaatcgacgaatacgtccgcccggaggacattcggttgcttacggaccaaccgacggaccaatccggcaaattccaaccacgccaagcgcacacgaaggtggagtcgacgaacccagcgaaagccaatttccttaggtaatccggcaatgtttttctgaattttgtcgtcccattaggcagtatttcaatgcttaccccgattggccactgattcagctgaagaaattggagaatacgcagagaataatggtaatattaattttgtttcgttaattttaatatgcaatttttcatttgatgaaattttaaacgagactatggcgaaaataattttattttaaaatttcttaaatccttgtctttttcactgataatttacccaagtatttattttcctatggaaaaagcccgtgccgatttaaaattcttttcaggcaattcgaaatggggtcaaagagtcagccttcgttttggatgtcgatcgccaattgagccttcttcggttccccgggacgaataaagttgcgtggcccttgacgaaaaacgcgggccgcgactgcgtcaatttgtcctgtcgaggtcggccccgtctttgtcaaatggcgaataacggagtatattttggtttttgttgcagagcattcgcatgtcgacgaatgggtttaccggggaaatgccgaccgttttccgactttggcacaggcccaacacaacagcggagccaaagacgcgcagaaagcacgcgcaagttgtgccgctggcgcttacttttcacttttagccgtcttcctggcgcattggctcgcgcttttcctccagaaactccct

SEQ ID NO: 42471 - DNA, 682 bp, Heterodera glycines
cggatccagaaaatccggtaccggatccgatccggctcggtctctagtaaaacccaaaaagaaattatttgaaattcaatattgacagcacatttatgccatatttcatacgatttttttaaattccataatttggcattttatgcaataaaaatttcatccatagcatatgcaataataaaatagaaaatatatatttcaaataaattaaaaaatagtcaataaatccaatccatgaattcataattcattggctgttgctttctgtttcgctttcatcagtttggctttcaatttgttgaccacaatgagtaaagtcagtgacttcgttagttttacgcaattcattaacattggcatgggccaacaattccatcatctgctgaaattaattacatataatatggcatatttgtaaatatattctataaaaatttcgaattaaaagggaaaaaatatttttgcgctaataaggcagggatttttctatttgtagaaaatgcataaagccttctaatatattcaaaaatatgaaatagaaacgtttattttcaacctgtaaatattaaaagaaaatgttttatttttttcttctatttaattcaataaaaatttcgaattaaaaaggaaaaaattgtttttgcattaatcaggcaagaatttatatttgtaagaaatccac

SEQ ID NO: 42472 - DNA, 455 bp, Heterodera glycines
  unsure (1)..(455): unsure at all n locations
caaacaattatgtgggagcaaaaatccaacgcagaatttatgcacggggcgancagggaagcnagcccggaaggaggcggccttccagaaaaccgggcgcaccgaggcggggggactgccccgaaaacaaaaaaatcgatttttgcgtgcaaggggccgaccggggcacgcaaacaanaagggggagcaaaattccaacgcagaacaaaagaacaggccacagggaagccaagcccgaaggagacggccaccccaaaaaacagggcgcaacggcccggggggacagccccgaaaacaaaaaaaacgaaaaacgcaagcgaccgacaggggcacccaaacaaagacggggagcaaaaagccaacgcagaacaaaagcacaggcgacagggaagccaaccccgaaggagacggccaccccacaaaacagggcgcaacgggacagggggacggccccg

SEQ ID NO: 42473 - DNA, 857 bp, Heterodera glycines
ctctttgtcatagaaatctaacaaaaattcaaccttttagtttctctattaatttttaaaatttcaaaaaaatccgatgtgacatattattttcgttacgaaaagtccaaaataatgattaataaaaatccatttaattgtgccaatcgaatacaaaaattgttttttagggattttataataccaaaattgttaagttctgttgaagcttcttatgctgagaagtatagagtttgctcagacagttcgtctttttttcatttttatcccattttttaaaaattctttgttttatattttcgtttttttcaagaaatttaaaaatatttctaaaaatttataatatctgcttactttgcatatattattctgcttctgctgttcacattctactggtatgtgcaatttgttcatggggttttcaaaattgtcatcacaaaattgcgcgtcagtttttggcacttttttttggaaatttgtttgtggcattctgtcttcctgtttaacaagtggttcaattttaattttccctaattgaacttcattatcgggttgctgctgttcctctttcacctttcttgcttttgcctcctttccatcgctttgggtggcttttagttttcccaaattctgcgatttcgtgcaaaatacccttcgccatatttcatcaaccaaatggtcgttttcattttctccaactccgccaattccatcatctcttatataaaaaattataataataggaaagaattatattttggcggcctaacatttatttgttcatagaggttatataattataaaaacaatggcgaggcaaaattatttattttccatcactgcgattaatatttgta

SEQ ID NO: 42474 - DNA, 919 bp, Heterodera glycines
cttggggctcgggctcggcagctttccactcaaaaaacttagtttggctactattttctcacaactttggtcatccttttttttaataatcattaaattgacattgaagatgcgtcgccttcctcttcgagcagtgactttcgcccgaagtacgaccaaagaattggcaatgtgcgcggcgacttcactgaaagggatggcatcgttctgtttggggatgatgaacattggtacacattgtcctacatattcaggtgctcatttatccattcattaattccctccccaaaaacgtcatttttaacctttaattcgtcctttttaggctgaaggatgccagggcacggggctttcaccggtactgttcgctggtcgtgatcagtgcggacaaactgttgctcttgcgcaattacgacttcttggtccacaaattaggagaaatcattggcgatttgcaggcgatcattcttttgttttttactcctttattttcgtttttagcatcggacgggtgcctttttcgcattggaacagcaaagggacagcgaattgcgactcgcctccaatgtttcgcactcctccaaaggaccgcaacattggctgccgcaccatttctacccaatgcaacacaccgtggacactaagcgaagtctgaaggtgatcaccgactcggagcagatctttgagcacctgcacaggtaaatcaaatttgatcaagcgaatgagaaagagcaaaaaatggcacatttcaaaatttgtttctttttcctcggaaaaaagggggaggggcggcacgtgccccccccccttcccctcccactggaaacggtgctgagattgatgcatatccaatcatcaaaaggactgaatgggataaaggtcactttaagaatatttatgcgctccttagatttagaaa

SEQ ID NO: 42475 - DNA, 1451 bp, Heterodera glycines
tgtcgttccattgaaattacccgaattatgtcagggtccttagccacttctaaacacatttagaaacatgggacgccacgacatgcggcgcagtacacaacgtccgtttcgccaggttttgccccaggtttgcaacgagggcaaaaccaaaacttgtcgcgcgagtgcacggtgtggccgctggcacatgaatgcatcaatggccacagatgtatgtttttgatgactcgattaatgcgttctcgcttccacaatttgaagccgcagcaggcgtagttgtgatagcctttgggcggggtgtcgcgatgactccgaggcagatctttggcggccatgcggcggcgccccttgcctttttgcttggaagcctaaattttttaaattgttaagtgttatcattccttacagatagtagtatttgtgaccaaatgtaagataagcttacactggtataaaataccaatgagcgcaaatatgctatagtacctttacggcggtcttttttcgcttgttttttggcggctgctgcttcgatgctgctgctgccgatgtgctagcggtcgatgtcttcgcccttttgctcggaggtggcgatggtgatgccgacgccgaagattcagaggaggtggaggaggagacccggtttcttgccttagccaccgccacaccggcgccctgttcactggcgttggattcagtgtcagacgattcgtctataaatataattgttattaacaaaaagcaatgatcccgttacactcaactgtaagcattgtttacagttgagtttttataaatcttattacctgtaactgcttcctcgccacgctcttccccctcttcttcctcgtcacgctcctcctcctcatcttcttcctcaacctgctcctccgagactcgctcctcctcctcgtcttcttctctgtctcgcaagtcctcggcccgctgacgcaacaccataagctgggccatgcgctgaggcgtgagctgcagtatgttgcggaatattggctgctgctcaagctgacgcctgggtgcaggagtctgaacaacgatttgcggagtgtggaactcgttgggcagttccaagtcgtgcgcttgttgcaccaaaggagagtctcgaagacccgctataagtgtaagctttagttacagatgcaaaataataagcaaatcacatccaacaaaccttggttctctgcaaggacttgtgcattccgtgccagcacttgctgacgcagatcttgctgctgtggcgatggcgtgccttcagatggagtgtagacgacaacgcggcggcccatgtcctgttgttgttgtggcgctaagggcggctgacgcaaaagcggtgactgatgcggcggcggcgaatcaggagaatcgaagttgaggggtgttgtcattgacgcgtcgcggcgtcggtgactgatcacgcaagaggaacggacgcg

SEQ ID NO: 42476 - DNA, 980 bp, Heterodera glycines
  unsure (1)..(980): unsure at all n locations
ccatagtgaaaatgtttgtacaacaatttcatgccgatctttttcacattggtcatggaagttgaactgttacaaatcgcagaaagcgctgatgacgaagatgaagaggagaataaaaatcacaaagaaaaattggcaaaaattcttaatgatttaactcaaacaaatgacattggccaaatgcttctcgcggcccatattaaaatttacaaaaatgaattggatgcaaaaaaagcacttattgatgaaatttctatcaatttgaaccaaatcaaagcaatagccggcatttttcagcaaaaatttttgaaaatccgagaattgatgagctttgtggaagcagaatctgtcgtatattttttaaattaaattttatagtaatctttttttctatcattttttaggaaattaaacttaagaaattgaatgaattggctgaaaaaacacagaaaatagtaaaacaattgaaaattgtgaaaaagttggctgcggtgctaagtaaaaaaacgacggaagattcactgagcaaaggttagttttcgcgatttacttaaatttaatcgtttttttcaaagaaaaaaaaacattggaacagtttcttccctgaatcggcgatttttttttaacaatacaaaaacggagaacctttcgaaaatattttttgcgcattgaaattaataagaatttctaagacaaaacttttaattcgtatcaccaaaatatagagaaaaaataattattatttttccccctaataaattttctttaaaatttcatgtttaaggtctttggatagtttaaaaatttagtctttataatgcancagaaatcctgaatgccgacccaaaacagaaagtcaaatttatttcgtgtcgaattttgtgttcggtcaaaattggtctaaatggggctatgaatcttgatcacagattttggaaaaatacatatttaacgntctacgtcagtcggccccgcacggt

SEQ ID NO: 42477 - DNA, 1093 bp, Heterodera glycines
ttttttgaaaaatttccgatttcttgcaccgcaaaaaagtggttttgaaaagaaaaaaatagtcaaatttatgaaccgttaataatttgatttccgatcaactttttaccgtcggatccaatcgaaaaatcttagtcgacccatcagccccttttaatgcatcccgccagcccctaaaaatttatttttcagcattttttgatttttggaaattttttgaatttaattgaaattttttcgaattttccaaaatcccgcaatcccgcacgggatcccgcaaattttaaatgcgggatttgcgggattaatcccgcgggatcccgtcccgcaaaaaattttgagttccaatcccgcagcgggatccgcaaatttgaaatttccggtctctagtgaccaccctcacttttttagatcataacttttttatacttggttaatccaaacattcttggtatcattcgagagcttaaagtttagggaatttataaatacaagaaaatagcaaatacttatattaagaaaaagaattacaatgagaaaattcgaaattcataattttcgcgtatattcaagaataattttttgtctattgcctttatccgtgatttttgcatacaaaaacttccctaaactttaagctttcgaatgataccaagaatgcatggattgatcaagtaagaacaaagttatgatctaaaaaagtgcaggatggtcactcattggacgcgtaaagtggaatagagccaaaattaacaccattgttctgaaaaagggtaggaaaagaaatacacataaaaaatccgcaatttttcagtaaacagttagtaaaaggatcagagaaaccattcgtttcttgactctcgacagagggaaataagaaaactgagttgcacggttggttaaatagggccatgtgttcgaatccatttgccaacaaatatttttaaaaattgtttctcggggtttttgggaccactgatcaagaatttaacattcacttcgccaaattcagaaccctgacccgaactagaaacccaaaataatttttttttaaatttacaggcaatataagctgaacccttggccaaaaacc

SEQ ID NO: 42478 - DNA, 933 bp, Heterodera glycines
gggggcgaaggcccaccacgaggccgcgaagcggccgagtgagtaccttcggtgcaggaaaattattaaggaagagagttcattatttatttgtcttttgcataattaattcataagtattttacagaaactgctctgaaacgcaccaaattttatttacatgttattttaggcactctgatgcttttctatcaaaaagggagatgaataaaatttttaaaaatttttaattcctttttaaacaggccaaaaagtttaggcttaactttttagtgaaaattcaatcactcatttttcgagtagtgatcagaagcgcaccagattttgcaggggcctaaaaaggtcaaggaaaggcgtctctgcgttgatttagcagtagtacctatgaatttaaattttctatgaatttttaaagttttttgaaatttttttaagtgcaaaagtggtggtgtctgcaaaaaattttcaccgggtttaaaaaatctaggaaaattagtaagcatttgtagtgttccgatacgtatccctgcaaaatttggtgagcccctgatcaattacaaattatttatggacgatcaaatttttagaaatttttatttatttttgcataattaattcataaatatttttttcagaaaatgctctgaaacgcaccaaattttatttacatgctagtttaggcactctgatgctttttctatcaaaaagggagatgaataaatttttaaaaatttttaattcctttttaaacaggccaaaaagtttaggcttaacttttttttcagaaacttatcagaagcgccccaaactttgcagggatactgaaaggaaaagaattaacctgttttatcacattagcttgtcatcagtttttataaaaaattttcaaaattctgagtctcctattattttatttttttttcaaaattttga

SEQ ID NO: 42479 - DNA, 903 bp, Heterodera glycines
atttttaattcctttttaaacaggccaaaaagtgtaggcttaacttttttagtgaaaattcgatcactcatattttttgcaaactgatcagaagcgtaccaaactttgcagggatactccccggtaaaggactaacttacactgaaatgagcgccgagctagctggctcaaaaaaattttcgaaaatctgagtctttcgtttttatttattttttgcaaaattaatttttaaatattttttcagaaagggttctgaaacgcaccaaattttatttacatgttagtttaggcactctgatgctttttctatcaaaaagggagatgaataaaatttttaaaaatttttaattcctttttaaacaggccaaaaagtttaggcttaacttttttttcagaaactgatcagaagcgcaccaaactttgcagggatactgaaaggaagagaaataacctattttaaatattatctagtcagttcatttaaataatttttatccaaaaaatttttttttgggttttcggggcagtccccctgaaccgatgcgcccagatttatggggagaccgaatccttccggaatagcttccctatagcctgtactttaattctgcgttggatttttgctccccataattgtttgagtaccccaaacggacacttgaaaaaatcgatttttttgttttcggggcagtccccccgaaccgatgcgcccagatttatggggagaccgaatccttccggaatagcttccctatagcctgtactttaattctgcgttggatttttgctccccataattgtttgagtaccccaaacggacacttgaaaaaatcgattttttttgttttcggggcagtccccccgaaccgatgcgcccagatttatggggagaccgaatccttc

SEQ ID NO: 42480 - DNA, 1071 bp, Heterodera glycines
  unsure (1)..(1071): unsure at all n locations
ctcaaactcggccatcgttcaatttttaaaaatttcatctcccccttggctgtaaaaaatatgttgatttggcgttagataaaatatgtccagtcaatgtttttttgttaatgtgttcaaaagaaaatcacaacgaattagaaatatatttaaatataaaatttaatcaattgatcaatcatttaattcatcaatcaataattaattccaaaaataaattaattaatgaattttaatatgtttttaagaatttaatcataaatgaaactcttacatgtaaataaaatttccaacaatttaattaaaaataaattaagttttactttttggtatccgaaaagaataatgaaaataattttaaattggatagaaattatttatagttaattatacgtaattttgaaatattataataatttctaaaaattaaaaaaaaaatttgaaaattcttattaaatagtaattttataaataatttatacataaataattttacaattgaaaattgaagaattaattttcgttcaaaattaataaaattttgatatgaaaatagaaacaaacaaacatttaaaggtaattaaaacaaaaaattattttaaaaaaacaaattctcaaaaattttaaattagcttgaatcagttttaaataatttattatttaacaaaaagctttcgttgataacaaaattattcaaataaattataatcatttaaaataattgaaacactcaatgtatttatacgaaaactagaaatcaaattttataaattgttccaaatctaaactaacaatatataacaaaaataattaactaaaaaataaaattataataaaaatatatattatccaacgacatgaaaaagaaagcattttttaatctctaataaaaaaacatcgcgtactcaatagattgctgcaaagtgacgttagataaattaagcaaaattataaaaatatgaaaataaatttatcgaaattanactaatgattatacataaaagtacataaaacaaagctaataaccataccccgccgcaacacatggtcgacgtaagctcaacgcgaggg

SEQ ID NO: 42481 - DNA, 1713 bp, Heterodera glycines
  unsure (1)..(1713): unsure at all n locations
tatagcatatatccaatagaattaaatgattcttcggctccaataatttcatccggaaatgggaaagcatttggtgagaataaagttttcgtaatagtaaaattaaattgaaaaggtttttattaagcctgacatcaattaagaaaaatatttatatctaattttataagaaaaggtgacaaaaacaacagtcttgtgaacttaaaattaattagggctaaagcgaaattttaatcactagtagcaatttcttatttgtaatatttttttccttgtttgagcaaaatatttaatatttaaaaaatttattgtcttacatactgtgtgtttataggcatgaaaattatcgaaaatatgctaatctttttattcttataagaaaatactatatatccaatttcgtttcgggaattatcgtgtctctattgcaggcatttaacattataaatatttttatttttaaaagcatggaatataaattttcaaatggcaacaagcggctgcatacaacagtggattcctggctgagatactggagctatttgtgattttcaaaaaaaatttagagtcaggtgcaaacgcccgcaggaagctaaaggacagtcgaaagaaccccaaaaaagattttagaaaaatcataagtagcttcaatatcttatcgccagaaccaattgctgcacgcatccgcttgttcccatttaaaaatttatattccatgcttttaaatgcaaagatttttataatggtagttgcctccgatagacacacgataattatcgaaacgaaattggattatagtatttcgtcataagtagggcccggatttttatgtgctaaaaatcctgaaatatgtaataaaatatgtgctaaaaaatgctgaaatatgtgctaaaaacccccaaaaatgccaaaatatgtgctaaaatatgtgttaaaaattgaaaaaataagtgtgtttttgcataaaaattcccaaaaatctcattctttatcatttttagcccatacaacacaaatcaaatacatttcgaagtgtttggggtaaaattgtctttttttgataaatcatttctataaattgaaagttccagcagagaacttcgaaatccaatgacgaattaatgaattcgagatttcattagtttctacaatcgaagaaaacattttttaatttgaaaattatgttaataattaggaaaaaagtcgatttttaggggtgtatttttcaattttcttgtatttttattgcaatttttctcaaaaatgccaaaatatgtgcaaaatatgtgccaaaccccaaaatatgtgctaacatattttatgtgccaaaacgccaaaatatgtgtttttatgtttttataagtcgctctaaatcaaaaattgttcggagataatgctatttttgggcttctctcgccataactaagccgcaaaaaaaatatgtaaaaacataaaaatccgggccctagtcataagagtaaaaatatttagcaatatttcgatnaatttcatgcctataaacacacattatataatacgataaatcttttaaatgaaaaaatattttgctcaacaataaaaatattataaataaaaaattgctattaattgattaaaattttcctttttaccccgaattaattttaagtacacaaaaatgtttgtttttgtcgccctttcttataaaaattaaaaaaaaatatttttcttaat

SEQ ID NO: 42482 - DNA, 449 bp, Heterodera glycines
tgcactcagtaatttttttactttttcatcatttataaaagcatcaaagctagagattcggcttccaccaattatttccggtgagtttggttttcggttttttattaaaaagaaaatcaaaataatagcaactatataaatccttccttttggaatctccatcctattagaataaattaatttgaataaaaatttgttgtaaaaaatatataataaaaaactaaagccaataaatattatggaagcatttttacattaatcaatgaatcgattttacattaataaatattttattatacgaagtgtttgtttactaatattaaaatttattgctcgataattttatacaaaataatcagtaaaagacatgagaaaaaataacgggtctagttaggcggttttttgactaacgccccattgtggcggtttttgactaacgtctcagcacc

SEQ ID NO: 42483 - DNA, 1471 bp, Heterodera glycines
  unsure (1)..(1471): unsure at all n locations
ttctatcagttttcgggtttgatttaaacacgctgncctatgaaanaatggagtttatgggatgtcaaattttgggacttttcttcgacgtggccatcagcgggttgtttcgtgacaaaaacaaaccagttntgatgttattcgaatgagctagacgcgctctacattttcaaatgtatcaacaaagggtctaccgccactccctggcgagatatggcctgtcaaagcagaacggggccaataaatttgaatttttgttaatcttcggcagttgcctttatttcgagcctactctacttgtgcatcttttcccaatatggcactgcttccgaattattgaactgtttcacgactgattgttgagataatttttttttccgattcctttatctccaagcatgagccttataagtgattgttcctatccttctcttgaaaaaaattgtcactaaaaaaaacacgttttctgaatattaaaaacaaaaatttttagacactttctaaagaggaaggaaaaaaaatttttcatttgcctaatatttatttatactgttgaactgttggaaatgcagctgatgccgtcggaaaagctccgattttttggggaagtttttttctttcagtttcaccactgattgttgaggcaatttttttcgccaatttcttttgtctacaaacattatttattgcgtttcatcctgtagtgtgtaaaaaattttcagtaaaaaaaacttgttatctgaatatttacaagcaaaatttaagaccatttccaaagaggaaggaacaaaaatttttgcctaaattttatattatattgttgaattgtttgaaatgcatctgttgtctgccgttttgaaatttttcaacttttcgcgaaaagatttcccagaaaatgcatgggacaaataaaaattaaacttctattatgatcaatttaaatttcctatcagtttcgggtttgctttaaacacgctggcctatgaaaaaatggagttgatgtcaaattttgggacttttcttcgacgtggccatcagcgggttgtttcgtgacaaaaacaaaccagtttgatgttattcgaatgagctagacgcgctctacattttcaaatgtatcaacaaagggtctaccgccactccctggcgagatatggcctgtcaaagcagaacggggccaataaatttgaatttttgttaatcttcggcagttgcctttatttcgagcctactctacttgtgcatcttttcccaatatggcactgcttccgaattattgaactgtttcacgactgattgttgagataatttttttttccgattcctttatctccaagcatgagccttataagtgattgttcatatccttctcttgaaaaaaattgtcagtaaaaaaaacacgttttctgaatattaacaacaaaaatttttagacactttctaaagaggaaaaggaaaaaatttttcatttgcc

SEQ ID NO: 42484 - DNA, 1019 bp, Heterodera glycines
ttttaattttagcgtactgttaaagatgatgatatcggaaaatttttgaataaagaatattttttgacacgaatgtttcaagcgctaaattaaatttttcagcaataaaaaatccctttttatttttttcggtttttgcgtaatttttctttgttcacaaaaattcgaatacatatgtatatttaaattatttttatttagtatttttgttggagggttaaaaaaatgcgttccgccgccgaagagtcgcagcaacggacagcggccgattggagggcgtccattttgccaattttcctcgttttttactcctttctcaaggaggtcaaagttggcgagccgtatgtacgtttaaagcattttgaccgattcgggcacaccctttttcattgcagctgtacaaataccagacggactacctgaatttgaccgcagctcaaatcactggcgaagtgattggaaaacatttgaaatgattaaaaaacccaattttcagatttatcccttcacgccgtacacttacatggtcgcactaattcccatctttctgcttaccgacttagtgggtttttttagaaaaaccaatcaaatactgggatgtttctgggaaatcgaaacccgaaaaaattttgtgggccacaatttttggacattaaaaatttgaaatcaaaattttgccaccaagttttgactgtgcccttggcgcaattttgaaccatttcaatacaacatttgccaaacagctgctctacaagccgacaatgttcaccgaagtgctgggccaaatcggcttccgtctttccctcgtcttcggcggctccgtcctctcccaaatccttggccaaatggcctatggcattgcgtccgcctcggaggtggcatttttctcctacatttacgctcgtgtggagaaatctcagtacaggaggtgggcacaaaatgggagcttttgtggatttttgacaattttcattgacttaaacgaaggctgaccagtggacccgagcggggacaatggc

SEQ ID NO: 42485 - DNA, 772 bp, Heterodera glycines
tttaacttttaattaacatttggtgcgtttcagagctccttgctgaaaaaatacttatgaattaattttgcaaaaaatatataagtaatgaaaaagtcagaattttgaaaaattttaaaaacaacaagcgttggcattttttcaggttaagttagtcctttacaatggagaaggcctgcaaaatttggagagattatatcgattttagtgcgctaggttcgatgaaactttttaaaatataagcctaaactttttggcctgtttaaaaaagaattaaaaatttttaaaaattttattcatctcccttttgatagaaaaagcatcagagagccttatttaacttttaattaacatttggtgcgtttcagagcagtttctgaaaaaatatttatgaattgattttgctaaaaaaataaaatagtgaagctttaaaaattaataaaaaattttaaattcagaattactggagttagcatcatagcagtgcttttccttgtctttttgatgctctcgcaaaatctggttcgcttctgaccagtttataaaaaaaaagttaagcctaaaatttttcgcatatttaaaaagcaattaaaaatttttagattttttattcatctccctttttgatagtgaaagcatctgagtgcctaaaataacttgcaaataaaatttggtgcgtttcagagcagtttctgaaaaaaatatttatgaattaattatgcaaaaaacaaataaataatgaactctcttccttaataattttcctgcaccg

SEQ ID NO: 42486 - DNA, 785 bp, Heterodera glycines
acttttggaagaatgtgtatttaagcatcaatttaatttaattttaatttatttataatttaataaatattttaggcgcggatttccggaaatggcccttaataaatgaggcacaaatgtccaatttctcttcttttttttcgggaacagaaaaaggaaaaaagcggggcggaattcccgcttttttccgttccgtaaaaaaccgtaaaaaatatcgtaattccgcgccgggaagggaaaaatttttttacgaaaaaaattttgattatttaaaatttttctttattatttttaagtaaaatattatattttaacattttaacattgtgtctacgtaaatgctaaaatacagttttcaatggacaaaaaataacaaaaaatttaattaaattgattttcgaattaattgtataaaaaataagcggtacaaaattctcaaacgataccacaaaaactggtaattttctgaatataaaatttttttataattcatattttcgttagcctattttaaaattccaaaagatgcgaattctatgccattttttgataaattttctgttttttgattaattggcaatcttacaatctttttatatgttctgtgtgtgtatacataaagaccaccttcctatctttaattaatatcaagggaatataaagaatatgaataaaaatgtaaaataacgttaatgcttaacataaacatttattattaagtaattgagctaattactcaaagctaatacaaaaatacccaaaaatgaacaaatcccgaaattgtc

SEQ ID NO: 42487 - DNA, 956 bp, Heterodera glycines
tgaatttgtaaatttttcaagaatttttcctaaaaagatcgttgaaaaactatgaaaattttaaaaaaatttaaaacaatttttcgggggaactgacgggttgagggacgagctgttcgcggcactgatttccaaaacccggaaaatgccagattttcgagacaaaatggcaacaccgtgtttctgtggttgtgcccaaattttaatgccaatgtatgttttagctgtgtgtgctgcactcgttcattttgttgcccgcactgttctcgttgatccattgcgcgaccaattgcaacggcattgggctgtgccaacggcgaacgatgccgacaaagtgaacaatggaaaacggcggcggcgccattgatcactttgatcacttaccaatgatcttcttttaattatgatcgatcactctttggttcactttttcgggaaaaaaatcattcttaaatcacattcttaatggtattgtcattccctgatctgctggacacattcatttgacatgattagagatcggcacgttcaatttatcggttgaatatgtcggttttcaaaacgatttttaaataatcttattgtaaaaaatcgatcgagaaattttcttgtttttttttcggtatcggttttttcagtttttattgaaaaatttcgatcgaatcacttgtccaatctttagatatgattatgatgccaaatttccatgcttttttacactttgttatcattcattcccaaacaaaacatatcatttgatcggtgctaggtcattatttaaaaaaccatcattattttttatgtacaaaaacggagatagcattcacaccccagcgacgttccaagtcatttttcatcgcattggacacacaaaagttaaacgaagaccttcgaccgaaaaatccttcgatcaaaccgaccaaataagatatcctaaaaaggaaacattttcggta

SEQ ID NO: 42488 - DNA, 1454 bp, Heterodera glycines
aaatgcagatgatggcgaggctcgtttttaggggcgataaattttaaattaaaaaaaaaaagttatcccaactctcaaaaacctattttttactaaaatagaaaatcttgaaaattaaatttagcataattttcttatcatatttcattaaaatttccaaaaaaaaatttcagggcgcctaaaggacaccgccgaacaccttataccttatttttttttgaaaatttgatttataaatggcaaaaattgtctttttcgatgcaccactaaaaattcctgcttttctccccggcgctgaaattttttgtaaaataataatttcattttaaacaattatcagccatttttttacttaaaataattaaagattggaccacaatgtgatgagtcatgaaaaaatttcgctgatttatttgcatgcatgtgcacttagactgaccacagaactcggcattttgatcaacgagttggaggaaattggcacagaatggacgagtgccgacgcaattgacgaggtgttgaagtcggctgctgagcttgaaatgaatcgtcttacaattttaaaaatgtgataattatgcttctcaatttattagggattttcatttttaggattggataattagtacagttcggcctggatccaggtccagttcatttttcggcaacctggctttttcctcgatttttgtccaacaaatccaggacaaatatgaaaaaatcccggtatgggtccaggttatgccacgaaaaacctggatttaaatttcaaaaatccaggcccccaagcctcgaaaagctttgtttttcctggacctggtttttcctgcgtttttgtccggaattcataaaatccaggttcagatttttcaaaatgcccagctctactaatgagttgttaattgaaatgtgttgtgttcaaatttgttgaatcacatttaatacgctagtagattgttatttaattgatttgatttttttttgatttgttgaaaaaataaaaatatataagtataaaaggaaatattttaatatattttttaaaattaaaattaataaattaaataaatcctttaatttattcctcttttatcatttatgtaatttttcgattttttttataaaaaaatatatacattattttctaattcccttgaattcatcagacacctcactataaatgtggtcggcgattttcgtccaatttcacgaaaaataaaattttaatgtttattggtgtgtgtctttgctcgtctctattattttgaaaatgtttttaagtgagtttttattagttttttattttttaatgaattaaaataattaagtttttattcgatgtatgaaactaaacaacaaaacaattaaagatttttctttttttcatataatttataatgacatttcacagtttgttcaaattaaaaatatttattaatttaactaaacaaatt

SEQ ID NO: 42489 - DNA, 1213 bp, Heterodera glycines
aggccgcgaagaggccgagtgagtaccttcggtgcaggaaaattattaaattttaaaaattttttaattgctttttaaatatgccaaaaaatgtaggcttaacttttttagtgaaaattcaatcactcatattttttgctaattgagcagaagcgtaccaaactttgcagggatactccccggtaaaggactaacttacactgaaatgagcgccgagctagctggctcaaaaaaattttcgaaaatctgagtctttcgtttttatttattttttgcaaaattaattcttaaatattttttcagaaagggttctgaaacgcaccaaattttatttacatgttagtttaggcactctgatgctttttctatcaaaaagggagatgaataaaatttttaaaaatttttaattcctttttaaacaggccaaaaagtttaggcttaacttttttttcagaaactgatcagaagcgccccaaactttgcagggatactgaaaggaaaagaattaacctgttttatcgcgattagcttgtcatcagtttttataaaaaattttcaaaattctgagtctcctattattttatttttttttcaaaattttgaagggcgggggggggcggcggttgtcgctcgccgagagtttgccccgagggatgaaatttgtgggggtggggacaccgacaatttagttattattttttttggctaaatccgcaaattcaaagacaccttctaattacgggtcattcttttctccctttccctctttcccttttgtcatttcgtttctttttaattgcccctttcttttttttttcttttttttgtatttactgtaattacggttttatgtcttttggtatttatgtgcttattaattaattgtttattatataaagaattttttcatctttcgtttttgcgtttgtttctgtttttaattaattttgaaaatgttttcccgtgtcactcttttttttttactttttgccattgcgcgaatttacgccatcgccgccactaatggacatccgcccaccccattgggtgccgggtgtttggaacgggtgagaagcgaatgggactgccaaataaaatccgcctctttggggcaataattttttttctcacatcattttatgtctgagagaggttttatcatttccttggacaaaaaatgggcccaattaatatggattaatttaattaatta

SEQ ID NO: 42490 - DNA, 707 bp, Heterodera glycines
gaatttgttagacgatgctcgaaaatcttttgagtccttcttggagaagtgtttcccaattttttgttaccgatcccgctccccatttccataaattcccgaccctcaagtcttaatacaaataaagtaattactttaaatccctacattgttctcgacccttttttcccaccgaccgatcccgtttaacgttttaaatttgtaacttcaattctcgacagaaattaccggtcacagcaggtccccccggtttttgagtcccaagaatctcacaaattatccgttcacagcacatgattgatcgctcggcaggactcttcttctcacaattctcccatgttaattaaattatccaaaaccttttaaacaaatattccccacatttcccctaattaccgcctaattacccaaaattaggtagttagttgcttttgcggttgcccttttccctcggtccaatccgtcccattgttatggcggcacgcggactttaagcattcattcttccattctccgtcgtcctccgcatgctttttgccgcccttgctgctgaagggcaagttcgttttcggttttttgtttttgcccgccctttttcccttcactttgtgtaccaaaatgtcggctaaatccttcgcccctttgtcccccgccgccccttccgccgccggcgttaatctctcccgccagccgactcctccgcccgc

SEQ ID NO: 42491 - DNA, 778 bp, Heterodera glycines
cgaggacccatgccattaaaaaaggagtcatgaaggaattttgtgactcaaatagattttaaccccataaacattacgttttttgagtgctgtttctcgtaattcaggtgaatggctagaaatttttgtagtaatttcagttttttacgtttttggataatatgaaaacgaaaaatttggctgccgcatggcgcccaaacggcggcgcccaatcggcggcgcccaatcgtacccgcgcccaatcggcggcgcccaatcggcggcgcccaatcgacccccaccgccaaattagtcaatttgtctattcaacggataattatttcattaattagttaattgaaggtcggcgatcggagcgactcgtcctgttacatcagcagaaagatgggcaaagcgaaggaggtcggcatcgatgccaagctgtacaagttgagcagcgacagcaccgaagctgagctggtcaacctggtcgagtcattgaacacggatgccaaaactgatggcattattgtccaagtaaggcccgagaatttgttatgcatttctataattggcacggaaacaaatccagaaaaggattttacaatgatcataaatagatcactttgattctatgtttttttttgaaaaaaaaaataatttttcgggagggggagggcgtagccagcccttggctttggggggggggctgagtaaaaaattcgattttaggggtgtattttttggtttttgaaatccgattaggggggggtattttacaaaattttttcgccaaaaa

SEQ ID NO: 42492 - DNA, 509 bp, Heterodera glycines
tagagatagacctggacctggatccaggcctggatttttcctggatccaggtccaggccatttttcggcaacctggatttttcctggacctggattttcctggatttttgtccaggaaatcagggtccaggtcaaatgtgaaaaaaatccaggtccaggtccaggcaaaacaggaaaaaacctggattttcctggacaaaattttagaatttattttttaagtgaccgatgttttttcaagttttcaaaaacagattaaataaatttaaaaacacattattattattaattagatatttagatatatctaagcaattaattcactttttcaaacacttttttgatttttaaaataaattccaaaaaatccaggtcaaggcctgaatccaggtctcgaggagcctggatttttcctggacctggattttgtccaggaaatcaaggtccaggtccaacatggaatccaggtccaggtccaggcttttttcaaaatgtcgatctctattcaa

SEQ ID NO: 42493 - DNA, 902 bp, Heterodera glycines
tcatggatcccttcaaaaaaacaattgacgcaacaacccttcttggaactgactgacgagtcaagttggtgtcgacgtccttctcctcactccaattggggctaatgctctccaaagcgagtgaatacagcttgaaaaagacgaacaatgggcaaacaataaataaaaaggagcattcttacgctaatggagccgccaaagtcaaagtccgtgccgctgtccgactcaaagaaaatctcaactgactgaacataaagactcagtgtttcgatcacccggtcagcaaaagagtaggatttgcttctgaaaatggccaaaaagatggaatgcaaaacttatgaactgagaagacgcggtttttggttgggaattgcaagtgaatgcgggcgaaaccaaacggacggtgacacgaatatcgtcgacatacttaaaacaacaggataaaacggaatgaaatctgttagtccgatcggtaccaattggatgggagcactcctcagtttgttccaacttggaattttaatgctgactctaaacaaacccaaatataaacgcaaatggccaatgggaatacatccatgccaaaaaatgacctatcgcaacgagcactgacaatttttagccacgggggcaactctaatttttcagccaacacttcctcattgagttccaagtctcgcagttggcctttcccccgtaacaattccatcgtaatttgttccggtttcaaatttcgcgcaaacctaaacaagaaaaaaatgttttgttgaaaattaatggcatctatcaacttacgccgaaagatgcttaatgatttgattcttcaaaatcgaagtcatttcacaaagagataaagcataaaatacaaatgaaatcttatatttatatgaaaaaataaatgg

SEQ ID NO: 42494 - DNA, 1273 bp, Heterodera glycines
  unsure (1)..(1273): unsure at all n locations
caattaatgtctcagtaataatattattnattaacctattttgggaacagtttatttaccccaccttcacagtgttgcacatattccgagaacaaatgggcggtcaactcgcgcgccacaatggcaccggcatggccttcgatgaagcggagcaacagaatgccatccggacgcagtgccaagttggcaaaacggtgcagcatgggcgccgcttccttggaactgaccaggtcctgttggacaaatcacaaaaaattaccgaaaaacttggaaattttcggttttccgaaaatttagaagcctaggtttcttaagtgatagaaaattaaataaattaaatttttaatttaataatttttatgttcattaaatattgcaaattggaatattttgcaattttttattgccacctggaattttgcttgtttgagcagttgacgaagctgacgttcacgggccactggtggcaccaacgagaacaaacagtaaaagaagttgatcagagttgacttaattataatttttaaaaaatagaaattgaatatttaaattaaaaaaaaattaattaattcggaaattaccacagccacaagcagaaaccaaaaccaaataaacaggtagattttctaaaaaatttgaggattttataaaaatttatttcactaatccacctcattgaacatgttgatcatcagcacacattgaacctaacaaaaatgaaattgaaaaactatataggtaattaaaattgaggggggaggagattatccgaactttttggggccataatttaaaaaatttaaagaattttagtgtccggcggtgccattcagctggcgccgattttccccttccctccctcttttatagccccccgccctttttaatagaaaaataaattaaaatattatataattaaattccattgatatctcatctgaccgtgtatcggtgcatattggccaaacgacgaacacgaaaatcacacaaagaactgcaaaaaaaaatcatattaataaacatttcgcaatttaaattttgttgtaagttttaatgaaaatttctaagctatattttctttatcaaaaataatttacaaaaatatttgtagaaataaaataaaaaattacgagaaacgaacgaactacatanacgaaaatagaaaagtttatttgctaataataaatatgacaaattntctcgtcgttttaatttaaaataaaattttaaaaatttttatactagaaagtaacaattataaaattaattcggc

SEQ ID NO: 42495 - DNA, 945 bp, Heterodera glycines
agtcgttggtttttgtgtggtcgttgtaaatgcagcagttgccgttttgcgaccgaatgatcattgcttttaccaggaattattatgctgcttttacatacattaagcactgctggacaaatgtactaatctaaaaaatcaaaatttattaaacacagtcagtttcaaaggcacgcaatttgagaaacgccaaaaatttggcatttttatggaggctgcaatttgaacttattagttggatattttctaagaaatatttccaaagctttttattagctggtaacgaaaagaacattcgcaagaaatccaatttacgtgaaattcaaaaaggtaaatttaaaaaatgccataaattgtgcgcaacattccatttggcaacaatttaaatttgttgcactttgttgttaatggataaaattgttcctcccaaaaacaatacacataaaaaaaaaatttgtgtggcactaataaacaggcaaagcattcattttcattcattcattgttgaggacccacgaaaaaagccaacatcaaaaggggggagtaagaggagcaaaagcaatacacacataaatgggcgaggacgacagaagaaaagagagagagaaaggggagggaagagggaagaagacgattttttgatgaaggtgaagtgaaatgaagtcgggaaatcggtcgataaatgggaaaagacaaagaaaaaaggggaagagagcgcgggaataaagcgaatggacgccggaggggtgggggaggggttggatcagttcagagcgagaaacacaacactttctctcccacctccgtccatggctatgtatgctgctgatgatgatgatgatgatgaagcatctcaccatcagcggcagcaggctcatcctcctcaaaaacggcggcgtgccgagccgtaagtacagccgccgccgtcgtcgccaaaaatcattc

SEQ ID NO: 42496 - DNA, 898 bp, Heterodera glycines
tttgaaacgccaaacaaaaaaaatttcttgcccaaaaaaagttcttttttttttttctcttttttttcccacaaaattgtacccaacagttgccttttttggtctggccctatcaaacattcttagaatattgaaaacgcaaacaaaaaaaattcttgaccaaaaatggttatctcttttttctcatttttttaccgcaaacttggtaccaacagttgccttctcttgtctggccctatcaaacaatcttacgatatttgaaacgcaaacaaaaaaaattcttgaccaaaaaatagctatctcttttttctcatttttttaccgcaaacttggtaccaacagttgccttctcttgtctggccctatcaaacaatcttacgatatttgaaacgcaacaaaaaaaattcttgaccaaaaaatagctatctcttttttctcatttttttaccgcaaacttggtaccaacagttgccttcttttgtctggccctatcaaacaatcttacgatatttgaaacgcaaacaaaaaaaattcttgaccaaaaaatggctatctcttttttctcatttttttaccgcaaacttggtaccaacagttgccttctcttgtctggccctatcaaacaatcttacgatatttgaaacgcaaacaaaaaaaattcttgaccaaaaatgtctatctcttttttctcatttttttaccgcaaaattggtaccaacagttgccttctcttgtctggccctatcaaacaatcttacgatatttgaaacgcaaacaaaaaaaattcttgaccaaaaatggttatctcttttttctcatttttttaccgcaaaattggtaccaacagttgccttctcttgtctggccctatcaaacaatcttacgatattgaaacgca

SEQ ID NO: 42497 - DNA, 865 bp, Heterodera glycines
ttcataagaataaaactgctcatatgtttatacatgcttttatggtaatttttctcactaaaatctttcgttcaattttctatgatataattttttaaattcctattttcgatatctaatattccggcggttttcatttttcggttccccctttttcggggccgtttatctaactaatcgatattctcgccgcgtggtgggttttcatcttgccacaagatttgtccggcaaacaccctttcactaattaccactccaactctcttcttctgttgttgtctctccctcccctctcctaatccattttttcttctttttttgtctcttctttttccccctaatccccctttccgctctcttcttctaccttgtctctccttcctctaactccgcactttcttcttctcttgtctctcccttttctctaattgcctcgccattctctctccttatcttgtctctcccctccctctaactgcctccccactctcttcttctgccattggctctcctcagccccacccccattacgaaggtgaatgatgcttctcctcgcgtcctcgctgcgttccctccctcctcggctttttccttatttttccaacacttttcaaaaggctttttccaacgcttctgtcccccgtccaccaatgtctccagcagaaccctttttggaaagcggcgagtccgaccttttcgccatggccgtcaaattccaaacggacaatgggcaacccattgagctgaaggccgtttaccaagttgccttatctctttttgatggattattcccaacgattcccaggacactgacccatcgccgaaagccattccgacggaagggaaaagccgacagagtccgacg

SEQ ID NO: 42498 - DNA, 958 bp, Heterodera glycines
  unsure (1)..(958): unsure at all n locations
acagagaatttttaaatttatcttatatccaagaaaaatgattatctcttattttgagaaattttatacgttacaaaagcgctcgagcgtgagagggagggcggtgcgcaatcgccatttaatttctcagagaatttttaaatttatcttatatccaagaaaaatgactatctcttattttgagaaattttatacgttacaaaagcgctcgagcgtgagagggagggcggtgcgcaatcgccatttaatttctcagagattttttaaatttatcttatatccaagaaaaatgactatctcttattttgagaaattttatacgttacaaatgctctcgagcatgataggaagtgcggtgcgcaatcgccatttaatttcacagagaatttttaaatttatcttatatccaagaaaaatgactatctcttattttgagaaattttatacgttacaaatgctctcgagcatgataggaagtgcggtgcgcaatcgccatttaatttcacagagaatttttaaatttatcttatatccaagaaaaatgactatctcttattttgagaaattttatacgttacaaaagcgctcgagcgtgagagggagggcggtgcgcaatcgccatttaatttctcagagaatttttaaatttatcttatatccaagaaaaatgactatctcttattttgagaaattttatacgttacaaatgctctcgagcatgataggaagtgcggtgcgcaatcgccatttaatttcacagagaatttttaaatttatcttatatccaagaaaaatgactatctcttattttgagaaattttatacgttacaaaagcgctcgagcgtgagaggggagggcggtgcgcaatcgccatttaatttctcagagaattttttaatttatcttatatccnagaanaatgactatctcttattttgagaaattttatacngtaca

SEQ ID NO: 42499 - DNA, 924 bp, Heterodera glycines
  unsure (1)..(924): unsure at all n locations
aaaagaaacaattggtaacccgaaggatgtgccaaaatccaaaatgaaaaacccattcaatatgccaaaaccaataattgccaacccgaatgatgtgccaaaacagaaaaatgccaaaaagaaagcatcaaaaaatgatggggggcaaaagaaagaaaaacttgttgttagccgaccatcatcacccaatggagtgccaattgagtttgaattggaaatcaatgaatacactaatggacaattgatcaacaaaaacactatttctggacaatgggacaaaaggaatgagaaaatcattgatgaaatgttaaaaaataaaaaagttggtgtcacacaattggggcccattcagtcaaaagcaggtatattagcacaaagatgaaaatcagaaaagccgcgtatctcaggcaaaaaagccatttttcagaaaaaattatcatataaccagatctaagatggattttgccgcttaaatggcaatctttgaaagttttttataaatttttatttaagccacaaatgagggcaaaacctcttatattggggcaaaggtaattaccgaaaaacaatatttatatttccatgtttcacgggaaaaattattttttaaagtataactgattgataaactttttagacattttgccattaaaaccaggacagttcgaaactgaatcccattttttctctgataaccatgcgaacagtcagcaatcaactgttgcatcaacatcgaaaaatcaagtcagaaatttttaattaattaaaaaataattattttagaaatctaaaaaagtccctgancntctattaaaacattccaagtcaatgnccgaatttaaaagaacncaacactcaaatgantcaataaatgtatccgagtaagcaaataatataaataaaccattggaattaattgagtaa

SEQ ID NO: 42500 - DNA, 838 bp, Heterodera glycines
acgcagaattaaagtacaggctatagggaagctattccctactgattcggtctccccataaatctgggcgcatcggttcggggggactgccccgaaaacaaaaaaatcgattttttcaagtgtccgtttggggtactcaaacaattatggggagcaaaaatccaacgcagaattaaagtacaggctatagggaagctattcccgaaggattcggtctccccataaatctgggcgcatcggttcggggggactgccccgaaaacaaaaataaatcgattttttcaagtgtccgtttggggtactcaaacaattatggggagcaaaaatccaacgcagaattaaagtacaggctatagtgaagctattccggaaggattcggtctccccataaatctgggcgcatcggttcagggggactgccccgaaaacccaaaaaaaaattttttggataaaaattatttaaatgaactgactatataatatttaaaataggttatttctcttcctttcagtatccctgcaaagtttggtgcgcttctgatcagtttctgaaaaaaaagttaagcctaaactttttggcctgtttaaaaaggaattaaaaatttttaaaaattttattcatctccctttttgatagaaaaagcatcagagtgcctaaactaacatgtaaataaaatttggtgcgtttcagaaccctttctgaaaaaatatttaagaattaattttgcaaaaaataaataaaaacgaaagactcagattttcgaaaatttttttgagccagctagctcggcgctcatttcagtgtaagttagtcctttaccggggagtatccctgcaa

SEQ ID NO: 42501 - DNA, 1182 bp, Heterodera glycines
ccccccccccctcaccatccattgttctttttcacatttcaaattcactttcttcttttgaattttaaaatgagaagtgtaaaaagatgggaaggatgaaggggaaattgtgaggaagaagagaaaaaagacacggaaaaaacggaggactaaaatggcgggggaaagtttggaatttttagattggagggataatatttagaaaaaataatttacggccaattttcggttttaaatttgtcccctttgtgaggggtacgtaccgagctggttgtgagtcgttcgtaaatccgccaaggggtataaaacaaaaaatttgacacaaaaaaaattcctaagaaacgccctagcaccggtacgtacgtacgtacgtactccttcttgtgccccccccccccggtcttcttcccctcgggtgcgttcgttagagcatttctttctctaaattttcttccattttcatacggttgacactttcttgcctttttgtttcgccaattatgccattggatgtgtcgcttctcatttttcccatttttcaacccaatgaatgatctctcccctccctttccctctttttccaattaaattaatttgcattttcctaaaaaagaaggcatttatttgatgggcaaaattcgaatataaaccatagaaacaattacataataaacacaacggacatttattatttgtgccaatatttccgaagcgaatgaaaggcatcgaattgctaacggacgaaatcgccaaaagggcaatcgccgccaccgcgggaacgccaacgacgtcggcgactctcgccgaaccgcacgtttatcgagtggaggaagaaagtggcgaattggagggggacgaagtgtgcaccaattcacatgtgagcattgacttattctgatcatctgctgatcagtcaatcactctttgatctatcagtcctgtctatcagcctacggcatttggttgctgcatttcctctcttatcagtcggtctctctctctctctcctctcctctctttctctctctctcttctctctctctctcctctcctctctttctctctctctctcttctctctctctcctctcctctctttctctcgctctctcttctctctctctctctctcttctctctctctatcgtctcctctctttctctctctctctcttctctctctc

SEQ ID NO: 42502 - DNA, 919 bp, Heterodera glycines
  unsure (1)..(919): unsure at all n locations
aaacccaatttttattcaaatcctaactccaaagctcgaagccaaaaaacccgaagttttcgaagccgaagccgaagttttttcaaaatttttttttaattccaaaaaattttttcatcacaaaatttcgattaaatatcaaatagaccaaccaacaacccctttcgataaataaatataattatttttttaacaatgtattttctaaatttttataattcttagaatactcacagtttttgagtcaatttaaaaaataaagggaattttggaactccggcggtgccgattggcgccgccgggtgnaaaatttgaaatttaagtgacagatttattccaaaaatgaaaagattttgcgattttaatagttaaatttatattaaattttcgtcgaaaaaaggaataactttgaaaaattagaagaaaaacaagtacttggatgggaactgatccaaaggaaacagaaacataatgaaaagagccaagagcaccactcgaccatgcgtgtgaacaaaaaataaaaacaaaaaattaataaatatatattaatttaagtttatcaaaagcccatcactaagggtgcattttcacattgaaaactcaatctttaggggtgtatttttcccgaaacttcgggtaaaatagccgaagccgaagcacgaagttcgaagctcaaaaaacccgatgttttcgaagttttcgaagccgaagtttcgcccagccctgctcccaactgaaaaaccagcggtgccaataggcgcagcgggaagtattttcaaaattgatgctattttttaagagagattttcactaaaaaaagcaaaaaaaaaaaaacaaacaaccatcattgaccccatgaaaagcatcaaaatcattgggaaggcagagtttggagccctgcttatgctgctgcttttgt

SEQ ID NO: 42503 - DNA, 1141 bp, Heterodera glycines
  unsure (1)..(1141): unsure at all n locations
cgcccctctgcccacntgctgggaacantttgtatgcgtacctctccacgggcaaaaaagagatagccatttttctggcatagagcttaaatttaaaaattccctgtagaatagaatggccattgctctccgcgcccctctgcccatgctgggaacatttgtatggtacaaaatttctcgcaaaaaagagatagccatttttctggcatagagaataaatttaaaaattccctgtagaatagaatggccattgctctccgcgcccctctgcccatgctgggaacatttgtatggtacaaaatttctcgcaaaaaagagagccatttttctggcatagagaataaatttaaaaattccctgtagaatagaatggccattgctctccgcgcccctctgcccatgctgggaacatttgtatggtacaaaatttctcgcaaaaaagagatagccatttttctggcatagagaataaatttaaaaattccctgtagaatagaatggccattgctctccgcgcccctctgcccatgctgggaacatttgtatggtacaaaatttctcgcaaaaaagagatagccatttttctggcatagagaataaatttaaaaattccctgtagaatagaatggccattgctctccgcgcccctctgcccatgctgggaacatttgtatggtacaaaatttctcgcaaaaaagagatagccatttttctggcatagagaataaatttaaaaattccctgtagaatagaatggccattgctctccgcgcccctctgcccatgctgggaacatttgtatggtacaaaatttctcgcaaaaaagagatagccatttttctggcatagagaataaatttaaaattccctgtagaataaaatggccattgctctccgcgcccctctgcccatgctgggaacatttgtatggtacaaaatttctcgcaaaaaagagatagccactttttctggcatagagaataatttaaaaaattccctgtagaatagaatgcccattgctctccgcgcccctctgcccctgctgggaacatttgtatggtacaaaatttctcgcaaaaaaaaaaaacccatttttttgggaaaaaaaaaaaaaatttaaaaaatccccgggaaaaaaaaa

SEQ ID NO: 42504 - DNA, 741 bp, Heterodera glycines
atttcaatcactggggactcaaaccaccagccccttaaagggtcgggactcaacccaacagcattccaatcactaggactcaacccaccagcatttcaatcactgggactcaacccaccagcatttcaatcactgggactcaacccaccagcatttcaatcactgggactcaacccaccagcatttcaatcactgggactcaacccaccagcatttcaatcactgggactcaacccaccagcatttcaatcactgggactcaacccaccagcatttcaatcactgggactcaacccaccagcatttcaatcactgggactcaacccaccagcatttcaatcactgggactcaaaccaccagcatttcaatcactgggactcaacccaccagcattccaatcactgggactcaacccaccagcatttcaatcactgggactcaacccaacagcatttcaatcactgggactcaacccaccagcatttcaatcactgggactcaacccaccagcatttcaatcactgggactcaacccaccagcatttcaatcactgggactcaacccaccagcatttcaatcactgggactcaacccaacagcatttcaatcactgggactcaaaccaccagcatttcaatcactgggactcaacccaccagcatttcaatcactgggactcaacccaccaacatttcaatcactgggactcaaaccaccagcatttcaatcactgggactc

SEQ ID NO: 42505 - DNA, 1029 bp, Heterodera glycines
ctgtgacaaattcccaattatcgaaggcatttcgcccctccccactggcagccccgccccgagcaatgggacgagggacgactgaagcatgtgcagcagcagcaatggcgtagcaaccgaggcagaggttcctctgggttttgtctcgtttaaaatgacgctttttaaggagtccgaatcggacaccgccgcgttgcgaaaacgtcgcgaggacgcgtcgacgccacggccgcggaacacggaggaagaaacggacgattgggaagaatgtgagggcgaggccgacaatgaggcgaaggcggcggacaaagcgaacgacgggcaatgaaaggcacaaaaagcggtgaaacgaattttggacgctttcccctcaaaatcaacgtaatttcgtgtaattaaaattctattcaaagttttgagttgaattttcgaaaaataatataatattgattttaatgatttaaaaagtcaacaactcaacatccatccatctatacattaattaataagtccattcctatttttgtgattgaaaactttcaataattgttttaatgaaaattatgtacacgattatttaactgaaaaatgataacattaatttaacttattatacgacaaaaattaaaggaatatttggcaatataaaaagatcaaatgaataaaaatgagagagaacggaaacatcgggggatagtgagggtcaattcgagttgagttgagcgatgctaatttatttgtgagtgcttttgcgtggcttttccttccgctttactcttcgtcgattttggccctttcctcgaaatactgcaacaattcctctttgtaagtgttgcgcacttcgctgtaactgaggcacttcactttgtcaccgcttaaattgttcttttaaaacacgacttgaacatgatttgaggagtggcacttgcatttcaatggcgaatttcgtctgatggagcggaattctctccttcggacttagcgaccctaaaagggtcgaagattcgctggtgaccaatgggccgagga

SEQ ID NO: 42506 - DNA, 1436 bp, Heterodera glycines
  unsure (1)..(1436): unsure at all n locations
ccgggcatgccgaacactccnggggtgaatgccaagccgccttcgtcgagccgaagcagacggatcatctccatccgagtgcacagcaccgggtctgaggagacactccaagtgacctaattggtggaaggccaatcaatcaatcaatcaaatcaaccaatcaatcaatcaatcaatcggggaatgctctgatcaaaagcattttgatcagagaatcgttcatctcatttaaatataattagttaatgatcacaaataaataataaatatttgcgagcttcgtattacttttttattccaaaattcattttatgattgatggaactgaatagtttaaactgttttgctaattgccattgccatggcccacccgtgccaatttaattttcttgccaaattttggcccgtccgaagggccagtcgttgaacacggaggtcgccttccgccgcggacgattgttgcgtctccgcctgctgccgttgcttctgtctcggcctttgtgtgccgtgtccgccggcgccgccatcgccgccggcaccaccgtaactttggcactgtgcgttgcgcacgcgcagcagagagatcagtccgcgactatcccggctgatacggtaacgaaactcggcgaagcccggacggaccaaatgcagcgcaatgctaagcgtggactgaaggggaaagaaggccagtggatgaaaacataaagcatcataaaaggacaatttaattataaaataaaataaaaatggaaataaattgaattttaaaatttaaataatattaattaaaaatatttaaaactgaattaaaagtaaatgaaaaccaaaatacaatttgctttagcccatcaaatcggttttatttattccccgcaagaagtgccactctcaaccatgatattgatcagtctcgaattgttgccccaattttgccgttttcggaatgccttcgtttgtgccccactcacttcgcaatgggtccaccgatagcgcagttcgccctcctccaccgcccatccgcctccgttttggcactgtacgcccatggcaccgccgctggtgaacaaattcgcaaacgattcgtctgccggcgaattttccacggaaaatccctccggcaatttgtccccttcgaattgttcgtagcgcaatcgatcacccaacgaatacgtgcctgagggggaagggagggaggaattcgatggcatttttttaatcgaaaatgccaaaaatgatgaaattttcaaaatggatttttttcgcaagagaaatcaatcattaatcaaataagcatattttgtgctattccttctttacccggtttgcattgttcacacttttgcgaatgcatttcaagaaaatgacccgccggacaaattacacctgaaaatttttttaaattgaaattaaaaaaaaaataaattactgcaattgag

SEQ ID NO: 42507 - DNA, 1016 bp, Heterodera glycines
tattaggaaaaatgtattatctttaaataaaactaatattcgttgcctaaatgctgagaatttatctttataatttgtgttttcaatttattcaaaaaaccggtaaaaatgacaatacttttaactataattttgatggaggtgtgatttttgaaaaattgtgaaaatttgttccccaagagtctaaaaatttttataaaccaaaaaaatcccctttggttacaattttatttttggacattttgcaagtagtataaaaaaagttgtgaaatctttattttaaagatccaaaaacttaaaataaaacaaaaaagaatacgtccggaagctcagttataagatcgttttcaattataaaaaaaatcacgaatttttattattattcattttgaaactataaatatgaattgccaagtattttaccatactttggttttgtttcatcgctttgaaacattggcttcatagctgaaatgccaaaacgcattctgaacaaatattcatacacaatgcccaaatatcgttcaagtttttcgcattcatttccaattttaattttggcattggcacaatgccaattttttttcatcaaatacagaatgccaagatgtctttcgaatcggttagtgaaatcttttgttgttttttcaacagtttctttaaaaatggattcaataacattcacaaaattttttctatctttgataaattcaacaaataatgcctcatcgatctaaaattttaaaaatttattgcttcataaatttaaatatttttaaatgtgtgtgtgtaaaaatatttaaaaaaaatcaatggtcgaacgatattcattaggatgcggattttcattttaaactactttttgtggtttcggtaggaactgctaaatcccagaaaattttcattttgacgattattagcaaaagagaataaaaaaaatttatctaatgaacttaagtttgaaaatctttaaaacgaaaaataaggcaaaattccggcgcaaaaaatggctgaat

SEQ ID NO: 42508 - DNA, 1283 bp, Heterodera glycines
taatttttttgacaatttttattttaaaaaccactaaattcttaattttaaaaattatttctttttaaaaaaaattttccccaaaaaataagctaattcaaatgaaaattttttatttattattaataaaataaaaatttttaattaaataaaaattaaaaataccgtaaaaatccacaaacaaataatgttactcctgcccagattcgactttcccccccccccccctccccccctcccccctcaaatgatgcctcagaatccccaatcacacggggattctgagggcttaacgatgtcataattgaaatctgatcacgtattcgtgatcagcggcccaaataacccctaaagacatgtttttggaagatttttggtgaaaaaattttccaactcaaaaatcctatgctcacccctttggtcccgaatctcaaaatcacttttatttttataaaaattcttaaaaaagtgataaaaatgccaaataaaatttatataatagagcaaaaaactgcggatttttgtagtattttatttttccagaataacttttcagaaccgagttatgaatttttttctgaaaattcgaatttttccagaaattctggaataacttttttccttttttagatagaaattccaaataaagtccataaaattctcctgatttttctctatttttaaggctttattgctgtaaaattgatcaacccttcgatttgttatgaattttcaaatattaggccaaaatcccgagggccaaaaaattgccaaaaaataaagaatttttaaaatattccaaaaaatctgaaacttaaaataaacatcatatttgtgctcaggaccctaatttaccccagaaaaatatttttcaccctctttttcaacccaaaaaaaaatttttgaaaatttctagggggcctagctcgaaaatttttgaaaatttcccttcatatagtataccattagatagagcttaaaaagctctacaatttttctctaaggcattttttgtctaaaaccgacgcctgacgagttatgggcccaggactcaaatgtcccgctgaggccaaaatttttttctatttccgggaaaaaatcgaaatttttccgaaaaaaataccagtcgatagagctcgaaaaactatgttttggaagtggtctccgtttctctgagaaaaatcgttaaaaaatcctaaaattcaaaaacccgaaaaccgttttttaggcctaactcgaaaaatttgaaaattttcgaaatttaaaagactctagagatcccc

SEQ ID NO: 42509 - DNA, 947 bp, Heterodera glycines
ccctccctctgctcctctccaccttcatcacctctctttttcttgaaaaaaccttctcaagtttcgttcatccgcttttccgggatctgtcacttcccttcccccgtcggcggggagagcattcccccccctcgggcagatttcgcggcgaatccctccggggggcggggggggggggagcgaccgaccaccgccagcgactgactgaatgagcagcttctccacctcctcccttgagccaatgtgcacaggtgtctcttatccgtccgctcgccgcgttaagccgctttatcataaggctcgaggcggaaatttgtccatcgcaggcggacgtggttggccaaattccctcgggctacattttggcctgccaatcaatcgcgtgccattttccctcgctcagccatttttgcccggctgactcgcccgtacattgttcttgttagttgaaggtcttccgttttcggcactttttcagcagcactttccgccgttggcactttttaattattttttttctaattttttatttcttataatttcagaaagaaatagcaacaaaataaaagaagaattgtgcctaataaaatatttttgtaaaggattttgtcgttttttacgaattccccggctccgacactctctgagcagcttaaagtgtttgtttgccttatgctcctcccccgtcgttatatcattccaatttttcatgagacctttttaaggatttattttctctcgtcaaattatttcaaatgacttccgatttttatttgattattatttttaaattattttattatttgcaattgcatctccagaaagaaagttaaaattaattttatatctcatatatacaaattattttaaataaaaaatcttaccaataaattctcatacatcatatacaacaaaatagtcttgtcgatctctgaccctgaaaatgc

SEQ ID NO: 42510 - DNA, 1113 bp, Heterodera glycines
  unsure (1)..(1113): unsure at all n locations
cgaacttcgaccaattccacgccttttcgtctactttcctgctgatnggnnntnttnnnaaagngnggcgggtgttctttggggtttcggnatgttgaggttngggtttgtttntcggattggatttttaggntattttgttttaatttttgattaagaattaaaaatgtaattgtgttttnganataattcttgtcgagattacctttttcatttggcctttggtcagtttgagttccttaaaaaacggagtcccttctcccatcgccactgtttccgttgactgcttgtcctgcccttttgctccgtcttaatcagttgtcccattaaattggtgtcctcctttccccaccttcgttttgttcctctgccctttcttcacttttcgcccccttttccattttaatctccttcatttggcactccaattgttccatttccctctcgtgtcgttgcctcagttccgtctccattttttcgcttttttggccgacttccttcttccgttttttgtcattctttgtcagtccatgttttaaagccgttattttcgcttaaacttctctcattagttttatttgactgtattttcaacagtataacacagacccaaaagttccttcctttctctgttgtgcttcgattttagttcttccaatgcgtcttcggtgtttaaatccccactgcagcccattaacattaaattatttgattgttaaaataaaaatagtctagaaaaatgaaaatgtaaacattttaaataatgaaatacaaaataataataacaaagaattacctatcatagaatttattgaaagacatactggagaaagaataaacatctgaatattatgaaacaatctgagaggtaaaaaaggcaaatacacaaaagagcaatgagaatcgaagaagataagcggcactatctacacataaaagactccatgctgttcatacatggcattcaccagcagtgcggcacggcttgcaaccgtattggcagattcggggggagccgatttgaccaattcggcccagtcgagcaggtcaaaaaattgtgaactgaaatttaaggtatattgacgtaatctcttctcaaaaggctcattatga

SEQ ID NO: 42511 - DNA, 808 bp, Heterodera glycines
  unsure (1)..(808): unsure at all n locations
attttattcatctcccttttggatagaaaaaccatcagagtccttaactaacatgtaaataaaatttggtgcgtttcagacccctttctgaaaaaatatttaagaattaatttcgcaaaaaataaataaaaacgaaagactcagattttcgaaaatttttttgagccagctagctcggcgctcatttcagtgtaagttagtcctttaccggggagtatccctgcaaagtttggtacgcttctgctcaattagcaaaaaatatgagtgatcgaattttcactaaaaaagttaagcctacattttttggcatatttaaaaagcaatgtccgtttggggtactcaaacaattatggggagcanaaatccaacgcagaattaaagtacaggctatagggaagctattcccgaaggattcggtctccccataaatctgggcgcatcggttcggggggactgccccgaaaacaaaaataaatcgattttttcaagtgtccgtttggggtactcaaacaattatggggagcaaaaatccaacgcagaattaaagtacaggctatagtgaagctattccggaaggattcggtctccccataaatctgggcgcatcggttcagggggactgccccgaaaacccaaaaaaaaattttttggataaaaattatttaaatgaactgactagataatatttaaaataggttatttctcttcctttcagtatccctgcaaagtttggtgcgcttctgatcagtttctgaaaaaaagttaagcctaaacttaaaggcctgtttaaaaaggaattaaaaatttt

SEQ ID NO: 42512 - DNA, 788 bp, Heterodera glycines
tatgtgaactttcgattttttgtgcgaattcggatctgggtttaggaattggtcgtaatggatgtcatattcgtaatcattgcaacgaccccgataaccccataaaacattttttggactataattttaaaaaatgaaaaaaaaacctgatgaaaaatcatatacttgaaaaaaaatcatgattagatagatgatgtcatatggaaattctgatgtaatatatcagaatttattatatgcatgaccttttcatggctttttcttttgtcattgtaattttccaatttctgcttaaattctctattgatcgaaataatattttcatgcaattatatttccatttttacaataaattttccttctttttttttctctctacaaatgaaaaaaatgaaatgccaaaaaaagattttcacaatgccaaaattaaagcaaaatcgtaaaaatattgcccaccggtttacctcagttgggccccgcacgtttgggccccagcggggttttggctataaattttttttgccaatcaaatccaacaatcttggtatcattcgataccctaatgttctctattagtctgaaaaaatctgaaaaattttcgttaaggttcaaatagttatgaccaaaaaacttcaaaaacccagattttccaacctttttggtcataacttttttgaatcttaacggaatttttcagattttttcagactaatagaggagagttagggctatcgaatgataacaagattgttggatttgggtggcaaagaaaaaagtcatagccaaaa

SEQ ID NO: 42513 - DNA, 885 bp, Heterodera glycines
cgaggccgcgaagaggccgagggagtactttcggtgcaggaaaattattaaaattttaaaattttttaattgcttttaaatatgccaaaaaatgtaggcttaacttttttagtgaaaattcgatcactcatattttttgctaattgagcagaagcgtaccaaactatgcagggatactccccggtaaaggactaacttacactgaaatgagcgccgagctagctggctcaaaaaaaattttcgaaaatctgagtctttcgtttttatttattttttgcaaaaattaattcataaatatttttcagaaaagggttctgaaccgcaccaaatttttattacaaggtaaataaggctctctgatgctttttctatcattattgggggtaaataaattttaaaaattttttaattgctttttaattatgccaaaaaattaaggcttactttttagtgaaagtttgatcactcatatttttgctaattgagcagaagcataccaaactttgcagggatactccccggtaaaggactaacttacactgaaatgagcgccgagctagcttgctctaaaaaatttttcgaaaatctgagtctttcgtttttatttattttttgcaaaattaattcttaaatattttttcagaaagggttctgaaacgcaccaaattttatttacatgttagtttaggcactctgatgctttttctatcaaaaagggagatgaataaaatttttaaaaatttttaattcctttttaaacaggccaaaaagtttaggcttaacttttttttcagaaactgatcagaagcgcaccaaactttgcagggatactgaaaggaagagaaataacctgttttatcacattagcttgtcatcagtttttat

SEQ ID NO: 42514 - DNA, 1204 bp, Heterodera glycines
  unsure (1)..(1204): unsure at all n locations
ttgttttaaattttattttctctttgagatgtgatgcttcccggcgtgtttgtttataggaacgaaaagnatttgaacattttattttttttcatcatatttttgtgtnatgaatttcttttctcaagtaatcatcgctaatgataattctcgtaaaagattaacacaaaattacgtgctattcaatcacctaatgtgattttaaaaattattggatttacttctcgctaatatttaaagatattttttgattatttttattatttttaatttataaatgcatgtttccaattagattttacaaaaaagttttttcttgttttcagaaagacctttgatccaatagttaaatatttatactggtttatttattcatatgaaacctaaataattttattaatattaactaaattttgcctacatttagttttatactaagaaatgatattcttttttgggtcatacattatttattttaatgaaattttattgaaatacatgtacatatcttattaaagaaaaatataaaaaatcttttaaatttatttattttctaagacagagtatattttaatgaatttatttatttagttcttaaacaatatttgcaaatattttagtaaatttagttttatatttgttatattttttccctgaaattgattttggtcaccatttgaatatttcccatatgtttagagaccttcatttgatcctacttgaggtctcgatgacttaatttttgaatttattacttaataaggtttttatttaggcatttaattacttcttgttattttttattgattttaaaatttaccattcttattaaattgtttttaagaaaaatttagaaatattttgtttttaaaaattttttaattcgcagtaaaatttttaccgaataatcgcattaaataaagattttaaaataattaaatgtaatataaaataataaaaagaacattagatatagcataaacattgaattataacaattcaaaaacaattttttcaaatatgtcaaattttaatgggaaataaatccaacattaaaggtttaaaatacacaaaatatattcatggttatatattaaataacgtacttttataaatttaattgtaaaattatacaataaaatgaattttttcttattatctatgaaattatttcattattacaaagtgtaaaaaactgttattg

SEQ ID NO: 42515 - DNA, 992 bp, Heterodera glycines
gaatgccgtgattgccaaagcggaatttgcagctttcgctgcttttttgtgtttttcgtcttcagatggtgaggaatggctgcttttccaatggacaacaaagaaatgtcaaaattgcatgggacgcaatgcgcaaattcatctcctgttttgctttttgtgatcccctgaaattcattggaatattcacttttaaaaaagcttttgcgcttaggcggtgccatttgttagtaatatgtagtgcaggtgctaaattaaaaacaaaagagaaagacaataaagcaataaaaactaaaataattacccaaaaataacagcatgaaagaaattataatgccaaaattgaaaatatttttcttaaacagtatgccaatcagaaatttttaaagaaatttgacagatttttctgagaagcgacaaataaggacaaagtaagaacaatagcccgaaatcagaacatttcttacaaataagaacatttttattttgtaagatttgaaccctccaaatcagaacatttcttataaataagaacagatcacatccctggttttaattgaaatgaattattaattttttatttggttttccatgaaatatttataatattttgttattaaatttagtaatcagtttttttaaagttaatttttttgctggagagagttaaaaatgttcatagtattagtctctgggtttttatgccgttttgaaaattcttagatattttgacttacattgaaaaatttaagattttgttagctttttttaaaaaaatttactgtctcactgacacattttctactaacatatttttacaaatgcatataaaatatgagtaattatataaattttttcatagtaattataacatctcctatatagaatttgttttacagaaaataaaaataaatattaatgaatgtaataaatcaatcaaaatcatagcaatttgccagcacaagtcattaattaattcttatatttatgaa

SEQ ID NO: 42516 - DNA, 874 bp, Heterodera glycines
agcaattttcaacccgacattttgtagggctcacccgcagatagtaatgcgtttttggggaaaacccaccatgtacaccggtgtagaaaaaaagagatagccattttctgagaatatctattcttctgagacagcaattttcaaaccgaccttttgtagggctcaaccgcagatagtaatgcgtttttggggaaaacccccatgtacaacggtgtagaaaaaaagagatagccatttttctgagaatatctattcttctgagacagcaattttcaaaccgaccttttgtagggctcaaccgcagatagtaatgcgtttttggggaaaacccccatgtacaacggtgtagaaaaaaagagatagccattttctgagaatatctattcttctgagaaagcaattttcaacccgacattttgtagggctcaaccgcagatagtaatgcgtttttggggaaaccccacatgtacaacggtgtataaaaaaagagatagccatttttctgagaatatctattcttctgagacagcaattttcaaaccgaccttttgtagggctcaaccgcagatagtaatgcgtttttggggaaaacccacatgtacaacggtgtagaaaaaaagagatagccatttttctgagaatatctattcttctgagaaagcaattttcaacccgacattttgtagggctcaaccgcagatagtaatgcgtttttggggaaaccccacatgtacaacggtgtagaaaaaagagatagccatttttctgagaatatctattcttctgagacagcaattttcaaaccgaccttttgtagggctcaaccgcagatagtaatgcgtttttggggaaacccccacatgtacaaccggtg

SEQ ID NO: 42517 - DNA, 809 bp, Heterodera glycines
tttgaaatgctaacgaaaaaatattctttccgaaaaaaaggcttatctcttttttctcttggggatttggaccgccaacttggtaccaacatttccttttttagtctggctctatcaaacactcacacgatatttaaaatacaaacgaaaaaaattcttgcctaaaaaatggctatctcttttttctcttggggatttgaccgcaaacttggtaccaacattttgccttctctagtctggctctaccaaacactcacacgatatttgaaatgctaacgaaaaaaattcttgccgaaaaaatggctgtctcttttttctcttggggatttgaccgcaaacttggtaccaacatttgccttctctagtctggctctaccaaacactcacacgatatttgaaatgctaacgaaaaaaattcttgccgaaaaaatggctatctcttttttctcttggggatttgaccgcaaacttggtaccaacatttgccttctctagtctggctctaccaaacactcacacgatatttgaaatgctaacgaaaaaaattcttgccgaaaaaatggctgtctcttttttctcttggggatttgaccgcaaacttggtaccaacattttccttctctagtctggctctaccaaacactcacacgatatttgaaatgctaacgaaaaaaattcttgccgaaaaaatggctatctcttttttctcttggggatttgaccgcaaacttggtaccaacatttgccttctctagtctggctctaccaaacactcacacgatatttgaaatgctaacgaaaaaaattct

SEQ ID NO: 42518 - DNA, 1068 bp, Heterodera glycines
  unsure (1)..(1068): unsure at all n locations
aattttgaatttagaaaacatgcaatattaaccatgcatccctcccagaaatgaagccattcaaaattaagaacaaagacggcctttccaatgattacacaggcaattttgaaaaaaataattgaacaatcaatgccttctgccaatatttcagatttttgggtggattacgagccgatccgtcactgcacttccgatcgaccaatttgcgagtcgaggttacccaacagaatgccaaaaaagattgaactgacgccaaacttcacgcaccttccctctcacagattccttttctgtgatcggtccgtttggcgctgtcgaagtcgaattgtgttaggcggcaattgtacaggctttgcgggcactgaaatatgctatggatcagtgtgcattcaggcaagacaccaaaagtgaatttagcgtttgatcgaattaaattctcagccgaatcattggcacaccagtgatcagtcagaacttaaacgaaaaaaaggggggggggtgacctgtaaattgattgtaatgatggtatgggttacgtaccgtatccattcatcccaattcgctggctgatactgtagttaatttcctgcttatctccttgggatcagacatcctcctacaatttctgtgctgaatttggtatttttcagaatgtttgccgactgccggcgacggaaggcaatggatttttgaggcgcgaagtttgtttcggcatatcgaaagtgaatgatttgatcgcttctccgttctttcgttgacagcgtcgcccgccgatcagcgaagttgtgtgggcaaagagttggctgttggaggagggcgcacggccgacgagcagcggaattgcgcacgtcgtggtcagagaggagggggcggcaatggaaggggaaagaagcgcttttgtgccccggcacactcagtacccggagttgccggtgggtgggactgatcaggcagagcagagaaaacattgctgattcactgaactggtcgatcagttcatttgtcactttgcgcttccttgaatttcgatcgcttttcttcccttanggcgtcctttatttgccg

SEQ ID NO: 42519 - DNA, 1377 bp, Heterodera glycines
aaaaggcataataaaagtcaattgtagaagggaaaatgggtttttttatgctcaataatcggaactaatgcgcagaaaaaaggcatacacctcaaaagtgggtctctactaatttcataatccttaattattaaataatttaaaaaactaaacacattaaatgtaaaattttaatacgcatatttatttagcttgagtatttgttgaatttcgcaacaaatgttgtcaagcagttttgccaaactgaagctgcaagcgctgaccgcacacttttacccattgccaaacgtgactatttaatgcaaaaattaatacatattgctaacttttggcgttgggcacactgacaggaaaaacctgaaaatattttcccaaatcttctcggcggtgcctattagccttgcttaacccggcccaacctttttcgtttgcttcggcacctatcggcaccgccgaaccaccattttaccatatttttgaaaaatggagaacaaaatggcaaaaaatagtaattttttggcgaaaaacgactaaaatttttgtaaaatacactccataattcgggatttcaaaaaacgaaaaatacacccctaaaaacgactgaaaaaagaaaaatatacccctaaaaatcgagtttctgatttcagccccctccgaagccaagggtctggctacgcccttgccctcccccttgtccacctataccgtatcatttcctttattaatattcaaaatctcagaactgtccctactcgactaccgtatcgacaacagtattcgcttatatgatgaaattaaatctttcaaaaataggcaaacatccaagcaacggagaactgatcgaagtgcaattaaattcaattaatttccaaaagaattattcaatgaatcttaaattaaaaaataatactttttaaattaataatttttcttcaattattcatttcgccctaaaaacattttttaccattttataaaataataaaaatgtttttccattaaaaatgcaatagaatagggaaaatacaccccctaagaaatgacctaaaaaaatttcagaaaatacaccccctaagaatgaaaattttctcttctcaaaaattgatcgttaaaatttaattttttttttgataaaaattttaggtttaaaattttccttattcgaaaaacatttataaaatatttaataatcatttagatgaccaaaatttagttatttggttaagttttacgtgttttgctccctaaaaaatccgtaataaaaaattttaaatgtcctttttcatgcctttttcggaattttcgtgcttttttttcaattttttggtgcctattaatagtgcctttttcgcgatttttggtgatttttttttgcga

SEQ ID NO: 42520 - DNA, 977 bp, Heterodera glycines
aaaagagatagccattttttctgagaattaattcacaatttcccgcagctctgcgggtaatggaaaaaatttgaaagaggctctgcggaacggattagcatcggggttacgagatagaaaattgtcctaaaaagagatagccatttttctgagaattaattcacaatttccgcagctcttgcggtaatggaaaaattttgaagagtctctgtggaacggattagcatcggggttacgagatagaaaattgtcctaaaaagagatagccatttttctgagaattaattcacaatttccgcaactcttgcggtaatggaaaaaattttgaagaggctctgcggaacggattagcatcggggttacgagatagaaaattgtcctaaaaagagatagccatttttctgagaattaattcacaatttccgcagctcttgcggtaatggaaaaattttgaagagtctctgtggaacggattagcatcggggttacgagatagaaaattgtcctaaaaagagatagccatttttctgagaattaattcacaatttccgcagctcttgcggtaatggaaaaaattttgaagaggctctgcggaacggattagcatcggggttacgagatagaaaattgtcctaaaaagagatagccatttttctgagaattaattcacaatttccgcaactcttgcggtaatggaaaaaattttgaagaggctctgcggaacggattagcatcggggttacgagatagaaaattgtcctaaaaagagatagccatttttctgagaattaattcacaatttccgcaactcttgcggtaatggaaaaaattttgaagaggctctgcggaacggattagcatcggggttacgagatagaaaattgtcctaaaaagagatagccatttttctgagaattaattcacaatttccgcaactcttacggtaatggaaaaaatttgaagaggctctccggaac

SEQ ID NO: 42521 - DNA, 869 bp, Heterodera glycines
  unsure (1)..(869): unsure at all n locations
cttgcatggcctggcaggtnctcgattttttcaaggtggtccgttgggggtactcaaacaattatcccactggaaaaatccaacgcagaattaaagtacaggctatagtaagctattcccgaaggattcggtctccccataaatctgggcgcatcggttcggggggactgccccgaaaacaaaaaaatcgattttttcaagtgtccgtttggggtactcaaacaattatggggagcaaaaatccaacgcagaattaaagtacaggctatagggaagctattcccgaaggattcggtctccccataaatctgggcgcatcggttcagggggactgccccgaaaacccaaaaaaaaattttttggataaaaattatttaaatgaactgactagataatatttaaaataggttatttctcttcctttcagtatccctgcaaagtttggtgcgcttctgatcagtttctgaaaaaaaagctaagcctaaactttttggcctgtttaaaaaggaattaaaaatttttaacaattttattcatctccctttttgatagaaaaagcatcagagtgcctaaactaacatgtaaataaaatttggtgcgtttcagaaccctttctgaaaaaatatttaagaattaattttgcaaaaaataaataaaaacgaaagactcagattttcgaaaatttttttgagccagctagctcggcgctcatttcagtgtaagttagtcctttaccggggagtatccctgcaaagtttggtacgcttctgctcattagcaaaaaatatgagtgatcgaattttcactaaaaaaggtaagcctacctttttttggcatatttaaaaaagcaataaaaaaatttttttaaa

SEQ ID NO: 42522 - DNA, 953 bp, Heterodera glycines
accttcttgtagagctcgagctgctctttccaatgctccccacagaggtctcgatccgtgtcgaactcacaaagttatgcgagtgaaatgtgaaatattgttttcaccacaaggcattttttctgaaaaccggattcaaaaatctggggtttggtataaccgttttagaaatagcgtagaaaacagcttcgatatcaagaaaccaagtcaagtccagaaaggaatattttaaaacgatttcgttttgttttggcattatgataccgaataactttcggaaattatggaaacaaaattggagaaattcgaataattttttgactgcaaatttttttccttttttgaattgggttcaaaaaaattttaagagaatttttgattattaatttgaagtcttgaatttatttgacaaatccaagacttaaaactgggagaagcaaggggctgtggctgggggcctaaaatttgggccacattggagaattaattctgatttctgaaaaagtcccagaaataactattttttctttccataccttcttgtagagctcgagctgctctttccaatggtcttatcccggtctcgatccgtgccgaactcacaaagttatggagtgaaatgtgaaatattgttttcaccacaaggcattttttctgaaaaccggattcaaaaatctggggtttggtataaccgttttagaaatagcgtagaaaacagcttcgatatcaagaaaccaagtcaagtccagaaaggaatattttaaaacgatttcgttttgttttggcattatgataccgaataactttcggaaattatggaaacaaaattggagaaattcgaataattttttgactgcaaatttttttccttttttgaattgggttcaaaaaattttaagagaattttgattattaatttgagtcttgaattatttgacaaatccaagacttaa

SEQ ID NO: 42523 - DNA, 1017 bp, Heterodera glycines
cccccaaccggaccacttgaaaaaattgattttttttgtttttggggccatcccccccgaaccgaatcgcccagatttatggggaaggccgaatccttccgggaataggttccctatagcctgtctttaatttttgcgttggatttttgctccccataattgtttgagtaccccccaaacggacacttgaaaaaatcgatttttttgttttcggggcagtccccccgaaccgatgcgcccagatttatggggagaccgaatccttccggaatagcttccctatagcctgtactttaattctgcgttggatttttgctccccataattgtttgagtaccccaaacggacacttgaaaaaatcgatttttttgttttcggggcagtccccccgaaccgatgcgcccagatttatggggagaccgaatccttcgggaatagcttccctatagcctgtactttaattctgcgttggatttttgctccccataaatgtttgagtaccccaaacggacacttgaaaaaatcgatttttttgtttcataaatatttttttcagaaagtgctctaaagcgcaccaaattttatttacaacttaattttagcactctgatgctttagtatcaaaaaggaagatggagaaaaaattttttaaaaaatttttccttatattttggttatatcgttttgcttttggtggggtgcttggaacagtggaatcatgcgcacccgtccgatctggcaagttaagcaacgattgctgactagccaaaaggttcggtgccgtgatgaaacgaaccagcactgcttaccccgcggcacccggcacggtcccccgaaggaatggatttaattaaattctctccttcggggatttttttccattaggtcgtccgttagcgttcgattgctctagtcaatttttcaaaatttttgttgaaatatttgtcgtgctctgaagggcgtgggaggggggggggaggcgaaggcccaccacgaggccgcgaagaggccgagtga

SEQ ID NO: 42524 - DNA, 821 bp, Heterodera glycines
  unsure (1)..(821): unsure at all n locations
atgaatgcgaatgattggcacatgtttgaagtgccggacatacatgaggcacagntgatntgngnggngnggaaaggggccccttttcagacggacgnacnnngacnnnnnnannnggnaaanaaaagngngccaccannngncccannagctnaacccgtcgctagcgcgcagacagcggatgggcgggggggggggaggggagaagcgggcaagcggaggagggacccctaccctcccatgtagcctcctcatccaaaaaagttcgtgtcaattttgtttaagaaatttgcataaaatttttccgatgaatttttatacttgtttttgtttgaatctttaaaaatgcttaattgaaaaaatcgggacgatgttttatgcaattttgaccttttgtaatacaatacttaatgctacaatacctagcattttccaggggcctttttcggcaccgtcggaaaccctttggcagctattgaaatgaaaacttccgggtttccattcctacatttggcactcgcatttaaatgcataaacaaaaataaataaattataatttttattataggtaagtgtaaaaatttaacagcaccgatgaaatggaaatataattaacattaattattgataaagtgcaaattattgggcaaatgcgaatttgggggaggggcgaaagaaagtggcaaaaggcaaaatgaggcattttgggggagagggcttattatttattacgaatgcgtaaagggaaaaagttagcaaaaaatatattatataaaaatttttaaaggaaacataacaacggaagagatttttgagtggga

SEQ ID NO: 42525 - DNA, 977 bp, Heterodera glycines
ggggacctctagagtccttcaccacacccctttgcatgtatctcctagcagccatccccacggttcaatttgcttatatctaatttttggagattttctattttaaatttttcaaaattaaaaaagcgagattttgcgggatttatccctgcgggtcccgtcccgcaaaaattttgacttctattgaaatttccggtctctatcacagacgtcgcaaatacaatttttggttgcccttttagcgccgctcgtcgtcccaaagtttcacttcgatgactctgtgctcaatgaacacattttggttaatgtgatcaacagtttgagcatgatctcctcgtcttattttgaagaatgcaatggcaccgaatgtctttacgcgcttttttccaaaccgaaattgcaaaatgttagtgcatttgcttatagcaatcaatcgcttatgcattaattatgtgataatttttaaatacctaataaatggctcataatttggggggagcgtaaaattaggctcattaaactgacatatcaattaaactttttattatctacttattttctttaattaataagattttccagtgaaaacccatttattttaaattgataaattatttttaattttagttcatttttttgcataattactgaactttcaggaggatgatctgccctataaaataatggaggacaaaaccttttgccaaaaggcatcagaaaaactcaaaaaagtcatcaagataaaatctgagaacgaaaatgcgagagaaatgtttgacaaagtcatgaaagagatgtctgaaaaggcgaaaaagatgtacaaagagcagaagtatatcggtaccacttattttaccaaattcatttggaactcgccttttttgcaaggatagacaaagtacggtacccagaacaaatagtattacgatattcatgattcattggcgtaatcaagggcgagaagggggggggggggg

SEQ ID NO: 42526 - DNA, 704 bp, Heterodera glycines
ccctttggcccgcagtcccttcagctgctcgttgaccacgcgttggctctccttccagccggactgaacaaaaggcaaaaattgggaaagggaaacccatggaaaaaccaaaacaaatggggaaaagccatcattgaactccctgaaagccatggggatcaaaaatgacaacaaataaccttgatgttgcacgggtactcctcgaatgtcatcagcatataacggtcgccggaggaggcggggtcgcgttggcgctgctgaaaaaaggcaaattaaaatgtccacaagtccattcagcggcagataaaatacggccaaagggtccaaattaatgcatttaatgccctcattttccctcctaattggcagctaattttttttcccaattaggtttggttttttcaactgtttcattcatttatttttgtttaaccttcaaaaattgttcaactgtcagccgtgcaaagtcgagcagagttgtgcccaaatattgcttttgcatcatcgatgcgctggtgtcaatcagaaatacaatcacagtcatttcggacaaaaagatctgagctttatgtattcggatgagtttcgagatcgctaacaataagcacaattaggaaagcaaatgttcggctgcttttaaacccacgaaagctttgaaaaagcccgagttacaccacttgaactttttaaagcaaaatttgata

SEQ ID NO: 42527 - DNA, 1174 bp, Heterodera glycines
tgtcgagctgtgcttccgtcccccgctgccgttttgcttcccaagggcggcggtcttcgccaaatgatgcgggtactgtctcaaatcgacgaaagcattccctgcaaaaaatggaggaattaaagcgaatttcatattctaaagagacggatgccaaccatttggcactcctccgccaaatttgaattcattttccatcgccgacgcggcgggcacagcggcggaagcattggacgaagtcggagaaagcggcgaatttgcctgaaaaggaaagggaattcaaatgaccacaaggaaaaggaaccaaatcattaaaaggaattcgtaaataaacaaaaattgcgacctccgccccacggccaaaggcaccgccgcaaccgttgttggcaccgttcaacagcattaagccgttgatggatgccaacgaaaaggattccccgtcacagtcgcgcaacggcgtactcgtcctgtcgggggggggggaattataatggaaaacatttgaaaatggaaatttaacgggggttttgatgaaaatccaaagagtttgtttcgtttttttccctccaaattcgtccctcttttgtccacctccgtttgctctgtcgatggtcagctgacgaatcggcggtgactgacaaagcggcggtggaagcgggccgaggagagacagagccgtggcggcgactgtcggcagcggcaccgcccgcggcaaaagaggaggcgccggtgttggcactttctttggcttccgacgcagaaatgttgccagaaggactggtgcttgtgttattggcgttatcgcgattggttgcgtcattattgccctgaatttcccatttcgaaattattttcaattgattttttgccaatttattcgttctttttgcccttccattttttattgtcagccttttctagccccgttttcacctgcccaaaatgcttttgttcatgtgcagcagcagcagcagcagcagtgttcggctgctgttgggaggcgaaaagtccgccgaaagtgtcgttaattagggaggcaaaatgtgccgcggcggcagcggcggacgacggaggggcggacggaacggagagaggcggcggaggagggaaaaggaagggcgacggatggggggcgaggggagcggggggaggcgcgtgggaaagggcggcggcg

SEQ ID NO: 42528 - DNA, 945 bp, Heterodera glycines
  unsure (1)..(945): unsure at all n locations
atgtgacactcttatttttaatgaaacaaagcgtaattcccacacgggaaattttttatgtattttctgtnagtgttttctttgtggggaggnnnaanttttgnatgnattgnnttgatttatgatgattgattgaangtnannaaaaattatctatatanaattaattttatgtgaatgaggnnnnaaaaattgagtgnaattatttttnattggggggggaggnaaattgtggtaaaaaatggaaaaaatggaatgganaaaaattgaattaaatttaaaaaaaatanattttnggaggaggaggaaagaattggtttttagtaaattnaaatttaacatttagcaagactaattggctttgtatagaatactccggaaccgggaattttgggtaaaaccgggaccgggacctaatcgggttgaaaaaccgggactttttggctgtgaaaaccgggaatttcccggtcccggtcaaaactggtcaaaaccgggaccttgatactcagatgaccgtgttttggtcccggtcccggcgcactctagctttgaaaaacaacaactcacacaaatgtgtactgagttttaacaatggaagaaagaaaacgttttgtttacaaaaggattcttaacaaattgaaaattttcataaaaaatgacagtaaaattgtaaaaaaaaaaaaattcgcattaaaaagaaaagattacaaattaattttgttttttttccgcgtctgtctttttgattgtttgttttgttttacgttttttttttatttgctttgtgctttacgcgttttcatgtttcttccgatttgttgaaaaacaaataatcaattcgtatagttttgtacttttatattgcaccagaacataagtgaatcgaagaaaataacattaattaattttggagaaaaatattattcattttatgctaataatcaa

SEQ ID NO: 42529 - DNA, 1018 bp, Heterodera glycines
  unsure (1)..(1018): unsure at all n locations
tctagagtcccatttttcgcaccgtgaatgttatttttattgtattcatttcaataggggagnagantagactagaaaaanaggaaaantttctaaagaagnnnnnnantnnnttntnnnaggggnattattttgtaaagtntttttttnnnnaataaanttgttaaatnnnatttttngnanngtgaatgttatttttattgaattctgaaccggttttgagtagattagaataaaaaaatatgagtgatnaaaatttnagtaaaaagttaaaaataaantttttcnnaaagttaaaaagnaattaaaattttattnanntnnattattgatagaaaaagtattagagtggntaaantaanatgtaaataaaatttggtgggtttnagaantttttntgaaaaaatatttatgaattaattttgnaaataaataaaaaagaaagaatnagattttngaaaaatttttttgagnnagntagntnggngntnatttnagtgtaagttagtnntttannggggagtatnnntgnaaagtttggtaagnttntggtnaattagnaaaaaatatgagtgatngaattttnantaaaaaagttaagnntaaattttttggnatatttaaaaagnaattaaaaaattttaaaatttaataattttnntgganngaaggtantnantcggnntnttngnggnntngtggtgggnnttngnnnnnnnnnnnnttnnnangnnnttnagagtanganaaatattttaataaaaattttgaaaaattgattagagtaatngaangttaatgganganntaatggaaaaaaattnttgaaggagagaatttaattaaatntattnnttngggggaangtggtgggtggtgnggggtaagnagtgatggtttgtttnattatggtatngaatnttttggntagtnagnaatngttggttaanttgnnagatnggangggtgtgnatgantttatgaaaaaaatatttatgaaanaaaaaaattgattttt

SEQ ID NO: 42530 - DNA, 620 bp, Heterodera glycines
catcattttacttattaatcgcccaattaattggtcgcccccccgtaaatgattgggtaaagttggcatatgccattgtgtgctaaaattgacaggaaaccggccattgcaactccggaagtgtcggccaacgaaataacggtcattttgaattctctggccatgggtgaagcctaaaaatgaagaaaatttgttaaattatttttatttttaatttaaacattctaattaaatagtttacaaagaaagctttacttgttggtgaattttgccgaaaaagttgcaacatgcgccgttgaccattcccacaataaaaattgatacaaaaacgaacaaaatgtgcggtataaaacggaacagagcttggccaaagaaaatggccaaattcgctaactgaaaatggtaaaataaaaatttaattcaaaaattttaaatgtaaaaataccataagaaaagggagtgaataaaaaataagtgatggcatttcgacaaaaatggcactgagccgagaaaggaaaaggccgatcagatggaaagtttgtagccagcggaattggctggccaacgacaagccaaaactgtgagcacaatcgaatttgacatgttgcagctgataaaat

SEQ ID NO: 42531 - DNA, 886 bp, Heterodera glycines
aacctcggccacacactgttggatcctcccccactgacacagggaatggacagggagagggcggacacatatttgtgtgttcggtaataggtgtccgcaatcagataggccgtttcgtcggaggccaaaggatgctggaaatgaatgacatgacaccaattagtaaatcagaatgccaatttggaaaaaatgattttggaattgtgtttatttgtataacgcggtgaattatcctaaaaaggctttttttaccgtaaagtcttcaatgatactgcccccgcgctcctcaatcacttcttagtgttgccgggcagtttgaccttctgttcggctaaagatacatcagacaacaggctcgtcggaaccgctgaaaatgaaaaaaaatattttcgcgttaactcatttcgcctcaattttgggggaggggaaagctgccaaaattggcacacatactcttttcctcgtaattgtgtcattctcattgtccgcaggaggagaaggttcgtctgcgattttcttgatgtacaaaggcactgcgcggaccaaatacgagccgatgtcgtccaaaactgttgcatagaatttgggcgactaaaaattgtaaaattatttaaattttgctccccctttactttacgtcttttctgctggtcaccaaagtgcgtgccatgttgaatgcttgatgctgaaaagcaaatgtacaaaaatgaatgttatggcacaatgccataagaatgcacccgcccagattcgttttacctttttatcgtcagacattttggcgtcggcggtgaaggcgagaatagtgggcaagaatttctgaccaagatattgctggggaagaaaataaagtaaaattagataggccaacaattatgtaacgaaa

SEQ ID NO: 42532 - DNA, 620 bp, Heterodera glycines
ttctcgtttgtggggagaaattcgaagaattttcccatccacgccatttttagtgtaatatgttaacagaaaataataaactgaagcattcgttttaataatataactttttttgttgttaaccaaatccagcaatcttggtatcaatcgaaagcttaacatgtttagaagatatttctaagctattgcttcgcgattagacaattaccaaaaaagttataacatgaaattccaaaaaagtcgaaatttttgagtttttttcttaataacttttttagaagctaaaatttttgtttgttttttgtaaggctaatagagcttgtgaagggctttcgaatgataccaagattgttagatttggtcaacaagaaaaaaagttataataaaaaaactgaggctggcgccaaaacgtcggcgccaaaacgacccagtcccgcaatttttagtgtaatatgttaacagaaaataataaactgaagcattcgttttaataattaaattttcaaatatattcatttcttaggggtggaaatttcgcatttcgcgccaaaaagcgaaatgcgaaacgccaaaaaatgcgaaatgcgaaaagcgaaaagcgaaacctcggcccatccctg

SEQ ID NO: 42533 - DNA, 838 bp, Heterodera glycines
ttggtttatttttgggtaaattgtgttcacttgccattaccttgaggcgaaagcctttgtttgtacggatgtcactgttcggctcgacttcgtaaacttttgctgtctccacaacttcgactacctgagccgcctaaattccaaacagttcgctaagattatttccgtttaatataactgacgcactctgtacacttgcttcccatccgatttgttgggaccgattgaaatgcgaacgaagcaaccgaccactgttttagcgaagaacggagcatgaacaaatttcgcgagctttcgccggaaaagttggcaacggataatttcatcccttgttttaatctgaatgccaaaatataaattcgaaatgcgttggaccacctcttgtttgacttcgggagaaggagaacgtgacttggtcaagtcggggctggaggaacgcgaagaactcgtcgacgaactgctgctgccggccgattttccaccttcgttttcgttgccaaatatttcgtccaagtcgagagtcgccttcaatgtctccttcttccgcttttcttcggcttaaaaagtttcaattacatttcaattcatccaccgactcttctttctctccaattgccttgtattttattgcgtcgtttgctcaataagtcggccatggctttctttttactctgtttgttcgcgacttcggatggtttgtggtattccgtgtcgatttcgtcgtccgactcatcgggttcagctttaaccgcactcttcgaatgtgatgtctcttccgcgtcgtcggaactgctttcggctaaaagtttggcaaatgacataattagggccaatatct

SEQ ID NO: 42534 - DNA, 970 bp, Heterodera glycines
aaaaatttatatatttttctgaaaaattttataccgcacaaatgctctcaagcatgatagggagagcggtgcgcaatggatattatattgcccagagaatttttagcttctaagaggaattccagaaaaatggctatctttttctgaaaaattttataccgcacaaatgctctcaagcatgatagggagagcggtgcgcaatggatattatattgcccagagaatttttagcttctaagaggaattccagaaaaatggctatctttttctgaaaaattttataccgcacaaatgctctcaagcatgatagggagagcggtgcgcaatggatattatattgcccagagaatttttggtttctaagaggaattccagaaaaatggctatctatttttctgaaaaattttatacagcacaaatgctctcaagcatgatagggagagcggtgcgcaatggatattatattgcccagagaatttttggcttctaagaggaattccagaaaaatggctatctatttttctgaaaaattttatacttttctgaaaaattttataccgcacaaatgctctcaagcatgatagggagagcggtgcgcaatggatattatattgcccagagaatttttagcttctaagaggaattccagaaaaatggctatctttttctgaaaaattttatactgcacaaatgctctcaagcatgatagggagagcggtgcgcaatggatattatattgcccagagaatttttggtttctaagaggaattccagaaaaatggctatctatttttctgaaaaattttatacttttctgaaaaattttataccgcacaaatgctctcaagcatgatagggagagcggtgcgcaatggatattatatttgcccagagaaatttttggtttctaagaggaattccagaaaaatggctatctattttttctgaaaaattttataccgcacaaatg

SEQ ID NO: 42535 - DNA, 1251 bp, Heterodera glycines
  unsure (1)..(1251): unsure at all n locations
ttcaaaaatgaaattaaccgttaccggtttgtctagtaccggtacagccggtaaaaatttgcactggtaagaatgggggtctggtcgagaaaagagaaggaaattggtgaagaaggagaaatttttgagaaaaaattaaattttatttcatttagtcatgggattacacacatgcacatgtggtgtagtggttaaactttctacctttcataatttttcgcctgggttcaattccccacttggatagaatattcctcatattttctttaccattattttaattaaaattttaattttaaaaaatattccaacttttttctttcatgttaagcatcctaaaaacccaaaacttaatcaattggctgttaacaaatcgcattaaaaattacaaaatttttcccggcggcgcctatcggcaccgccggccctccttgttccccaaaagtcttggaaaaaacgtgccgcgtaaaaagcggtgttgaaagcaaagaaaggtaattgatttacattaatttacatgaccggagaccccttcgcaaaattggaaaattggccgctgaccccttgttttgcaataatctgaattttgaggtctacatctgaattttagtgttctttatcctgaatttgaaaaaaaaacttggtcaacctgaatatacatatacttctgaacaattctaatgctaaaaaacaggcactcgcgcgaaaactgaataaaaattttgtatttggaaaattttgtccaaaaatttttatgttctaaaattaccggtttttaccggtaccggtaccggttgaaaaagttggtaccggtaccggtttttgcagtaccggtcagtaccggtaccggtttttttgcaattaccgattaccgctcaactctacttcagtctattaacggattgatcatttaaaaaaaaattttatttttggcgcagagaggggaagcgataagggggtaagaagcgataaggcgttaactgaccccgggggaggggagaacgcagtacgcccagaaacacttcaccaaaaccggactgtcataaatccattccatggggtgggcgggtagggatagtgcccncgtttccgtacggaatcggcatctgtttgattttaggaattggtgaacccggccattgggtggtacaacgaaaaggatgactcagtgattttgtcggctgaagtgtctccgtattcgcctgcgtatccgcacagttggtctcagaagaggcgatggactgactgatt

SEQ ID NO: 42536 - DNA, 1027 bp, Heterodera glycines
  unsure (1)..(1027): unsure at all n locations
ctttagtgagaattgcggctactattgcatttattttcccccccttatgtgctcattaggaggaagaaattatgagagtaactttgaaaaaataacaaaaaagttgataggagaagataatccagatttgtttgtcgtgaattttgttaagaaactgataaaaagtatttaaaagaatttatcattaactcatttataaaaatggatcgattagacacagtaattgcttctcttctgaactgtcccgcacgtaacttgtgcgactgcttaaatcacccggatgagattcaaaaagttgaaaaatacctcaaatgaaaaactctacagacaacatacaaaaatcaactagatgaatacaaagattttgagtacggtggaattacaagagaaagtgcccgtaagcaaatggcttacaatggtttcaagaatgtgaccgtcgaccagcatttttatgtacggcaccgcatttgtcttcgctattcaagcaatccttgcgtgatcgaaaaacacaagaatggcaatgaacgtttctacccacttgaacttgtgaaagtgaaggacaatgatataatttatttagggcaaaattttcctaaacctttaattcgtgatgataatatgtttattgatgatcaacaatatttgaattggtaacttaatgcttaaaattacataataatgaataaaattgattaaatacaaaatcaatttcttcttttgatctagagcctgttagattaagctttccactagagaacactatgatcgatattttangggttttggtttctgtacacgagaccggggaatagttcaggagtgaaggaacaatatttggcgcctagaaagtcggacagaggtcctaagcgtatatgaaaaccaacgtctgttgtcgcaaatcaattcttcaccgcaaattcgtggattcgtgcctcgtagtacccacattgtcgtattctttcggtgnactgctccgcagcttgcttacattctttctcattagctgctcctgtacatacgaattttc

SEQ ID NO: 42537 - DNA, 786 bp, Heterodera glycines
taaactcgtgataaaaacatgagataaagcacattagattgggcttaaaattctctacaaaaaagctcttagacgattttttgataaaatcaactcctgacgagttattgcgtcagaactgaaattgaggcctagcaaccaaaattttctatttccaaaaaaatttttaaaaatttttctgaaaatgccaccaatcgatagagcgtgaaaaacggttgcttgaaagtggtcttggtttttccgagaaaaatctgtaaaaaataataaaattcaaaaacgaaaaattttcgagggggcctagctcgaaaaattttgaaaattttcaaaatctgaaaacgccatcggatgcagctttaaaaactacacaaatgctcaagcggcgccaacccgctccgcttaacccccagcgagttattcacgaaaaccgaaaatacggtttttggcttttcaatttttagccacgcgtaccggcaatacgataggtcgtagagaaaaatgtttgcaggcgaacttgtagtgcacacttcaacttaaaatcctcccagcaagcattttttcatctgaccaactgccctcgtttcacaggctcttgaaaaaacgaaaaagccatttcagcgccgctggcgctcagttggccaccggaccggaatgcccctatttttcccggatgcgccgtcaaaagttacccctgcctgcaaaatttcagatccccccgattagccgttcccgaagatttttgttttagcaatgagttggcactgttgttctaaagtatataaactagcg

SEQ ID NO: 42538 - DNA, 1078 bp, Heterodera glycines
  unsure (1)..(1078): unsure at all n locations
tgaaaataatttttttttaaaattaaacggtcccacccacccatgggatagccttatataattatcatttggncaaaactttaaatggatttttgtaaaggtattaaaatgaatgctgaatgaatatgcaacattagtatcaaaagctcagacactaaagaaaaaaagcccggggaaacaattatggtaattaataattgcgggaattctttgaagttcattccgtcgatagggttttctcacatttggagaatttacataaatgagaaaatggtaaaaagagtgtgcaaaatgaattcataagctaatggaaagtttgctttgctgatattcgaaaaactgtgggaataaaaaaaagcgaaaataattaaattaatttaatttaaataaaatttaatcgaattccaatttaagcttaatgatgaaaaaaagaaaattaaaagctccaaaacctttttcaaagaaggaaaaaaaaggcctaacttgtaaaaataaataaaaattttccgggggcaaaaaccccattttttttgttaagggggccctaaaccctaatttttaaaaaaccaccccattaaaaatttttgggtttttttttttaaaaggttttttaaaaaaatttaaaaatttgaaaaaagggaaaaaaagggggaaattaaaaaaaattttttccctcttagagaaaattttcttttttttttttcttcccaaaaccccccccccaaaattttttttttttttttttgggcccccccaatttgggggaaaaaaaaaaaaacaacccgggggggggtgtgggcgcgggggtaaaaaaaaaaaatttttcccccccccccccaatcttttttttttttttataaagaaaaaaaaaaatttttttttttctctctcccccccccccccgccaaaaaaaaaaaatttttttttttttttttaaaaaaaaaaaaaaaaccgccccccccccccccccccaaaaaaaaaaaaaaaaaaaaaaatttttttttttttttttttttttttttgtttttgcgccccccccccccccccccccccacacaaataaataattttttgtttt

SEQ ID NO: 42539 - DNA, 1321 bp, Heterodera glycines
  unsure (1)..(1321): unsure at all n locations
cgccggacttgccgagatgaacaatcactacaagggcatttttaaagggaacagaaagngaattgncggccgccggagtgtctctaatttcatccttagcgacgaaaatttaaaattttatgattcatctgtttaaaataattttacgccaaattcataacctttgtgattttaagccttttgttatattagtcagcatttttacatttaattttctgttcgcctatgtaaaatttgccgtatttaaaccattgcaaaatcaccattttttatcgttcaatcgttcattaataaatatatttgttcgatcaaaattcactaataaagtgtgaaatataattgaagtattgggaaatccaataaaataaatttaatttaaataaattaaatatttaaattaattcttattgactatctgaaaaaaggagtcaataaagtggtgccacgaccaaacatgtcgggtcctattagaatgcggataaatccgtctttaagaaaattaactgaaagactggtagaaattagaccagtaattgatgcgcaacaaagagaccctgaggggattgatttattaagaaattcgttggtaaaaataaaaagatcagtgacgttcattgatgaaagaattgaacaatggcgcacatatatgacagaaattgaagttgatgaacgagcagcagaagaagcactttttgtaaatatgaacgcaaatcagcgccatgtaactgaatggttagaagatgcaagagaagcaattgatgaaatagaaataattttagtaaatgaagcagatgatggttcggacacattatcagttgaattaggtgcgcaaggcaaccaacaaagaataaatcaaaatgaaaatgaaaggaatgaacaaagaattgtaaatagagaaagagttgaggctcctccagtatattatccgaaactcccatggccaaatttttatggagacacaatgtcttggccagttttttggcaagcatttcaagccaatatgggcgataaaccgattcccgaagcacaaaaatgtacttatttattgttaagcctaaaaggcaaagcagcccgagcaatgagagggtatcaaccaacagcagaaaattataatttagtaataaatgcgctaaagcgactttacggtaatgaaaaagtcataaaagaagcactacagaatgaattattgaatttaccgcaggccaatgaagctgctatttcactaagaatttgtttagaagatgttgnanaagagtgtgcgtcaattaaataatttngggatttcgctgagataaagatnatgtgatgatgacaataaaaa

SEQ ID NO: 42540 - DNA, 1503 bp, Heterodera glycines
  unsure (1)..(1503): unsure at all n locations
gctaactgggatagaaaaactactggtaatattgccttcttagaggttgccaactctatggaacncagaagggaccacctttttaattttcactgagaatcgccaaaatatgggcaaatttgggtcgtacaaatccgaacgaatcattggccatttaagtcatttaaataagtaaattatctttaaattggccaattttgtgactaacaatctgctcgttgtttttcccatcctgcccttagaaatacttggacagtttgcattcattttggactcgctcagttgggccgtcacgtttgaacccccacgttttgtgccctatacatttgtgccccatgtttttttataacttttttctgtcatcccaatcaaacaatgttggtatcactcgtaaagctcttcaatgctttattagccttgcaaaaaaaggattttctagcatattaaattgttatttaaaaatttcaaaaatcttgactcttgcaatttatcatggtgtaactttttaaacaattgccgaattgcgaagcaatagctagaaattcttctaaatatgttaagctttcgaagggtaccaaaattgtttgctttggttggtcgacaaagaaaaaagttatagtgcaaatacatgctaccgtgccggctcaaccgtaacggaccaactgagggaaaccgcattcatttcgtatataaattgaattcaggaagtcacttggccaacaatttcgcgcgcatatgcaaaaaataaaattggtacaacggctattgttgagggtgaagccgagtataaaaaagtagcgcagagggtaaaggaaaagcttgatataataggccaacaaaagtaagtaaaattttagagcggatgtgatgctcgtacgaaaatcattaagaggaatatttttagagtcagaccgggcttctggtactgaacctgtcataattcaaataagtcaacaaataggcaatgaaaaattgaaaaaattgtcaaaattcaattttattacttcagtctgcaaaatttcagaaaaattcatttgatttaagtcaatttcatgatttggccaaagttttcttgaatattttcacttatatgtattttatgctgcccttttgcgttttaatttcaaatttaaacatttacggtttattggatttgaaatattcccaagttattaaaagtgatattattatttttttaataaattgggctttaaatggttcatttttcagtgcctaatttcgtttttttatctttataatttcctaaatttagatattttcacacggtcatcgttttcccaaattggagtaacgcttttcagttggcaatccttgctaaacaaagtcactatttctttttggacggcgaaaatgaaatcaaagaaaataaaatcaatgtgatcgttgttcggtgtgaaaccgaccgttttggaagggctatccaagcggggcagtggtttacccaaacagttgaaaaccaaatgaagacatgataaagtaatt

SEQ ID NO: 42541 - DNA, 839 bp, Heterodera glycines
  unsure (1)..(839): unsure at all n locations
acatatttcaggatttttagcacataaaaatcccagccctactaggttctaatttatcaagtnccacctctaaatgacgccttccataatttttcaatattttaatgggttactctattaaattttgttgattcaactaaaaaaaattgtgcccaaaattcgcaatttcccatatgtaaatagaaattttggccgccaatttccggttccacgggatggagatgggggtggggcgtatgctttatgctctaagcccaacccctaacccatcgacgcccactgaaccatccccgaggcgcacaaattggcacaccaaaaaggtggcacacattcggcgatggcacctctatctaatacatgtgccaaatgctaatgaatgaagcgcgcgcacgcgcgcacacacacaacacacacacacacacacacatagggaggtgaagatgtcctttccaattaaatgcacacgaccacgacgacggggtggcactcatttatgaaatgccaaaaatacatacaaaaaagtgccttaggcgggcgatgccaatcctgcccagccattaaaaaacaattttgttcattcatcaatgagcaacggtggcactaaaaaatcggcacccgcctacctcagttctctacgatgccattcattgtgcattttgtacacattcgaattcaattagtggcaaaaatttattcactaatttttcctcgcgaagcagcatttcacgcttcaaatattcatttaaatttatatttggctttacaatggcaaaaagtgtggcgttgtggatcataggaataatttaaaattctgttttaatgaagaaaatttgtgccaa

SEQ ID NO: 42542 - DNA, 1273 bp, Heterodera glycines
  unsure (1)..(1273): unsure at all n locations
aaaaaaaaaaaaaaaaaaaaaaaaaaaaaaaaaaaaaaaaatttttttttttttttcttttttttttttttatttttcatataatcgcgcctcatttccttccttttttcctttttgtccgcccccccccccccccactcctttttctttctttttccctcaaaaaaaaaaaaaaaaaaaaataaaaaaaaaaaaaaaaaaatttttttttttttttattttttttttttttttttttttcccacaaaaaaaaaaaaaaaaaaatataaaaaagaggaggggagtgttgtagggggggggcgcggcgcccccctttttttttttctccataataatttttttcaaaaaaaaaaaaaagagaggagattttcttttttttttttttttataaaaaaaaaaaattttctcggggggggaaaagagtttcccccccccttttttttgaaaaaaacagaggttaaaagaggggggggggggggggtttcctttttcgcctttccccctttccaaaaatttcccactttttggggggtttccactttcctttttccccttttccttttggggggaaaaaggggttttttcccccctaaaaattggggtaaatttcccaaaaaatttttcaaaattttttccttaaaattggttaatttttcagggaaaaaatctgttataaaaaggtcaaaatttccaattttttttccccggggggggcctattggccacgccggggcccccaaaactccttatttttttttagaaaaaggccccaaaatcgcaaaatttggtaatttgatgaaaaactgttctcagcggcgcgccaaaactcttattttctccttagaaaaattatataaaaatcacanaatttgatcattttttagtgaaaatctgtcancaaattttaatcaaattttcaaaaattttcccggcgccgcctgccncctcttcncaaaaagtttttttggaaaaagcgcgcctcaaaaaagcgttttattgatttttaaatttggaataaaattttaaaaaatgatttttgctttatgattttaactattaaaaagttgtagaaaaaatttcgcttttcgcattttcgcatattttggcttttcgcatttcgcttttcgcattttcgcatattttggcttttcgcatttcgctttttttttcatttcgcatttttcagtttcgcaaatttcgcttttcgcatttcgctttttatttatcaatttggcccatccctggtttagatatgtttttgagttggattaga

SEQ ID NO: 42543 - DNA, 690 bp, Heterodera glycines
  unsure (1)..(690): unsure at all n locations
gtgaacaaaatagtcaaacccaaattcaaacttaactctcacaggtaaccttatatatnntttgccttggtcaaataaattcgattagtgttggcgtgtgtttgagtgcttcgtcgatgtatttgtgagcacgttggtagtttttcaaccagtcgaagtgttgcgccaaatagtaataaacccacaacaccgtggtaggacattccggaaggttcgacccatccaacgaaaatctgttatagccattttcttcaaattttcgaacaaattccaataaaattcgctctataactgagaccttaacttctttttttaagaatattggaatgaatgaaacacacttttagtgggtcggaataaagaaggacgagatttttgaacaacgatggaattcctcgccgaaggcattcaatgagaaaagcaaacattttggattcaaacgcggaccctacaaataaaaaaatattaaatatgattttaacacagtgcccaccgctcaaataattaaggtgaagcatttttggaatcggtgcttttggccttttctcaatgatcgattcgtaaagagcagccaatttcgggcggtcgttgacctcatctgtttattataaagaaatcaatcaattatcaggataatttggctctagtgcctttatgagtccaatccaattgacaatacctggtttatat

SEQ ID NO: 42544 - DNA, 1046 bp, Heterodera glycines
tgcaggtctattacaatttcagaacatggttggatggtgaacccagaaccgcgcgcccaccgctaaagggatcatcgattatttggacggcaaatcgccggccaacgccaccgaaattggcaccgttcggaagcatgacggctgatcagttacaaaatttgttgaacaccgaaactgatcgtttgaaaaggctcggaacgaaaaaaagtgatcgatattataaattgttgaagaaaattggggaaaatttagccaaagcaaagaaagctgaggaggaatatcgtcaaaaattggccacaaaacaatttacctgtgaacagtaaaatttccattttccgttatcattttttgtttgtgtatttttttgcctgtaaatcacaaggctttttctttttttaagataaattttcttgcaagcttattatagtttattgaatatatatactgctggtttccggacaattggttagtggacaatcggtcaaaaaacgtacatttaaaatgccggatttaataaaaaaaaggaaataaataatttaataaaagctaaacaattaattgtaaaagtggcttaaaaatcattttcacagctttatatttttcctgaaattcagttaaattaaataacttattaaaaggtagaaatgttctataaaaatacaaaaatgactttttataaaattaatcacaaatttatgaacaaaagcaacacaaaactgcttaatggcacaaaaaatgatttgataaagaattgaagttttcagtttttctaaatttagataattaataaattaatttggtatctcaatttgaaaagtgtgaagaaagctagctaatccaaaatttatttccaagctttttttaatacatattttttatgtctcttttaaaaaaatatatttgcaattttttagcgtcatttttcattaaattatttaatatttttaggacattattcaattttctttacagtgggaaaatttgtaattttgattagaaaagatcaaagaagtaatcaaaacgatcaattatttgaaaagcttttt

SEQ ID NO: 42545 - DNA, 260 bp, Heterodera glycines
tttttttgaaaattttctccaacgcgagcgtagttcatcagaaaatttcaaaaaaatcgcttcctaaatttttcaaaaaatttttttcttgaaattttcttactaagaaagttcctaagaatttttttataaaaaatttctaggtttgaaaattttttaaaaaaaaatttttcgggggggaaacgacgtgggggggaaacgacgggggggaaacgacacgggggggaaccggcgggggggaaacgacgggggggaaacga

SEQ ID NO: 42546 - DNA, 1254 bp, Heterodera glycines
  unsure (1)..(1254): unsure at all n locations
ttatttttaattttaattaattctcttccacaaagtcaattaattttaattaatttatttatttatttcttaatcaataaaaacccttcaataggtttaagttcacccccgcacccatccaataggctttggtttaaaccaataggctttggtttggaacggtggttttccaagggcgaaaaagggggctagtaactactttcctctcatctcatctccacctgccggacgacgacgaggaggggaacggggggggggggggcggggatacaccgcctgactggacaatttaaatatccgaaaatccatccccctctcaaatatccgaaaatcgctctcatcatctctccaccgcattcatgcaccccgagccgcgcatttttggtggtggtggtggtggtgtcgcgcaaatccgtctcgtttccgtccgctgcgccgcccgccggacctttcgtgcggaaatatgtaaacccccgcgtggtgcctgccgccggcgcccccatttcaatgcattaatttatccagaaaatatttttttacaaatggcattttaactttccatttttcttgataggaaacatgccgcatgatgttatgtgattggtaaaaactcagttcattctgtcccgaacattcttactcgattagtctgtaaaattaaaaaaaaaaattttatcgaggctacaaaaaaaagtcgtgacccgaaaacatttttagttttccattcgtattgactctttgcgatttgtctgatgtaatagttaaatgatgatgtagtttagtgaaatttccaatttttagggcttaattacctaattattaatgaattaattaattcatgtgacccgtcgccttccttttttttactttaaaattgggctgaagcaattagccataaatcagtgaatggaatgaagaccattgacatgaactgccctaggcgccacattcataaaatgagtgtttcaaactaaaatattgtgctgcttttcggtactaaacatttcccctagattcgagaccagactgaaaatcaagtccgaggtctcccagaaaaaaaagaagtttcttcataatttggaaatgtacaaaaattgctaattttatggattttttgaaaattttgaagtgtggaggggtcttggaggagggtggagtgggtacaactctctggaaaattttttgaaaatgttttttcttcgaattttttaaaagataaaaaaaatttaccaaaaaattttttgcctcnggcgg

SEQ ID NO: 42547 - DNA, 977 bp, Heterodera glycines
agccaaatacagtaggattttgcatttgctatgccttccccccacggaattaaatatatattttttgaatatattccttacatttcgccaaatataattccaatcattctgtcaattccaataaaaaacattataggaggaatgcctcctaaagtcaattatgataaaatttaattattagtttgagtaaattacctaacccaaacaaaggaatcattaaaatctttgccgccaaacgatactcaataaaattttgtccagaaaattctgtataaacaaacaaaaaatggccaatctgatggaggatttcaaaaaaggaacaaagtgccaagaggtaattaacagtgccacggaatgacctaattaaggtaattaaggttcacttataactcattaatactgcttactccaagaatttatctacactaattacgcactttgttaaaaaggttacaccaatgacagaagaattgaaaatgatgccaattaccgcaatgattccaaaaatcagtgcgcatccaattaatgaccagctgggatggacatctttgaaggccaaataaaactgcaaaaattaaaaaaaaacaatttataaatatttcaattaatgactaccgtattgtacgttgtgttgtcattcattttgattaattttatttaattaattttttgagataaaaaccacgaatggcaaaatgctgaattatttgcataaataaaaccgaaagctcacctgacgatttatttgattaaatgtttctgaatttacataatacttgtgattttttgtgtctgcctttctgttcatggcacctggcaaataattaatgaaattacactgtttacatcttttccaacaattgaataataaatggaataacgctttttgtccggaccgaactgaacaaaaagaattcctataaaatgttttttttttataattggaaagaaaatttaatttttttttttttgaaaaa

SEQ ID NO: 42548 - DNA, 772 bp, Heterodera glycines
aggtccgaaagaatgcccattttaagctatgctttatgcccagcacattggcaccttcagcgcccccggcaccgttgatggcagcattgttgaaaccgttcatgcgcaactgctgttggctgtggtactgcttgaacgactcggtgtagtggtcctggggcctcggttggccggcaccgcccatccgcgacgaggtggacgcggcattggcatcctccaccattggcattggcacgcgtccagctggcagttcagcaccggcaccatgcttatggtggtgctggtgatgaagccgtttaggatggcgcggaaattgatactgatgggccactgcaagcgccaaatgaagctgaacggagtggcaaaagccggcaaaatgacaacggacaaatggcacaaaaatggacaaatggcatggcattcaccgaccagcgagtgacaaagtcaaatttggcactctccggtcggtgtgcatgcttcggcgtaacgaaaacggcattttaagccacacaaaaaatggaatttcaaccaggactaagatcgcaaaaattagcacgaaaagctaaagcaaagaaaaaaacgattagcgcagaaaaaaagtattggccatttcacatttaggtcgagattcttgaccagggggttttggcaattaacagaaattgtacaacagctgatcagacggttttcatatgatcaaagcccgatcgagaatctcgaattttgaagaaataattgatgccaaattgtcccacctgttgggccaccggct

SEQ ID NO: 42549 - DNA, 765 bp, Heterodera glycines
ggtcccggtcccggtagggcaccggggaaaaacaagcactgataagaatgggggtctgagtgaaaaattagtaatgaaaaattgtagttaaaaggaaaaaaatttaaaaaatatattaatatattctttaaaagtaacgccgacaattttgcggatggcctagtggctagtctccttgactttcccttcttctttcccctggttcaatccctctacagaaattaacatattttgaattttctttttgtatattcattggtttcctatcgagaaatatgattccttatatttttcttttaacggacacatgtttatcattttttttaaagaaaatccgtacaaattgagcctaataatcccaaaaaagaagccatttttgttgaaaatctgttaacaaatctcactcaaattttcaaaatttcccccggcggcgcctatcggcaccgccggacccctttcttccccaaaagttttctggaaaaagcgcgccgaaaaaagtggtgtgataagtaaatctaaatttcaaataatattcgaccatttagtccaaaaaatgattaattgtttgaaataattaaagaaatttgttttttcattaatttaatttatctttaacttttggattttattaaataaaaaacaaaataaaaatctaattttgtattattttcagttgaaaaaaaaattaaaatttgaatttttttgaatttttgaaatttcccggttggtcccggtcccgaaaaaaaccgaggtcccggtcccggc

SEQ ID NO: 42550 - DNA, 1033 bp, Heterodera glycines
ttgtcagtgattaatcagctctcaaaaaagttgtcagttttaaaaccgcaaaaaaggcagaattttcaaagttttttatttctatctttttttatagttcgaaattttctgtaatttttagtaggctaatagagcctgtgaagagctttcgaatgatatcaagattgtttgattcggtcaataacttcaagagttatattgactcaaagttggctcagacggagttggcccgttccgatttcgcctctgttttttttttttgtaaaatgggacaaaatgccaagccaaacaaattttattatggcattgttttacatagaattatttaaactaaattgatgctaaattaaaaaaaaatcattttatgtcaaactaagacaaagaatatttgaaatgtatttgacaaaaaatcagttttttattaatttaaaatcccaattttttaattccaaactcaaattaattaaaattgttttatttgtataataaagaatttaatttattaatcacgcgaaaagcaaattatttattctttcagaaagctcaaatattccttaaaaatttgtttgcgcaaagattacggtaggtcccttctgcacatttggttttcaaattaattatctaaaacatttattttttctaaaaataatattttaaatcaatttttttttacattttgtcttttccactaaaattttttcaatattttttgtatttcaaatttttatttttgattttgtaaatgaaagcgcattttctcttgtcatcaggaaataataaattgtccttttgggattgattgtgatcgaactttttctaattttcatctttggtcataaagctaatgaatggcccaaaggaggtcatttggcggtgactgaatttccccccccccaaatgattttcttatttttaattgtatttttgtctaaatttcccaatttttttccaaaaaagcatcctttacctatttttcttatttttgttggcttatccaactccctcccccctcccctcgccgtctcattttctt

SEQ ID NO: 42551 - DNA, 1060 bp, Heterodera glycines
cctgctgggacgttagtcaaaaaaccatcaaatggaaaatttttgagagaaaattattcataatttcgtctaaagtagatcaaatttaataatcttgatatttttcgatagccctaagtgttttctattatcctgcaaattttttaaaaaattctttaagcttaaaaaaagttatgacctgagaagctcaaaaaaccaagtttttttgaacatttttagtcataaccttcttgaagcttaacgaaactttttgaaattttgtaggctaatagaaaacacttagggctatcgaatgatatcaagattttaaaatttggttgcctctgagcaaagttatatcaataaatattttcatttgatggttttaattaaaatgctaattttaaaacagaaattttataccactttatttacatttttcggtacaaacttggcgaatttttgtacatattttggcatttttatacatttttaggtgcatatttcttgagagaatcgctctcacatttttggcaatgttgacagaatgccgtgcttcatttaaaaatttcttatgaaagaaaaataatttcttaagctccaaatgtatgatgaaaattaaattttaatcaacgcaataattggcttgttatttggtctacaaatatgaatatataataacataatgataatgatcaagcatatttcatcaacctcctaaaacattgataacacaaaaatatatatatatataaatatggtgttaatatattaataaatctataagtaaaattatgtgtgccatagcgccaattcaaaattttgttttcgctccatgcacggcatcggcagcaggcaaattatggtcgttattgccggccgactcgcagcccatcgtcgtcgccgccggctgccggtggcactcgcagtgcgacggcaccggctgcgtcgccgctgggctgctgctcccgggcacgcggcggtcgctgccgtgggactgagacgaggccggcactgtcaccagcagatccggcatcggcatcatcacggttggcacaatggcgttgcgtcgtcgtctgag

SEQ ID NO: 42552 - DNA, 1179 bp, Heterodera glycines
  unsure (1)..(1179): unsure at all n locations
tgttttggctttttaaaaaaatttttggcttgtattttttaatttattgatgtgtgcttctttagttttgtgtgtctgcggtagggccgaaacacactttttttactttttttgttttcttttggaagagccgcactgacgaggcccactcttccattagagattttataacaaaaaaaattttttcatttaatttttttctcaggaattgtccgcaaatgtccgtccgcaaatgtccgtaaggcagctatacactaaaatttagaaataacacccctgcaaaattcgggttaattatattcaaaaaaaaaacatttaagcaattttagatacttaccactgtctgccattacatacgccggccttttattcaaaaatccataaatatagcttttacttcccatgagagtattgttaggcattgcgacggttctgaattagaatagttaaataaagataggtatcaatattcaagtttcaatatttttctattgatttttttaaaaacaaagaataaataatttctacccaacaaatttttttttgatatttaaatttctggtaagtgctgcaggcttctccacggagaacgaaattttggtgaaaatttaaaaattattgcctaaccttaacacatttccttgagccgatgttggccgccgttgttcatacggcttcattgcaaagcatccggaaaggtccaagtccgtttcttttaaaatgaatttataattgaaaattatcaaataataactccataatttggaccggaccttctttttttggaaggcataaagctgcgatggtgagcaaacaaagtttgacaatgttgataataccaagcaaaagtttcattatcttttgaataaaattaaactaattacaaatgattgcgtgatttcccattcacaattttcatattttgctgcgctcaactgccaaaatgcagaagcgaaatgcgcttgtacaaaatatccctggaagaatgggggtctgatgagaaaatagatgaaaattggtggagaaattttgagaaaaactaaaatatttatttcattacatacatttattgcatcaaatctggtttagtgggtaattgaaattttaacacaaattaacaaatatnntgtcattttttgacaaatttcagtaacaaatctcactcaaaattcaattttt

SEQ ID NO: 42553 - DNA, 772 bp, Heterodera glycines
aggtaataatgagaatgtcattttttaaacaattctacgagacaaatactggacctcctatcagttagacaaaatatgaacgcttgttgtccaattgagagcgctttcggaaataattgcttgaaccggtaataatgagaatgtcattttttaaacaattctacgagacaaatactggacctcctatcaattaggcaaaatatgaacgtttgttgtccaattgagagcgctttcggaaataattgcttgaacaggtaataatgagaatgtcattttttaaacaattctacaagacaaatactggacctcctatcaattagacaaaatatgaacgtttgttgtccaattgagagcgctttcggaaataattgcttgaacaggtaataatgagaatgtcattttttaaacaattctacaagacaaatactggacctcctatcagttaggcaaaatatgaacgcttgttgtccaattgagagcgctttcggaaataattgcttgaacaggtaataatgagaatgtcattttttaaacaattctacaagacaaatactggacctcctatcagttagacaaaatatgaacgtttgttgtccaattgagagcgctttcggaaataattgcttgaacaggtaataatgagaatgtcattttttaaacaattctacaagacaaatactggacctcctatcagttagaacaaatatgaacgattgttgtccaattgagagcgctttctggaataattgcttgtacaggtagtaatgagaat

SEQ ID NO: 42554 - DNA, 1211 bp, Heterodera glycines
  unsure (1)..(1211): unsure at all n locations
aaaaatttgtcatttttcgggactaaaaatttctttttttccgctccgggtaagccaaaaaaaaaagggtctgttgggaaattttttgctacaaaaatgttgatttttgctgccaatttttcgtgcctttttgacgcttttgttcattttttatgcctttttcaccatttttcgtgcctatttgagaaatttgcgtgcctaaaagtccggtctctgatcatcatatttgagtgttttcttcgttaatttaacactaatgaattatctcgctttatcttcttcttttgctggtggtggcggagacaatggccttaagcgcaatttgaattatttaaaaaatgaaatcccttatttaattgcttacccgatgcaattggttccactataaagccaaaagtacacatagttccaattttcatctttcttctgctgctgaaccgccgcggcctccccaattttgcatcgtttcattatccaaatgttgtccaattcatttgatttggccaatgtcagcttttcttgcgttcgttcgttcaccaattcaaacggcaccattggctttgtcggcacatgaacagaaaaatgaatttcgtagctgacggaagaaatggtggtggcacgcataaattcctaaacaattccaaaaatcagttatttgccgaaaatgttgggccgcacctcctttaaattgttgatcaaatgtaggctcacatgttcattaatatcaatgaaacggaatcgcttgggttggccatattttctcggagagtgcaaccatttagacaaggcttggccagcagttgcatttggcccatcaaaattatcaccaattgcatcgggcagcaatagaacggaatcgattgaactcaactgattgagatcagtgagaattgtgggcgaagtgcgacgacgcaaattgtccaaatgatcagcatcgataaagtccaagtggcgaatgtttgatgcaaaaattggccatatttcacgaacaaaaacgtcccaaatcggctgccggtcatccgccatatctgagtaaagcatccccatacgcaacttggtgccacttttgtcgaanattttgtgatttgaacgaagaanagcgatgacggagtgatcgatgtaactgtgaaaatgggaatgaatgaatgcttttattgcgatagcactgatttttaatttactcactcgaaggcgcttaaaacgaattttgc

SEQ ID NO: 42555 - DNA, 1076 bp, Heterodera glycines
ggcagccctagtgatttctagggatgggatttaagtcaaatgataggcatcacccaagaccaaacggaaaatgcgatttcgtgcttatatgtgcgtatcaagtgcgcagaaaattaggcattgcctaaacgagtccctactgatttgtctacatatatgaatttgaaaagttcgcccctgatttgtccaaccctttttgagcaattttgagtttgcgtcctccaaattaatatttacagttaagcattaaaaaaaaatctttcaagattcttcctacctctaaggctgaaattcgatctaactcagattttccataacttttcgtccccttttgtttctgaacaagaaggctctgtgaaggctttggcgcgattgagaacccaaatgatgatgaaaatcttaactcatctcacaccggcttatgcgaaatgctttgaaaatttagtaactgttgcccgtaatggctaatgattcctttggaccttgggaagggcatccttcttttttttttgaaattttgcgtgtcctcccccattggcgatacgattttaagctctaaaaaccgcaaaaataggtaggttttaggtcctaaaaaccccaaaaatatgtcgagtcctcaaattttgtcattaatcccaattcgtttaatgtaagctaagagttgccataacatcgcaacttcattgttttcatgtttctagatcttttccgattattgtagcttttttgtttcatgaaaatttttttcccaaaatttttttttgcatgctgattatagcttttgaatgaccaaaacatatttaaaaactctaaattagtgagaagcatacaaaaatttatcagcattaaacatctttttctgctcacacacaaaatttactttaattggtttggaagaacaaatgaatcgaaaaagtgaattggtccgcagaatcgggcatgctgttcctaagcttgagctattaattaatgaaaatcattaatgagcgagccatttttaagtggcgtggctttttgatgacgcccaatggactatgccaaaaaacgtgcgacagtaaaagactattggatgcaca

SEQ ID NO: 42556 - DNA, 798 bp, Heterodera glycines
ttgccgtaaatttgacagaaaattgtaagtagaaaataactaattggtgaattattttaattaataattacattgaaattataaaataaattaattcaatatttcatttattcatttagaaaaaaagcataacaaaagaacaaacagaagccgtccatttttttctcttatgtttatgttgcaaattcacaatttaaaaaaatcacatttaaattccttttccgctgataaaggcctaattaaagttaattattgcaaattgtggattctttcttatgtttttttttgctttgcctccgttttctcctttcactgcgattgaaaaataaagcgaattatttgatttacctaaggttttaattatgtaattaattaattaatcatccaaatattttaatgctcatgtcacttgacacggtgaacatataattaaatccatctttgacgtgctgtcattcattaaacgaattcatagcctttttcaaaaattggacctaacaattccaaatttaaatcgaaagttatattattattactattatttaaatataattatttaaataaataattattttatttatttttttattaataaattttttaatattttaattagttagcactctgacaatgaattgttcgatctgccccccccctatcattttttgaggcctttcctcgacccgttccccgattcctctgacaatatgccctgcagctcgacccacacgccccctcccccccccccccgggaaattcctcgcatgaaatggcgaaatgccacccccaaatattttt

SEQ ID NO: 42557 - DNA, 1290 bp, Heterodera glycines
  unsure (1)..(1290): unsure at all n locations
tcgattgcatcagataccaatgcgtgaatactttccggatcatagcctactaaaaaattaaaaataattattttgtaaaaatttaaataaaataaataaataaaataagaaaatgccattgatttgaagtttttatttcaggaagagctccgtcaagaaaatatgttgaagaaaaaagaaaacatatgcagacaaattgccagaacatttttttaaatttaattttaattgaaataataaacaattttaatttttatcactcttaaatattattttaaaattccaggaagtttaaaattgcaggaagtgtttgctaattaggtgcatcatcatttggtaactgctgtccacgttttttcattcataaattgtggtttttttaaacggaaattacttagtctatatattttttaaatattctatcgattttttattattcaaaataataaaaaattcataaaaaaataaacatttttttaaaaaattgtttaacaaaattgtcattccatcagactctcattttcttgcgattattacatatcatcaacagtttttgtctaattcatatacgtcgatttcttaaaattatgttttgtaaactttgaaaactcaatttttacaacagctaaatcgggtgccactgcacttgactcgaattcccgacattcttagccaattctatactccaacaagccacatttacatcagtttgccagagatatatgtctcagaatcacagaagagtccgttcccgaatctccatttttgggcctaacccaatctcgataggggtcattaaatgatatgcaccgaaaatcggctattagattaattaattggtcaccaaattaaacactcccgaaacagaatttatttattactcagagtcattcatttaccggtgcaaaataaaattgactcatttatatttattaccaatcaactttctaacattgcatatacggcattttaataattttctttggcattattatttaaaataatatcatttcttggtccaattttcagagaaaaaaaatattgtaaaataaattcacatgcctttttgatgacttccgttcacttacaaaattcacatgcaaaaagtagtaataaaattaatttgtttttcatattattcatccgtcaattgattttcgagagtgcattttctatgtggaaaaaataaaataataaatattgngaaatganaatcattggcacaagaatatttaattatataaattttattatatcaaaaaacattaaaaaagtggagcttttttgaaa

SEQ ID NO: 42558 - DNA, 996 bp, Heterodera glycines
ttattaaattttaaaaattttttaattgctttttaaactccgccaaaaaatgtaggcttaacttttttagtgaaaattcgatcactcatattttttgctaattgagcagaagcgtaccaaactttgcagggatactccccggtaaaggactaacttacactgaaatgagcgccgagctagctggctcaaaaaaattttcgaaaatctgagtctttcgtttttatttattttttgcaaaattaattcttaaatattttttcagaaagggttctgaaacgcaccaaattttatttacatgttagtttaggcactctgatgctttttctatcaaaaagggagatgaataaaatttttaaaaatttttaattcctttttaaacaggccaaaaagtttaggcttaacttttttttcagaaactgatcagaagcgcaccaaactttgcaggaatactgaaaggaagagaaataacctattttaaatattatctagtcagttcatttaaataatttttatccaaaaaatttttttttgggttttcggggcagtccccctgaaccgatgcgcccagatttatggggagaccgaatccttccggaatagcttcactatagcctgtactttaattctgcgttggatttttgctccccataattgtttgagtaccccaaacggacacttgaaaaaatcgatttatttttgttttcggggcagtccccccgaaccgatgcgcccagatttatggggagaccgaatccttccggatagcttccctatagcctgtactttaattctgcgttggattttgctcccataattgttgagtaccccaaacggacacttgaaaaatcgatttttttgttttcggggcagtccccccgaccgatgcgcccagatttatggggagaccgaatccttcggaatagcttcctatagcctgtactttaatctgcgttggatttttgctccccataaatgttgagtaccccaacggacact

SEQ ID NO: 42559 - DNA, 1439 bp, Heterodera glycines
aatttaaagaaaacccccccccccgcccccgggattttggcttccccccaaccccccgcccccgggaaaaacccaccccccgcccaggggggctcggacccttaataagaatacagaaataaaaagaataattcgcattttattaaaaaaatgtttaattatatgatttttattatttttcgtcatttaaattgaaggaatttacgtcataatttatgggatttattaaaaatttggaggaaaggcaaaagtgtaaaaaaattttgcaatttatcattataagaaatttttgggtactggtcctcccgagcctctaaaaatttacataattttcaaaaaaataaaaggactcaaaaaataatatttttaaaattttaattttttttttctaaatttcaaaaaatttccccgcggcgcctatcgacaccgccgaactctcttccctcacctatacccaaaaaattttaaaaatttaaattgattttcggaaatgtataaatttctcatttctaagccggaattgcgcagaaaaatagttggcggtgagtaatgcttggttttgttgaataaaaatgcatttaaagttttggaagcgtgttttaaaaatgtccttatttttgaccctaaaatcttatttttgaccagcgatgttcttatttcgggaaattttcaagggtaactctgaaaaatagtcatttgcgccgctcactcaaaaaaatatttgaaaatatttttagcaattttcaacaaattttactcaaactactgtgccaccaaaacaaaaaacaattaaaataaaataagtttctctgatcaggatctggtatccatttcggccaatccgaactccggaccggaataaatattctttatataacaatgatcagacattttctttatcaatatatcattttattttcttctaaaaatgggaattattttctatgatatttttttttattcaaaaatttttgttaaaaataataccaaaaaaaaccaaattatttattatgataattaataatttgtcgacaaacacactatttttgataaagtataaactttaatgaatataaataatatttaattaaattttgattcatttaattttctcatggcaatcatttcaattaataaaattattaataattgtaaatttttttacattttccttcacgctgttttcttcataaaaaagacccaaatattttggcagttagtttagcataaataactaaaattataataaaattaatcataaaattttataaataatgaaattttatgttatatttcttcttttattattcataatgaatttactaataagtgaaaagaatgaaggaaaaataaggccaacctttgaagaaatatttggccaacgaatgggaaaatgacaaaacaatggaaagcgaaattaatcaaaacttaaataatca

SEQ ID NO: 42560 - DNA, 878 bp, Heterodera glycines
caggccaaaaagtttaggcttatattttaaaaagtttctccaccgccgggctcactaaaatcgatataatctctccaaatttctttggccttctccattgtaaaggactaacttaacctgaaaaaatgccaacgcttgttgtttttaaaatttttcgaaattctgactttttcattaattatttattattttgcaaaatcaattcataaatattttttcagaaactgctctgaaacgcaccaaatgttaattaaaagttaaataaggctctctgatgctttttctatcaaaagggagatgaataaaatttttaaaaatttttaattcctttttaaacaggccaaaaagtttaggcttatattttaaaaagtttcatcgaacctagcgcactaaaatcgatataatctctccaaattttgcaggccttctccattgtaaaggactaacttaacctgaaaaaatgccaacgcttgttgtttttaaaatttttcgaaattctgactttttcattaattatttattattttgcaaaattaattcataaatattttttagaacgtgctctgaaacgcaccaaatgttaattaaaagttaaataaggctctctgatgctttcactatcaaaaagggagatgaataaaaaatctaaaaatttttaattgctttttaaatatgcgaaaaattttaggcttaactttttttttataaactggtcagaagcgaaccagattttgcgagggcatcaaaaagacaaggaaaagcactgctatgatgctaactccagtaattctgaatttaaaagtttttattaatttttaaagcttctctattttatcttaaagggaaaatcaattcataaatatttttcagaaactgct

SEQ ID NO: 42561 - DNA, 1718 bp, Heterodera glycines
attagcaatttttgtacaatttatgttaataaattgcatctaaattttcaattttttttccgacggcacctatcggcaccgccggactcaaaaaaaaaacttaattttcttgaaaatttgctcaaaatcgctaaattttccattttttggacaaaatttgttaacaatttacattaaaaattacaaaattttcccggcggcgcatatcggcaccgccggacccttccttccccacagtttctcaaattctctttggataaagcgcgccgcaaaaaaagggtgtaactttcccaaaaaaaaatccaaaataatgtaaaattacttaaaatattttgatctttttaaaaaatatagaaataaactaaaaacagtttgaaattaccttttacatggttaaaaatttaaaaatttagcctattaaatattttttaaaaaatttattatatttttttttgaaaaattccgacttccgagttccgacttccgacatttttggggtcggaattccgacttccgaaaatttttggggcctcggaattccgacttccgacatttttggggcatcggaattccgacttccgaaaatttttagtgcctcggaactccatccctgatatggacccattcgatgatattttggcccaaatggttgcatttatgcatctcaaatagctaaagggctgtctttgtatattcagtccgctctttatttatgttattttttaaaatttgaatgtgtggccccaaaacggaaaagtaccgaatattattattttttagtttcgacatcaaaaaaatttcagaaaattttttgaaattttcagcaattttcttaacaaaattgcattaaaaatacgggatcaaaaaaacgaaaaatacacccctaaaaatcgaatgtttcataaattttgaaatttaaatatttatttaaagtaattagtccgtacaaaaataggcaaccaatatttcgtatctccaaaaaatcatttttcctatattctacaaattaactgttaatggatttacaacttacggcaaatatccgttgattcgtcacccaaatatttgcgttgcgcacatttgatggtgttgtaactttgttcctaaaataatttgtttttttttcaatccaataaatttagatgcaaaaatttatttaaattattattttatgcaaaatttataaaaaattattattttatatataatttaggtatttaattattatttcatgcaaaatttatttaaaattcttatttttatgtataatttatttaaattattaattatgtataatttatttaattattattttatcgataatttatcaaatgattatttttttgcaaaatttatttatgtaaatgattatttatgtataatttattaaattattattttatgtataatttatttgaattttatttaaattcttatttttttaatgtttttcacctttcccattgtgccgtcatcgatgcacctgtccattcggctcccggacaatcggacagtggacaattggacagtggacaatcggacagttgggcaatcggacagtgaggacaatcggacagaggtggacaatcggacagaggacaatccgacagtaaaatgcataaaaagataagaaaatgccgtcgccggaggggaccaattgtgccatatcaagaaaaagggagaataggcaaataaaaaagtgctaatgcagtctaaaa

SEQ ID NO: 42562 - DNA, 377 bp, Heterodera glycines
  unsure (1)..(377): unsure at all n locations
ttcatcttcagacaaactcaaggacaattgggacatgtacattcgacgacatggagacaaagaaaaggttcggggcacccctcccccccggggcgctgttcaaacgtaaattattgcaccaattttggcgaactgttcacgggtcgtaaatctttggcggattgtcgcgacgacgacgaggacaatttatttttttttccaatgttgcgacttgttaatgttatttaattgggtcatttagtaattaaattaatcttgtaaaatttagtaaaactttttacaacttttattttaaattaataatgagtaaaaaaaacaaaaacggaaaaattgttaaaaaaactaaaaaaatatttcgtttaatacaaaanttatat

SEQ ID NO: 42563 - DNA, 603 bp, Heterodera glycines
aggtacaacagtgattaaaagaggtaaacagtgattaaaagaggtaaacagtgattagccgccgggcaccagtgattagaagatgtacaactgtgattaaaagaggtaaacagtgattaaaagaggaagaacagtgattagaagaggtgcaacagtgatcagaagaggtacaaatttgatgaagaggtacaaaagtgattaaaaaacgtacaaaagtgattaaaagaggtacaaaaatgcattaataatttttaaaaattgtaaaataaatgcctctttttattattaaaaaaaactttgaagcttataataatttaaatttatttagattgaaatcaaattagtttctgaaaaactcaaataaaaaaaaatatatgaaattatttaattaaaaaaataattaattttaataaaatttttcataaaaaaataatttaatttaaattaaaaaaatttattttttattatataacaaacactctttaaaatgaattaaaaacattaaaaataaccataaatataacgaaaataatgtacaccgcccggattcgaacttccccacccctcccccctcaaaatgatgctcagaaccccaacacacag

SEQ ID NO: 42564 - DNA, 886 bp, Heterodera glycines
aaaaaaaaaaaaaaggggagcctttaaaaattataaaaaaatttttaattccaaatttctgggagtgacctccatcccggttctttccttgtctttttgatgccctcgcaaaatctggtttcctttggatccagtttataaaaaaaaagttaagcctaaaatttttcgcatatttaaaaagcaattaaaaatttttagattttttattcatctccctttttgatagtgaaagcatctgagtgcctaaaataacttgtaaataaaatttggtgcgtttcagagcagtttgtgaaaaaatatttatgaattaattttgctaaaaaaataaaatagtgaagctttaaaaattaataaaaaattttaaattcagaattactggagttagcatcatagcagtgcttttccttgtctttttgatgccctcgcaaaatctggttcgcttctgatcagtttataaaaaaaaagttaagcctaaaatttttcgcatatttaaaaagcaattaaaaatttttagatttttattcatctccctttttgatagtgtaagcatctgagagccttatttaacttgcaaataaaatttggtgcgtttcagagcacgttctaaaaaatatttatgaattaattttgctaaaaaaataaataattaatgaaaaagtcagaatttcgaaaaattttaaaaacaacaagcgttggcattttttcaggttaagttagtcctttacaatggagaaggcctgcaaaatttggagagattatatcgattttagtgcgctaggttcgatgaaactttttaaaatataagcctaaactttttggcctgtttaaaaaggaattaaaaatttttaaaaattttattcatctcccttttgatagaaaaagcatc

SEQ ID NO: 42565 - DNA, 398 bp, Heterodera glycines
atcaattttcatttttgatgttcagccctcatttctctctctctctctctctccctctctcccccctctctcccttcaccctctctcccttcccactttctcttccccctctctctatctctctctcttctcccccctcccactctctttctccctttgtgctacaccaccccagtcatgcgttatgatgactctctcacactgctcccactctttttgtaatcaatgccgctccctttttccattattgttctgctcatacaaagtacacaaaaatctgtcatctgactccactccccccctccctaacagaaatgcttggtgagaggaaaaaaagatcgtttttttgcggccactaacaacaataaaaggattatgttccggggggaggaaaaaaa

SEQ ID NO: 42566 - DNA, 1055 bp, Heterodera glycines
cttagaccatttttttctaggcttagatcacatgcgacttccggcactctgataattttagcgctcataatgggatgtatataggcgattgtagaaggaattggaagcgctaaaattgtttgagaagctttttgagcgtaattacgatttttacttagaccttttttttctaggcttagatcacatgcgattttcggcactctgataattttagcgctcataatgggatgtataaaggcgattgtagaaggaattggaagcgctaaaattgtttgagaagctttttgagcgtaattacgatttttacttagaccattttttctaggcttaaatcacatgcgattttcggcactctgataattttagcgctcataatgggatgtataaaggcgattggagaaggaattggaagcgctaaaattgtttgagaagctttttgagcgtaattacgatttttacttacaccattttttgctaggcttagatcacatgcgattttcggcactctgataattttagcgctcataatgggatgtataaaggcaattgtagaaggaattggaagcgctaaaattgtttgagaagcttttttagcgtaattacgatttttacttacatacagattttggtacaacgggggggggggaaggcccaccacgaggccgcgaagcggccgagtgagtaccttcggtgcaggaaaattattaaggaagagagttcattatttatttgtcttttgcataattaattcataagtatttttacagaaactgctctgaaacgcaccaaattttatttacatgttagtttaggcactctgatgctttttctatcaaaaagggagatgaataaaatttttaaaaatttttaattcctttttaaacaggccaaaaagtttaggcttaactttttagtgaaaattcaatcactcatttttcgagtagtgatcagaagcgcaccagattttgcaggggcctaaaaaggtcaaggaaaggcgtctctgcgttgatttagcagtagtacctatgaatttaaattttctatgaattttaaag

SEQ ID NO: 42567 - DNA, 828 bp, Heterodera glycines
cccagagaaacggagaccactttcaagcaaccattttccgccctctatcgactggtatttttttcggaaaaatttctgttttttcccggaaatagaaaatttttttggcctgagcgggacatttgagtcccgggtccataactcgttaggggttggttttatcgaaaaaacgccttagtgcaaaattgtagagcttttaaaatgctatcgaatagtgtattatatggccggaaattttcaaaaattttcgagctaggccccctagaaattttcggaaaattttttttggttgaaaaatatggtgaaaaatttttttctgggtatttttaaggtgctgagcacgaatctgatgttcattttcagtttaggaaattttagaattttttaaaaattcaaaaatatttggcaattttttggccctcgggattttgggtaaaattttgaaacttcgtaactcatttcaatttaggatgaatttcatgcaataaagctttaaaaatagagaaaaataaggagaattttatgggatttatctggtatttctatcttcaaaagaaaaaaagttattccagaatttctggaaaaattcgaatttccagaaaaaaattcataactcggttctgaaaggtcatactgtaaaagtaaaatactacaaaaatccgcaatttttttctctataatataaattttattttaaatttttatcacatttttaaaaaaagatataaaaataaaagtgatttttggtttcgggaccataggggggtgaccaggatttttgggtggaaaaattttttcaccgaaaatattccaaaaacatgtctttag

SEQ ID NO: 42568 - DNA, 739 bp, Heterodera glycines
taattaattttggttattattacctgatataaatcagcttcaaagccactacttttcaaataaggcaatgcttcagccgtgatgaataagcttatgacagaaaatgcactgaatgcaaaacagaaaatgaacaaaaccgacaaatagtaaatcttttccattgttttgtaactaaaacattaattatataattaacaaggattacatatttaatttatcaaatgaaataaaaccatttttgttaaaatgaaaaagcggtgacaaaagtactattataaaaactgatttaaaagcttcaaggcacgttaaatattataaaaaatttctaatttattaggcaaaattgcgaaactcaaaataaattttaatggttattcatagatttataaaaaaaatatattttttaaaagtttatttatattaattaattaaaaaattggttataaataagggaatatgacgcaaaagagtcggtcaattgcagtacaaagcattgcaggaaacacaccattataaccaatgattgaaagtgtgccaattttaacggccaatttatagtcaatgaatgtttggccggtcaaactgaggaacaaaaatgtgaaatacgatgattgatgcgcaatttcgagggccgcattaaatgccaataaacgatttgtcgggctatttaatgttctaaaattaaaaaataatatttttattttgaaaaatattttataataaatgcaagaacataaaa

SEQ ID NO: 42569 - DNA, 878 bp, Heterodera glycines
  unsure (1)..(878): unsure at all n locations
gttatcatttttcgccgattttttatgataagttcctccccgacgaagatgttgctccccgagatttttttaaattttccccagctcccgctccccgacttttatctccccgaaagtttgtttgatacttttatattcgagaataatcattggacaaaatcttttctaacatgtcataccattcattcacttgtgcgaaatttctctctttttttgatgggtttgctgtgtcatctttttttaatgcctaaaattttctgttacaagaaagtgccatttacgctatgccatcatgcccccggggccatccatcattttcatccgctttaaatctttaccccccccccccccaaccaccaatccttttttttgtctgcatttcacttatgttatgctcttttcctcttctgcctgagcctcagttttattacatacatacaataaccattgaattttttaattaatttttaaattttattttaaatttttctttgtgattttttgctccccataatttttttttatttcatcccatttttgtaacattcaacacaaaattagcaaataatttagaaactaaaaaagcgaaacaaattaaacaaattttaatgaaaaatgacattctcattatcagcggagagcaaattaattaatatatattttaaattaatttttctttaattttttattccctggatttttgctaatttttttttttttgaatgcttcgttgactccttttgaattccttttataagattatttaaaaaaaaaacatttcttcattccaaaacttttcattaggcattttccacttctttttatttaatatttattcaanaaaatttattattcnncatcaatatcacacttttaat

SEQ ID NO: 42570 - DNA, 1031 bp, Heterodera glycines
gtcccttgccctgatcgtcggtcccttcgtggccttcagatatctctgacaaattacggcgcataaattagcgcccgctgaatcgcccattaatgcaatcttggtcgggtcgatgccataagtcgaaaatggcactttgttcaattccgcaatgactctttcacattggagaagtgccgttgggaattttgcctcgggcgaaagggaataatcgatggaaatgattgggatgccgactttccaactcaaacacagcaaagcgccgtcgtaataccctgaaaatgggcaacattacgatcaattgtttgcttaggacaaatggcgccacttccattggctaaattagtcaattagatttgcttgcttggctttccgatgcaccatccgccgccgtgaataaacacaacagcaccgttgtgccgtcgtttgtccccctttggcacgtacaatcggcacggcacccccgcaatggattcgtcgcgcacatcgcaccaatgggcggcgaagagccaacggaaaagccaacgagggaagacggggaaggtgaggagagaaagggcacgactcaatttgttacgtgcggaatgaccggcggcgatttcgacgagggaaccctttgggggaaaaagggagagaaatgagagggaaaagcaaaaggaaaaggaaaagccgaatgaatcggagaatgtgtgcactgagttaacacttatcccccaccaactaaatattcgttgaacaatcgcatcaaaaactcaaaaagcgcaattttccttcggtcggcgattcgcgcggggagcggtcgatggagggcgacgagcaacagcaaaaggatgaaaatgaaaaggaaaagccaacagagagccatgccgatgagagaggacagcacagagaggaagagaccgaaagagtcgggctgaaaaagacggggaaattgacacaaaaatgggagaaagggacaaatgctaaattgcaaaaatatacgctctattaaacacttcccccccccccccctcaatctgttgaataaattg

SEQ ID NO: 42571 - DNA, 1396 bp, Heterodera glycines
gcagcaattgcatcttagagtgtaaataaacaattgacaatggcgaaatgaccaaatccttagaggaatgctccaccataatgagcaagtgttcgcggagtcttggcaaatcgccttgcaacttcgccattctctcgcggtccctcaaaattgaaaaatacgaaattagaaatagtaatgattccttttattcaaagttcatttattgttttacaatgcaatttcctcctcgcgccttctcagcgcatcctcgtctttgtcaatcatcgaattttgagaacaaatctaaggggagtctgaaaaagaggtggtccaatacaattaagtccgcttctgcttccaattgctctttaattttgaaggcatccccaattctcaaatttgcatttgccaattccgtcgccattccttcgcatttgctatttgctttgtccaactcttcctcaagtaaattcaaacgttcttcggatttgtcttcgccaaattgcgtcttaaacatgcccaaaaatatctttttgactattctcgtttttcttattgaaaatgatacttcgtccgtttgagtggaaaaatcgctcagttccgaagattttttgcgtctatttgccatggccgtttccttctcttcactgccggcactgctgctcaccccttcgacttcgatttcctctttgcccatccgttcccaatcgttgtttgaagtcgctgagtccgtgtcactgggaggcctctgagtttgagttaaaattagagtgaattttgcaggaagtagggactgaatgatctctgatggcattgtcccctccatatgtcgcgtttgtccccgcccccttccctttcccccgtttttctccgtagttttccccgactgactgactttgctatgtccctccgacgtcgtaatttcggccaacactttgtcgttgcgcagcctgtacagctcctcctctcgctcgttcagttccgtcttcagctgcacattctgctcgaccatttccgcaatttgctgctccgtcattctttgcttcggttcatcgtccgtttggctttgcctttcgtccgattttttccgctgcgtttgcaaattgctcaaagtttccttctcatttctcagttcgtctctttctgcagtcactcgttcaatctttgcaaatttagttttctttcttcctttttagtattcctttccaattacctctctggtgaattcgtcttccgtttcggcaaattttttccgcaaaatgcttaatttgtcttcgctgtcattcagtgcatttcgcaattcgttaagttgttccaatgagtcgtgcagttggctgttctcctgtattttaaaaatattgaatgaaaaataagttgtaatataaaagaagaaaagtgaattataagtaaataa

SEQ ID NO: 42572 - DNA, 1385 bp, Heterodera glycines
  unsure (1)..(1385): unsure at all n locations
aaaaaaatggattttttcaagggttcggtttggggtcttccaaacaatatggggaagcaaaaattccaacgcagaaattaaagtacagggttataggggaagttattccggaaggatttggttctcccccataaatctgggcgcatcggttcaagggtactgccccgaaaatccaaaaaaaaatttttttttggataaaaaataattaaaatgaactgactagataatatttaaaataggttatttctcttcctttcagtatccctgctaagtttggtgcgcttctgatcagtttctgaaaaaaaagttaagcctaaactttttggcctgtttaaaaaggaattaaaaattttttaaaatttattcatctccctttttgatagaaaaagcatcagagtgcctaaactaacatgtaaataaaatttggtgcgtttcagagcattttctgaaaaaaaatatttatgaattaataccacacaagtattatttttttttaattatttttttcatttatcacccaacgttctagactgatcagaagctcaccaaattttgcagggaaactgctgagaaccctacaaatgcttataaattttcttagaattttttgcctggaggaacacagttcttcacacttaccacaccagcattattttttttttaattatttttttcattttatcacccaacgttctagactgatcagaagctcaccaaattttgcagggaaactgctgagaaccctacaaatgcttataaattttcttagaattttttgcctggaggaacacagttcttcacacttaccacaccagcattatttttttttaattatttttttcattttatcacccaacgttctagactgatcagaagctcaccaaattttgcagggaaactgctgagaacccttcaaatgcttataaattttcttagaattttttgcctggaggaacacagttcttcacacttaccacaccagcattatttttttttaattatttttttcattttatcacccaacgttctagactgatcagaagctcaccaaattttgcagggaaactgctgagaaccctacaaatgcttataaattttcttagaattttttgcctggaggaacacagttcttcacacttaccacaccagcattatttttttttaattattttttgcatttgatcacccaacgttctagactgatcagaagctcaccaaattttgcagggaaactgctgagaacccttcaaatgcttataaattttcttagaattttttgcctggaggaacacagttcttcacacttaccacaacagcntaaaaatttttggcctgtttaaaaaaggaattaaaaatttttttaaatttattcatctccctttttg

SEQ ID NO: 42573 - DNA, 537 bp, Heterodera glycines
gggaaagtgaatgcgatcacctaattgagcatggtaatgagtagaaaatgaaattaattagcacattctttccccacctgtcggcaaatttcgtcgggccccgccctcttttgccccgggggacagccgcacaattcctcgcctatgcaaatttcgcccaattcgggccgacatggcaatcccccgcacagtgccgtcgtcttactgagcagctcaatgtccgtcgccacttggattttgccacatccgatgacaaataaaaatataatttttaaaacgttggaggcaatcattttttagtgattttataaataaatgaaaagtggttggaataaaaataatcggttggttaaacgatgaatgactcatttgaatttaatttatgtaaaggcaagccctgtttaataaaacagctaataacaattattcatatttctcataaataattaatattattaaagagtttgtaatttacaattataaagtatatttcaatagatatgtacgaacaaataaaatgacctcaggcatcaagct

SEQ ID NO: 42574 - DNA, 753 bp, Heterodera glycines
tttgaccgaacgcaaagatttgcgcccgcgctgattttaaaccgaatgaatgcttttcggattgaagcatttgattgatgatgatgattgtggaaggggaggctcaaaacgatgtgtaggaaatttgttattcttcagtttgttatcgtttcataggtattttggtataaacttttgaaaaaagtgaccaagacaagaaaccagggttgtcaactgaaattttcaaaatcagcagttggtctacaaaaaattagcattttgaaaactttgttccaaaaaaaaaattaataaaaaatgtttttgcggaattatgcgtaaaaatttcagaaaattatgcatatacattttttagcatttttccaaaattcactaaattatattcaaaaaagttaaaaaaaattaagccaaatcagtattgagataaataatttttaaatcaaaaattcatgttaagaaaacaaataaataaattttggaggtgattttgggtcgattcttaggatgtattttttgaaaaaaattttaggtcaattcttagggttgtatttttcgtttttattgcatttttgttaataattttgggcaaaatgccaaaataggcaaaaataggttctttcaaaattttttaggcttttaggcgctaaaaataaaagcctagaaaataggcactaataactagaaaagtagcttaacaaccagcaaaaaaacaacatgttttcgtgcgttttatgccactgggagctcaggaaaaaa

SEQ ID NO: 42575 - DNA, 1585 bp, Heterodera glycines
atttttagtccatttcatcttgagtgttatgacattacttatatattgaatgtttatttcaatgtttagaaattttatactgtttttttgtttatattcctttgattggcatagttatttttaaagttatttatattttacacgttttttaagttgcctaattgatcttttttgatgacttggtcaaactaaattttttaaaatttatttttggttgatttatcgcacaaatcacaaggcgctaatgcactctaacagtggcatcattttcagaatatagataccgcactttttataaagtcggggaccgcgaatcgggattggcatgtccgggataaaattatcgctggggaaaagccgtacatgttttatttttatataattttttggattttagaaaatttataaatttcttgtgaaaatgtcttttttttggaaaatttttccctaatgaaaaataaatttctaaaaaacgaaaaaacattttactattcctaattacatttggcatgccctcttttacgttttgtcctaaaaactaaaaattttatttgcatattttggtgaaaagttggaatttttttatatattcagaaaaatttcgtcattgtttgtatacattttatataaacccatattaattagttattattatagaataaatattttttgtataaaactaattaatgcataataaaaattatttatgcaaatgatattgcatataattgtcttagcaataactttatttaatttaaaaaatatatagttatttgatacagaatttttcgctacgatattgcttaatttaataaattcataattattagattttaaataattaataaaatttaaaataaaggtaaaatttaaaaattcttatttgaattttaaggtttttttctaatttcattttgccatagcgaaaatgaaataaatggaattttttgactcttatatattaaaattttgaagaatattcaaaatttaattcattccaatttctgaatatttttttgtcttttaaaattctaatgatccatttatcaaattcttaggcttaaatataagggttttgttttaaaatgatttttaaactcaagaaaaatttagaaatattccactcttattaattatctaaaccaaaacttaaataatgatttttctttctttctattgttgcttccttaatatttgttttttttcgctttgggcaatttatagttaaactgttaatatttctatttatcatctatgagttttttttcaataaataaatttttctattcattcgattacaaatttttcttttatacatttgaattttcattttttgaaagtaattatttctttagttgagctatgactgaaagagacaaatctcatataaattttatgactttaataattcggtgtaaaaattataaatgaaaaagcaaaacaaaataaatagtaacaattttggtttttctatgttaactttcagttggaaagtttatttattgtatttacaatggtgtaatttaaaatataaaaaaatctttaaaaagtcataaactggcctgatctatatcataataattcc

SEQ ID NO: 42576 - DNA, 1070 bp, Heterodera glycines
taatagggcctagttaagctgtaaaaaaaatttgggggcgatttaaaagagaatagaaagaaccaggttcgatgaagttttggtaagccaaaaaaaatccaaacatttaaaaatctataaaaaatttaaaaatgagaattcatgcgagattttctggaaataagcttaatatcgcctagttaagctgtaaaaaaaatttggggcgatttgaaagagaatagaaagaaccaggttcgatgaagttttggtaagccaaaaaaaatccaaacatttaaaaatctataaaaaatttaaaaatgagaattcatgcgagattttctggaaataagcttaatagggcctagttaagctgtaaaaaaaatttggggcgatttgaaagagaatagaaagaaccaggttcgatgaagttttggtaagccaaaaaaatccaaacatttaaaaatctataaaaaatttaaaaatgagaattcatgcgagattttctggaaataagcttaatagggcctagttaagctgtaaaaaaaatttggggcgatttgaaagagaatagaaagaaccaggttcgatgaagttttggtaagccaaaaaaaatccaaacatttaaaaatctattaaaaaaataaaatagtgaagttttaaaaattaataaaaatttttaaattaagagttactggcgttagcatcatagcggtgcttttccttgtctttttgatgcccttgcaaaatctggtgcgcttctgatcagtttaattaaaaaaagttaagcctaaactttttggcatgtttaaaaagagccaggttcgatgaagttttggtaagccaaaaaaaaatccaaacatttaaaaatctataaaaaatttaaaaatgagaattcatgcgagattttctggaaataagcttaatagggcctagttaagctgtaaaaaaaatttggggcgatttgaaagagaatagaaagaaccaggttcgatgaagttttggtaagccaaaaaaaatccaaacatttaaaaatctataaaaaatttaaaaagtgagaattcatgcgagattttctggaaataagcttaata

SEQ ID NO: 42577 - DNA, 1439 bp, Heterodera glycines
  unsure (1)..(1439): unsure at all n locations
tccacagaatctcgaatgggtcaacaacttcaaagaggtgtgtctcgccatattttctataaattgttgttttttccaattttttatttagacatttcgccgtgccaccacttctgtcagttacaatattcaattttatcttcgtgtggaaccaatgccaattgagccatttgaattggtgaacgaagtgacaaatgagaagctgacactgacgaaggatggcactggtgaattcaattggctgttggagagatgcccaattattggggagacggcggcggttcagaaacagcagcagaagaaggacgaaaattcggatgccaatttgaacaaagtgttcttccgcctttacgatgacattgggtgagcagaaaggaggccttttttgtatgaaacacggatagggaaacggtatcccatgtacagtactttcccagaatcttggcagggccatgggttctgttaagacagaacttcagtccttagttttgtcttttttgctctggtccatcccgaaaaccctgctggtccgggtttttccaataattacgggctgtactttcgaaaaagttatccgattcaaattgcgcttaatttaggccgctgtctccgccaggtcaaagcaatgaaaaagtgttctctttttccgggtccagtgatcagcggaataagaaaaagtgatcattttgggaaatggccgatcattatcgagttatgatgtattggattgattgatgatgttttgtttgctctttgaattgttcaatttgacgctgacatttttgctattaaaaaaatggaaaatttggcactttttttttactttagataatccgatgttttttctttaggcaactgatttttggtcgtgttttttgtttgtgttcaagtttcaaaaataatttttttagagtaactaaacttgttttgggtctcggttttaaagtctcgggattttatagaggcaagaaaagaacaaataccaagcattcataaaaaaattacaatgagaaaacacgaaattcaactttgttttccgagtgtatttgcgaattattttttccaatagccttaggtaaaaattaaaaaaaaacaattcttagactttaaacttatcaatagggaacggatttttaagcgcgaaaaagtcaaaaataagtgcttaaataagggcgaaaaaagcgcgaaataagtgcgaaaataagcatgaaaaaattccaaatgtagaggtgaaatttgttaaaattgctgttttctctatgtaaattagttaaaattaagtcaaacaattttatttactgattgcagttagaaatgaagtacatttagaaattttcaggatttaagggtcgattctcaggggcgtatttttccgnaaattttttgggtcgattcttaagggtgtattttttgaaaatttttaggtcaattctcagggg

SEQ ID NO: 42578 - DNA, 439 bp, Heterodera glycines
ttttaccgatttccccccccccatcccccaaaaaaggcattaagtgactattttgaattttgcctcttctcattagcaatataggcttttcccctttcccccccccccccaaagcgtcggccggggtttctcttgttaaaacctgcgcacattcacaaacaaaaccatcacatcccccggcgggttgccgcatatgcatagataatagaatagatataggtgtgggcttaggcttgggctgtgagtataatgattgaaaatgaaccaattaattatttattggcgtgcggcggtgcgcggagagtccccccccccccccgggggaacttccggccctcgccccctcctcccccctttttgccctcttttgccccccgtcgcacagaaaattaatgtgcagaaaattgatcgaaattgctatacattttttttacttttt

SEQ ID NO: 42579 - DNA, 911 bp, Heterodera glycines
  unsure (1)..(911): unsure at all n locations
taccatacaaatgttcccagcatgggcagaggggcgcggagagcaatggccattctattctacagggaatttttaaatttattctctatgccagaaaaatggttatctcttttttgcgagaaattttgtaccatacaaatgttcccagcatgggcagaggggcgcggagagcaatggccattctattctacagggaatttttaaatttattctctatgccagaaaaatggttatctcttttttgcgagaaattttgtaccatacaaatgttcccagcatgggcagaggggcgcggagagcaatggccattctattctacagggaatttttaaatttattctctatgccagaaaaatggttatctcttttttgcgagaaattttgtaccatacaaatgttcccagcatgggcagaggggcgcggagagcaatggccattctattctacagggaatttttaaatttattctctatgccagaaaaatggttatctcttttttgcgagaaattttgtaccatgttcccagcatgggcagaggggcgcggagagcaatggccattctattctacagggaatttttaaatttattctctatgccagaaaaatggttatctcttttttgcgagaaattttgtaccatacaaatgttcccagcatgggcagaggggcgcggagagcaatggccattctattctacagggaatttttaaatttattctctatgccagaaaaatggttatctcttttttgcgagaaattttgtaccatacaaatgttcccagcatgggcagaggggcgcggagagcaatggccattctattctacagggaatttttnaatttattctctatgccagaaaaatggttatctcttttttgcgagaaatttgtaccatacaaatgttcccagca

SEQ ID NO: 42580 - DNA, 1011 bp, Heterodera glycines
  unsure (1)..(1011): unsure at all n locations
ttgagataatttttttttccgattcctttatctccaagcatgagccttataagtgattgttcatatccccttctcttgaaaaaaaattgtcactaaaaaaacacgttttctgaatattaacaacaaaaatttttagacactttctaaagaggaaggaaaaaaatttttcatttgcctaatatttatttatactgttgaactgttggaaatgcagctgatgccgtcggaaaagctccgattttttggggaagtttttttctttcagtttcaccactgattgttgaggcaatttttttcgccaatttcttttgtctacaaacattatttattgcgtttcatcctgtagtgtgtaaaaaattttcagtaaaaaaaacttgttatctgaatatttacaagcaaaatttaagaccatttccaaagaggaaggaacaaaaatttttgcctaaattttatattatattgttgaattgtttgaaatgcatctgttgtctgccgttttgaaatttttcaacttttcgcgaaaagatttcccagaaaatgcatgggacaaataaaaattaaacttctattatgatcaatttaaatttcctatcagtttcgggtttgctttaaacacgctggcctatgaaaaaatggagttttatggatgtcaaattttgggacttttcttcgacgtggccatcagcgggttgtttcgtgacaaaaacaaaccagtttgatgctattcgaatgagctagacgcgctctacattttcaaatgtatcaacaaagggtctaccgccactccctggcgagatatggcctgtcaaagcagaacggggccaataaatttgaatttttgttaatcttcggcagttgcctttatttcgagcctactctacttgtgcatcttttcccaatatggcactgcttccgaattattgaactgtttcacgactgattgttgagataattttttttccgnattcactttatctccaagcccatgagcctntataagtgattgttcat

SEQ ID NO: 42581 - DNA, 1665 bp, Heterodera glycines
agccccgccatttcttggaagccgatcagtgcgttgcgaagttccgccggcgtcggaatgggcgaagagaggtagccaaattggagcagatacttctaaagagaggagggattgcaaagtgagcagcagaagggtaaaaagtcggaattggcatgagaagttggaacttttgccatttcggtggctcttcccggcttttggcaaatatcccctgactgaccaatgccattccgtggtgccgttcgtcgtccaattcgccgttcgtcggtacgtccccctccattttgccgctgctcgtctcttccggccactgcttctcctcctcttcccttctctcctccatcgaatgccttcgcggcattcccttgccgagaattgccattgtcgccataatcagccaaatggaattgagaagcatcgtcgtctttctcgggtgattggggcggacgaatgaagaagaggagaattatacgagaattccccgcaggggacattgaccctttcgcctcgtcgtcagcgaattgcgcacatttatatcccaaatcggagatcgaaggaggggggaggggagggggtttttaatatttaggtggaaatcgcttttcgaatgaagaaaaaatgagtaaaatgacaatttattatcaaatgaaaaaagcgaatccttctttgcttgataaagaaattgctgaattattggaaatctctgaacgcactctcagaaattggaaaaacaaaaatcaaaatttgtgatttgtgtcaacgaagcagatcatttcacatctggcttccctagaaacgttttgatgattttctttattttttttattattttgggtttttattttgctaaataaaatatgtttcaagtctattttgttcatttttatgacattttgtgcatatttcaccctttatgaagttatttttccaaaaaataaccattttaaaattttattttacatattttgcaattatcttaaataaaattctcagccctactaattatgtcatttgtatggcgtttttgtttttattaactttaatctaagattttttgccaagatagtaatagggatttttgtacatgggtcccattttaattattggcatttttaccggttagtgtctgtactagaaaaatcggtgcggtaacggtaccattaccacaaaccgctaattaccgaccggcaccggtactggtatgaaactcgtttcataacaaagtaacttttcatttaattaaaatgcttaaatcaatatttaaaatagaaattcaatttgtctgatttgttcgaacattcgggatttttcttctcaaaaattgtgtgcgtcatcctcacattaattaatagttacatttattcaaattttacttaacgttaagaaattataattgttcaaacttttaacccaccaattttcttttcacgttaagttgagacaattggaatattcagctgcgtcttaattaacatttttcatttcatctgtttacattgaattataaattaatgtgtgtcattagtgggcatagaaatgaaatattctgtcagagcgtgtgcctcggtttttgggttttgattatgaaaaaacaatgtaagtttgcaatattgttttaattacggtacagacaattattcgtttgtgaaaaaaattattttgttt

SEQ ID NO: 42582 - DNA, 1097 bp, Heterodera glycines
ataaaaaatgacgcaatttattaatatataaatcatacatgacaattttaaattactaaataattacaacattaaagccttgtgaagaattcaggcttgggaaaataaactaaatgtcggtaattttgaaagaaagtaattttgaaaactaaagtccgttagacaattttccataagtatttattaaaatgaaattgttcaaaaaaataaatttcatctcatcttttaagcaacaatttttaaataaaatttattcaaacatttttacttaatttaatgattgaaattaaaaaaattaattgttataaaaaatcaaatattcaaaatatacataaaattgattttaaatcaatatagtaaaaatgcaaggatatatataagaaaaattcaaataggaaaaactatatacagccaatgttaattataagaaattatttataccaaatttcaaaaatataaaataaataattatttttttaaatcttttaataatgaaaaattttacaaaatgcattaatttaaaaacagtaagtaataccgagaatgaaattaatttaaacaaaaataatataaaattttagtcaaaagttatatttttgatctcatcccaaaaagaaatgaacttaattaataaacataaatttttaaataataattctacgatttatcaacttagcgtattcatatggaaaaatttgaaaaataagttatgaaatgataatttaataaaaaatgtaactaattgatatattttataaacttatatacagaaaatatgcattcactatatttagggcaacaatattttaaaaggttcaagcatatgaatttttgtatgtctttcaaattcaagtgatccaaaaaagaaccataaaaactaatattatagataaatatcaaaaacccgaaaattcttcaaaaataaaataactttttgacatttatataaaattcctgaaacaaaagaagaaaataaaattgaacaacatagaaattatataaaaatactattggaatgaataaaattacattaaaattcctatgaaaaacacattaagggatagaaatgaaaataaaagaaattatttatgatggaa

SEQ ID NO: 42583 - DNA, 143 bp, Heterodera glycines
taataataataaaacatatttcacaggttttattttttaaacaaaatgttaaccaaattaataaatatctaacatttatttttcggttattttcatcaaaacatataattatgaaaaattattttaatttaattagtttcatt

SEQ ID NO: 42584 - DNA, 724 bp, Heterodera glycines
ttttatttttcgcttcaaatttaaaaaaaattcaattttccaatggttgtgaatattttccccttttttctttttggtattgtttttaaacttatgacatttaattttaaggctgcatgttcaataggttgaatcagctacaataggttaggaatttttccagggaatatccctgacgaatacttaaaaaaatgtgtaattactatacaaaaattatgatttttcttttaattttttttgttcttgatataaattttatttaaatctataatttatgacaaagcgaaataaataagtaatatcgtatatattttatgcacgagacttacgcaagatgagatgaatttttgaaaaaaactgcatatttttttaggtttaaaatattataaattttattgcataatgagtttcattataattatagatttcataatttagcaattttataataagaaacgtcctaactattaagtatttttatttactatgaataatatgcaaatgagtaaacaaatatataaaatttacatataaatattacatgatcttagaaaaatatattcatcagtgattataagggattagaatatatttaaattattaaacattaaaatctatctactaaatagtttattatgtagggtcaaccaaaatctctgagtttattggaattaaagtttttgctctcgccagttgaatatgaagcccttcaaggtctacttga

SEQ ID NO: 42585 - DNA, 989 bp, Heterodera glycines
ccgacttcggacaaatttcttaccttttgtatttattgcggctagtatcttcaataatttgtcagtttggtcggatgtgcgtcaaacggaaaaaataattaaaattttataaaaacacataaatagtataacaaaaaatatcaaatttccgaacaaactaaggtcgcacatttcatagtttagggaaacaccagtgagaaaattgttagcgttttcgggattcacattgacatttgcataattgtgatcattttgggggaagtgattgttattgatgtcgttataacggtagaagagtcggagaatccgtgcatcggcttcgcgatacttcttttatcgtttgatcacctaaaaaaccaaaaaataacaaaattgtttttggatataaacccactttttgtggcgattttgctcggaaaagctgctagtacaggtgtgcatgtgttttgcaccacttgagcacgaatagtcacaggtgcttcgcacgtctcagcagcacgtcgcttgaatccagttataagtcgctgacattccacatgcgcagcgttcatgaaataaatgtgagttatgaattctcttttatatgcaaccacgcgaaaacggccctcacgcgaaaacgtcctggcccgtaaatatttatgaaaacattgaaaaattcaaaaatacctattgaataaaaatgggaaaatttgcagtgcaaaaattcatcttgtcttattccccatttcttcctcatgttccatccctccccaatccgtccttccgtctccaaataactccgtccatcgaccattgactaagtgaccgccaaacccaacccgaccgcatttctctctcccgtttcctgactaggcaaacattcactaaaaaatgactttttaaacaaaaaaaaaaaaaattaccaaaaaaaagtgagaaaattttcatcattctgaaagcatcttttttgtcgtgaatttttttaaggatttcagagtttttcgttttac

SEQ ID NO: 42586 - DNA, 591 bp, Heterodera glycines
  unsure (1)..(591): unsure at all n locations
gcggggattgtggctgatcaagtcgggacttttagtccacggtcctaacacacgatntacatatttgcaagtaatgcactaaagaaagaataaatgccttccttttcttattctttaataattgacatttttgatttttgcatattaaaattaataaaaacaaaataagttaaattaatttaatttaatttaaataagaatttatttttttatagaagaaaaccgcaaacgaaatttatatcgtggcaaaagcaaataggtatggtaaaataaaaaagtgacttttgaaataacacaaaatttttaaatgccgaaacgcgacgcgcaactgcctttgaaaaataaataaattaattaaaaaaatcataataaaaaatacaattcattctatcatttttcatttatttttgtaacattagaaaaagtattattatattccacataataatgaaagcttttgaacaaaaatatctttcgcaattccattcttttgtgttgtaaatcaaaagcattcaaaaagcgtttagtatataaagcgctaaaattacaccaaaatcaacaaaaagaataaataaaaataaatgctttttt

SEQ ID NO: 42587 - DNA, 990 bp, Heterodera glycines
ttgcggggtccgtcgggggtgtggcattcttacagtatgctctttttaggctctctccgtggaatgagtgatttggtccgttttctgccaaatgccttttctctgcttaaccacagggaatgcctttagacttgtgagtctgcaaatgtttttggctctgtggtcaattcgacttgcgattcggtcgacgcgtccattcgatcgatgtatacggtaggaagggatggggagggtacggtaaggttgagacgcaaaggaatcccatccaatcataaatggaagatgttagcgaagactgaggagcttgacgagtctttgcggagcattgagaagctgctgcagcagatcaaagacaccaaaagacttctggacaaattcgaagagcacattgtcgtaggaaatcagtgatcagaaatgatttggcattttgttttgaatttttatccatttttatcgaacaaatcaataaatggatgaaagggaaaataaaaggaaaagagagaaagaagcatccgatgaaaggagaaagtgcacaggggggaagagagagtttggtctgtgccacgcaaggctcaaatgacggcaaaacactctcagttcgaaattttccaataaaactactcgtttgataagaaaccatcgctttggaaattgaatttgaatgccaactttgggccgtacagtaacaaatttagcggaattagagaaattcactgggaaatgggacacaattggataatgaaaatggcatttgttatcgagcaaaaatatttgacaaaatttcgtttttttttaattgaattctttcatttttcgttttcttttttgttgctcgacaaatgtcacttttctattgaaaagcgaccgggatttacaaaagaaagagaaaggaaaagatgaaagggaaaagcaaagggacgacgaattggccgattgaatcggccgctctaagtacagtcagtgcaatcaaagcacaaaagcgcagactgt

SEQ ID NO: 42588 - DNA, 1263 bp, Heterodera glycines
ttttcatgactttttttaaaaattttaaaaaggggcactttccatatagcgcggaaaattctataatctctggacccctaaaatcaaattttcggcgaatacaataccgtgtcataatatatttatattatgcattttaacaaactaacatataaataattgacaaaaattaaattttaatttgaatatttcttgaaaaatatcaatacatacaaaagtatccaattaaaactttaataatcgcacgattctgttgtttgggtggttgcgaatgaaatatttacggctaaatgaatgaatgaattaatccttaacaatttatctttcatttgatggatttaacctttcgttaaaaatgagaaggtaaaggccgacgacgggggcgaaaagccaaacgaacatcggcggagattggatattcatcagatattggaaggcaggctaaacagtgattgtgactatgcatcgtcaagagggggggggggggggggggagttggtactcttctaatttacgagacaaacacacacataatttttcagacataaaattctgaaaattcatacggacgactttttaaatcccgagcccgggtttgggttctccggcatcgaaaaatctcgggtgaccgccgttgggaccgataaggcatttcaggtttttcaggaatgctatgtaaatttaagtaagggaaaattcccggctaaaaatatttagtcaagagcttcatattctgtcaaaatttttactctaaaaatgcttcttaaaatgtatatgaaatttggtctgtaaattagaagaattactttaaatcaattattctcgtccctttcccaaatcactgaccgtatagacaaacaaattcaacaacagaatctcgatgatgatggcaaatatgctgactaagttggtgatgccgtgttggaagatggaaatgcgacgggtggtgcacatgaacagatggaacacttgggacatgacctttggagggggggaggaagtggggaaatggcggatagggggagggggacaaagggatgccgacacaccaaagtgacttgccaagcagctgaaagttaaaagcaaattgatcggattaattgccttttcaattgcactgaccagctgcttgtcttcgtactcgcacttggtcagacgcgctcagctcctaaaaccagtggtcatttatttgcagtttcggcaatgccatcaccaatcctcggctggtggttagggtagccgattcccagtgccaatgatact

SEQ ID NO: 42589 - DNA, 1449 bp, Heterodera glycines
  unsure (1)..(1449): unsure at all n locations
agaaaaaagtcaagctgacgcgaaagagctgcacgccaatgttgggatgacagcagtgaattggggcccgcatcagtaccaagtactgagcggacaggcgggccactttatctttcgctcaaacaaatttgnagtgacaaacacccactgcaaaactgatggtggtgagcctttntagtgaacaaatcggacaagtatcgctcatcaacggacagcatcaagtcgtcaaggacgagcaaaagaggcttagggaggcgcttaatcaattcctcggatgggactcccgcgtacacatcaactcctgccttttgaagcacaggcaccgccgcattcatttcaccaaaacaatagagcatggacacaggctttggtgtgattaagtggtctgattcggcaatgaattttagcaaaaattgagtttttcccgacgacgaaggccccgaaatgattagaccaaatggtaatttaaagcaaatgtctttatcgctgaatgcttggctgtttaacatttttacacaaaatgagggtctacatgtttgctgtggatgctttaatactgttgaagaaatcgtcaagcgttttgtcaatgtctccgaggtcctctttttgttggtcatcatcatcttctttgtgttcttccgccacagttgcttcttcttcttttttgatgtccgcgacatcatttttcagcggagtagcggaggtggtgtccagcgattccgccaaaaggaggttgccgagcacattgattgctgttttcgccttcttccagcgtgcgccgtcctgcatggcatcggccattagtccggcctccactaagtcaagagctacctttgctttgcgcttcagctcatgttgatgatagtcattggtgcggggccgtttagtggtgtgcgtgtcagaagagggtatgtcgccgtagggtatgttgaacactcgagacttatttttcaaacggaaaaagcaatgaaccggcaaatcgtacaccacatcgaacggaatgaattgggccttctatatgcgcgtgcaccaaagcgtgatgccttctttcgtgatcacagtgtcaatttcggactcagtgcccttacagcatctacaacggccggcttcatcaaatgggatgaagcgaggtgtcgagaggcggggaccgctgatggttatgccacttgaggtcacggtgaggtcagtttggccgaggatttggttgcacaacaattttttgtcggagatgttgattgccatgggaatgagtgaaaatgggataccaaatgaaaaatgtgccacccgatgcgcccgaaatatacgcaaaaagttgggccacaaaagttgtgtggtgccacgccacgcccacttttataatgttaacagaaaagcgggcgggatgggcgctcataaatgagccccccgtcaaaccgatcagcggatgaccaaccaaaattatntttccaa

SEQ ID NO: 42590 - DNA, 1529 bp, Heterodera glycines
  unsure (1)..(1529): unsure at all n locations
ttaggtcattttttttggcattttgtgcctttttaccctttacggagaattttttccaaaaaaaataacttatntaaaattttttttaacatattttggtatttttcttacaaatttcaggattttttgcatattatgtacacattttgaccactttttgtacatatttttgccagccctaataattacatatatttttttcataatttttccctaaatcgtcaaatcattattacacattcccattaattaaaattgtaaattttttggagttaggtattttgaaaatttcctgtacctatccggggtagttccgcagtaccaaaaataattgccgaaattacggccccaccaaattagttaaataaaaatttaatttcaagaaaaaaaaaccgttgtaccaaattttataggcatactccacggtccataattaacttaacctgaaaatattcaacgcttattggttttaaaaaaattttcgttactttgagttttccatgattttatttttattttttgcaaaattaattatattttaagctaataaagattcttttctcgagactaaaattagacttctaaatactgtaaattttattgattggataatgattatttaaataaaacttttaaaatattccaaaaaaacaaaaagaaaaaaagaaactgaccaaaacagctgaaatgagtgcaataatgataattgccacaattaattgatgcactgcttctgtgatttgttgatcgccaagaattgaatccaatcgcaaatcccataaactgtccacaattcgcttgccttggcccgtctgattgcttggctgatattctgccttagcaaaattttgggtttaaaatttaaatagaaaacagttaaaaattgattattaataaaatataagaaaaattgaatttttgtaagccaaggacgtccttttaaaaaatactctgttatggcatttaaaaagatcattgaagcaagaacgcataaaaatcgaatttttcattaattttttggtttttggctaaaaaaataaatcattttcaactaaactcaaaaaaatttcgtaattaaaagttaacattagcagttctctgcttttatgaaatttctttatgaatttaaaataatattgatttactattatgttgctaaattaaaatgaattacaaattaataaaatgtctttataaatgaattaattttgtcaaaaaaatattctataaatttataaattttttatttaaataacaaatcacaaacattgggttttctgctgctgattgaacttgatggtggtgggactgttttcatttgtcgataatcgtttgaaacggaggccattgttgaggttgattgattataattgaaagttttatttttaatcatcgagaattaaaaataaatttaaataaataaattatttgtgttttaaaaaaaattaaaaaaggaaacaatttaaaaataagaacggactgatgacttttttgtgatcattcacacaatccagtgcttactgactgac

SEQ ID NO: 42591 - DNA, 1142 bp, Heterodera glycines
  unsure (1)..(1142): unsure at all n locations
gagaattgcaccaagttcgtctccaacaaaattttatttgtttcgggaaaatttcaatttttgcagaagcaaatgaccgacttggacttttcgnatgacaaaggcgcatcagcagaagcaggaaaagtggccgaactgacgggaggaactcacggcaaatgtttgggcnacagcaaacnggtttgataaagtgagcacaaaaaaaataattgcctaattgactgacaatgaacccattcaaattttgcttttattttctggtttgtattaaaaaacaccattggaacggatttttgtaaaaaaaattgtaccaattataaggctaatcgaagaggacgacacggacaaattggcatcatcatcctcatccttcagcaaattgcggcacaatgttgtcgccagtctgctgttggtgctgaactcgttgatgcatgattttcggacaaggtatatttgtttctaaagagtttcggacattaatgaaatcctgaattttcttttccattcttattcattgtcagccaatccgccttccttcgccaattggactcgcggacagcaaatttggacacttttgtgctcaaatcatccacaaatgttgtgccaactgctgcttctgtttgtgccggtgacagtgggaccacggacggtgccatgacaagttgcacgagagacgctgacaagcaacagcaggaagaattgacaatcgaccaaattcagtacatcatgcaaaatgagcacgtgtccaaggagcgcgaacaggaggtgcgaagaacaacaagatccccatcccctgttgtttcccccgatttttttatttctaacttttgttagaattttttcaaaaaaacctatgagcttttggtcactaataaagggtttttggaaatatattaaaaaccaaaagggggggggcccttctggtttgcaaaattttgtgttttatttgagtttgggttgtggattatttgtcttgacatacaatttttaagtctgacaaagagcggacccactctttcgaagcaatttgaaaagcgcattggttattcaggtgctcaaaatcagcaaatcaattctggaattgcatagcatgttcaagaacgattgcgtcgatgattattgaccagggcacaatttggaca

SEQ ID NO: 42592 - DNA, 954 bp, Heterodera glycines
  unsure (1)..(954): unsure at all n locations
aaaancaatgaactatatgaaggcctanagcttctcccntgctcacccaaggggacaaatttttagcatttaccattaaaataaaaataatcggaaatgaaacttttttctttatttatatgaaaaagccattggccacattctgtaaggaccaattggggttgatgccactgaaactatgtcggcacttttaaaggcttattgaaacattcaacaatttctataggaaagagtttttctattctattagaaaaatgccctcctaaagtcgaaaaaagttgaatatttggcttttggaccaattatatgtaaaatggacgaatatttttaaaaacattttgatcaaaattgaggccaaattttctgtttttgttaacccataacactgctagattcaaagtctcaatcgcaaaaacaatgaacaatgaaggcctaagcttctccctgttaaaaaatggggacaaatttttagcatttaccattaaaataataatcggaaatgaaacttttttctttatttatatgaaaaagccattggccacattctgtaaggaccaattggggttgatgccactgaaactatgtcggcaattttaaaggcttattgaagcattcaacaatttctataggaaagagtttttctattctattagaaaaatgccctcctaaagtcgaaaaaagttgaatatttggcttttggaccgaccaattatatgtaaaatggacgaatatttttaaaaacatttagatcaaaattgaggccaaattttctgtttttgttaacccataacactgctagattcaaagtctcaatcgcaaaaacaatgaacaatgaaggcctaagcttctcccctgtaaaaatgnggacaatttttagcatttacattaaaataaaaataaatcgaaatgaaacttttttctttattatatngaaaagccattggccacattctg

SEQ ID NO: 42593 - DNA, 1607 bp, Heterodera glycines
  unsure (1)..(1607): unsure at all n locations
ttgcctcctcaaggtcgagccgtgcacgcagcgcatttccttctgattcgagtgccttccgctgccgctcccattggtcagcgtcgcatccggcgcgctcgcgcagcgcgtccatctccgcgcgacagtcacgctgctgtcttttctgaaccgaaaatgtgtcacatgacgtgaagcattcacaaataattggacctgagtttggagttgcgcttccgcttcaaacttttcgcgctgtaacgtgtccaactgagcggtgaaacgttgctccaattgttggctctaaaataaaaattaattttaatgactccattttataattttttccttttttagactataaatttcaagaaaaacaatttaaaaattgtggaaaaaaattccgaaattaaaaactggcactttttgctgaaatttcctttaattttcaattggcacttttagctaaaatttcgtttaattttcaattggcacttttaactcaaatttagtttaattttatggaaaaattatagcgctaacaagctaagggttgggctgacgccaagaaattataaaaaatcaaaaattcactgaatttccaaaaataaaactcagaaaattaaaaaaaacaaaatggcaccaatgccattatgccaactttcttctctctctcccccttatctttctctctcttcttttcctcccgctctctctctcccttctctttctctttctctctctctctctaccttccgttctgtgctctccaatttgtccaccgttaattggtgcgtttgcattggcactgtcgtgcgtctctggtccgccaactctctctccaatttgtcgatgtctgcgcgcagcactgtctcgtgctcctccgcttctctgacctccttccgtgccagttccaaattggcgcgcaaatgttggcattctgtgattttttcttccgccaatttttcgtgtgcgttcaattccgcgcgcagttcgaacatctcagcaggattagaagcactggaaaaaggggaaattgtaaaagcatttaaattcagtaagtatttgaaacttatttaaaaaaaactaatttaaaaattaaaaagaattttttaaattaagtatttagatcctaaaataaaactaaaatatttatttaaaacatcattttttggtttttaattcaatttttaactaattttgacaaaaaaaatgagaatttttcataataaaccacgaaacatatataaaacaacattaaaattctcaaatatttatttatttcgaatttacaacaacaaaaaaaaaatcctattaaacataaatcacttcgctaaaataaattgaatttacaaaaagatgatttgttaatttaaaaataattatttatggattttggaaaatatttttgttttttattgaatttccaaatgtaataaaattgtttattaatatgaatgtgaaagcacaaatgagaagaagagaacccgcccaacccattcattcacataacataaaatttttcccccacatttagcatcattaacaccaaaaaatggnggaatntatttgtncattatattcattcatgtccattntggaggagagagagncaaactgctcaatta

SEQ ID NO: 42594 - DNA, 1272 bp, Heterodera glycines
tgatgagaaaatggccatttataataattgggaaaatccttattagaatttgcacagggagtgagttggctgttggagcgggtaaaacgccggttgggtgccttagccgtggggcctttgtgccgtcagcatggcattgtgtgtcttgcggtactctttcacgtaataatccaaagtgtcggctaaaccctgcgcgaatggcaccgtacactcccagcccaattcctcgcgtattttggtgaagttctgaacagcggggtggcaaatgccgttccttcgattgggcttacgatgtaatatcgccggtcgtggtaggggcggtcggcgatcggttcgaaggatatttgggaggggtcccttaaaatgggggggggggggtgagttggcggtgatcagttgggcggtgcttgcctgtccatcagtttttgcactttttcctgcagcatttccgtcttaagggggttcgttcgtcgttctgtctgcctttgctgtctcttaccaagtgcaaattgcacttctcgaactccgtcccgatgttgtacgtctgtccgattcttcccctctccgttatgcgtcttatcgcttccgcacagtcgtccacgtacatccaactgcgcgagtgcatcccgtcgcccatcagcgggtacggcttgccctccagcgccagtcgggtgaacttcgggatcagcttggagtacgcttgccgtggcccgtacacattgttctaaagggccaatcgcagtgcatttggacgatgccgagacaatccatgctcaccattcggaccatcacatagggcaatttgtaggagtgcttaagggtgtgaaattgacctttgtctccgcctttccaagtgcgtccgtgccctccctccctcacatggtaactccggacgatcacctcacacgcggctttgcttgctgcgtaaggatttgttgggttcagcggcgaatcctcgcacttcggcgttgtgtcgtccatcgaatcgccgtacacttcgtcttaagggaatgcctctgcttaaactttgcggcacaatgccacacaccggtactgatatggaccaaacgacgcactcgcccatagaaattaatcgcctcgagcagtctaaaaaagtgggagaaggaatgtttttaaaggcaagtcaccctttggctacttgtgtgggtcttacgttgttgtggcaatcacattctcctgaattgtgccaatgcgatcggtgtacgattcgtccacgtgtgtaatggcagcgaaatggatgaccgtgtctat

SEQ ID NO: 42595 - DNA, 1063 bp, Heterodera glycines
  unsure (1)..(1063): unsure at all n locations
aaattttttttacagcttaactaaggccctattaagctttatttccagaaaatctcgncatgaattctcatttttaaatttttttatagatttntaaatgtttgattttttttggcttaccaaactttcatcgaacctggttctttctattctctttcaaatcgccccaaattttttttacagcttaactaggccctattaagcttatttccagaaaatctcgcatgaattctcatttttaaattttttatagatttttaaatgtttggatttttttttggcttaccaaaacttcatcgaacctggctctttttaaacatgccaaaaagtttaggcttaactttttttaattaaactgatcagaagcgcaccagattttgcaagggcatcaaaaagacaaggaaaagcaccgctatgatgctaacgccagtaactcttaatttaaaaatttttattaatttttaaaacttcactattttatttttttaatagatttttaaatgtttggattttttttggcttaccaaaacttcatcgaacctggttctttctattctctttcaaatcgccccaaattttttttacagcttaactaggccctattaagcttatttccagaaaatctcgcatgaattctcatttttaaattttttatagatttttaaatgtttggattttttttggcttaccaaaacttcatcgaacctggttctttctattctctttcaaatcgccccaaattttttttacagcttaactaggccctattaagcttatttccagaaaatctcgcatgaattctcatttttaaattttttatagatttttaaatgtttgcattttttttggcttaccaaaacttcatcgaacctggttctttctattctctttcaaatcgccccaaattttttttacagcttaactaggccctattaagcttatttccagaaaatctcgcatgaattctcatttttaaattttttatagatttttaaatgtttggattttttttggcttaccaaaacttcatcgaacctggttctttctattctctttcaaatcg

SEQ ID NO: 42596 - DNA, 979 bp, Heterodera glycines
cgatttgaaagagaatagaaagaaccaggttcgatgaagctttgttaagccaaaaaaaatccaaatatttaaaaatctataaaaaatttaaaaatgagaattcatgcgagattttctggaaataagcttaattgggcctagttaagctgtaaaaaaaatttggggcgatttgaaagagaatagaaagaaccaggttcgatgaagttttggtaagccaaaaaaaatccaaacatttaaaaatctataaaaaatttaaaaatgagaattcatgcgagattttctggaaataagcttaatagggcctagttaagctgtaagacacccaccacttttgcacttaaaaaaatttcaaaaaatttgatcgtccataaataatttgtaattgatcagcggctcaccaaattttgcagagatacgtatcggaacactacaaaagcttactaattttcctagatttattaaacccggtgaaaattttttgcagacacccaccacttttgcacttaaaaaatttcaaaaaatttgatcgtccataaataatttgtaattgatcaggggctcaccaaattttgcagagatacgtatcggaacactacaaaagcttactaattttcctagatttattaaacccggtgaaaattttttgcagacacccaccactttttcacttaaaaaaatttcaaaaaatttgatcgtccataaataatttgtaattgatcagcggctcaccaaattttgcagagatacgtatcggagcactacaaaagcttactaattttcctagatttattaaacccggtgaaaattttttgcagacacccaccacttttgcacttaaaaaaatttcaaaaaatttgatcgtccataaataatttgtaattgatcaggggctcaccaaattttgcagagatacgtatcggaacactacaaaagcttactaattttcctagatttattaaaccccgtgaaaattttttgc

SEQ ID NO: 42597 - DNA, 837 bp, Heterodera glycines
gagcaaaaatccagcgcagaattaaagtacaggctatagtgaagctattccggaaggattcggtctcctcataaatctgggcgcatcggttcggggggactgccctgaaaacaaaaaaatcgattttttcaagtgtccgtttggggtactcaaacaattatggggagcaaaaatccaaggtaacaatatagtagaggtatatcgaagctattcccgaaggattcggactctttataaatctgggcgcatcggttcagtgggactgccccgacaacccacaaaaaaattttttggataaaaattatttaaatgaaccgactagataatatttaaaataggttatttatcttcctttcagtatccctgcaaagtatggtgcgcttctgatcagtttctgcaaaaaaagttaagcctaaattttctggcctgttaaaagaggaattaaaaatttttaaataattttattcatctcccttgtcgatagaaaaagcatcagagcgcctaaactggcatgtaaataaactttggtgagtttcagaaccctttcagaaaaaacatttaagaatccatttcgcaaaaattaactaacaacgaaagtctcactttgtgtagaagttttttgcaacagcgagctccacgctcacaaccgggggaaggatcgcccccccccccccttcggccgcaaagtgccccaaaattggggaccccttcgcatcgaggggggccgtgtaaaagaggggggggggaggtcgccgacgaacgagaaaagttctgagaaattggctattttcttaacaaaattcatttaaaattcttaaaattttttcccggcggcgc

SEQ ID NO: 42598 - DNA, 1261 bp, Heterodera glycines
  unsure (1)..(1261): unsure at all n locations
taattgaaatgaaaacaaagcacaaattgctgtgggtgcataaanttatgattcagacaatttcattcncacngagatgagctttaagtgattantcaataatttttataaacggtatacattctgtaattaattccatttttaaatgaattgatgaatttttttgaaaattgaccacaacatcagtgaacaatttatagcaaaaatttgtccctgaacgtctgaaagccacatttcatttaaaacataaatatgcgcatttttaaataatggacacaaaataattgagttgaaaactgatcacaaattgccattgggttcataaatacgattcatacaaacgcatttccaaaacacgattgagctccagagatttattattatttttataaaaaacagatattcagtaattaattccatgttgaaatgaatgggtgaattattttaatattcaccgcaacatcagtgaactgtttatagaaaaaatttgtccttaaaagtctgaaaaccataattcatttaagccaaaactatggacatcttttaattaagagcacacaataattgaaatgaaaacaaagcacaaattgctgtgggttgcataaattatgattcagacaaattcattcccaacgagattgagcttaagtgatttatcaataatttttataaacggtatacattctgtaattaattccattttaaatgaattgatgaatttttttgaaaattgaccacaacatcagtgaacaatttatagcaaaaatttgtccctgaacgtctgaaagccacatttcatttaaaacataaatatgcgcatttttaaattatggacacaaaataattgagttgaaaactgatcacaaattgccattgggttcataaatacgattcatacaaacgcatttccaaaacacgattgagctccagagatttattattatttttataaaaaacagatattcagtaattaattccatgttgaaatgaatgggtgaactattttaatattcaccgcaacatcagtgaactgtttatagaaaaaatttgtccttgaaagtctgaaagccattattcatttaagccaaaactatggacatcttttaattaagagcacacaataattgaaatgaaaacaaagcacaaattgctttggattgcataaattatgattcagacaaattcattcccaacgagattgagcttaagtgatttatcaataatttttataaacggtatacattctgtaattaattccatt

SEQ ID NO: 42599 - DNA, 1738 bp, Heterodera glycines
  unsure (1)..(1738): unsure at all n locations
tgcttatgcacatgccattattggctcttttatttcctttatgtttcattaatgctttttattcctttaattaagtccttaaaattatttgattctgaaattaaagattaattgataaattagtattttgtaattttttttgtctgtgcttttgatttgtttttcattgtaaacgcggaataaatgaaattatgtttctgttgccaataatcatcaaaaataatagtttctatttatttaattctttaaagtaccacttttcaagactttgagtatctttaataaaaaatttattctaatgggtttttcatccacgtgagagtttttaaagtttagctaattttcataataggacctgttaacgatttcgacttggcatatgatattatttcagtcttatgacttgctttataaatatttaattatcaattacaaaatatggaataagactttctttataatatatttttgcttattaaatttcatattacattcatcatttcagtttcgaaaaaataaaatttatatttcttaaataataatcatttaaataaaaatctttcttaatttcatttttttatgtttataaaattatagtttcaagtaacataataactgataaatgcataaatattattttaatttatttttctactggcgatttcttttttgttttataattttttgagattttaaaatccagggacattttttttactacagccaactttttttttgttaaatttttccgtcagagcctataggcatggatgggtccctcctttcttgttccaatttatttttgaaaaagtacgcctaaaatttagttttactgttgtattataagtattatggatgctccaattttttatattaatatttatttttcatcctcatttaatgcttgttgacttattcattttgggaggaataactatttataaattatcgttcggattagtcattttaaatttaaatttattttttatttttactatttttattttgtcaaataaaaaattcgtctattggatgactgcgtaattattaaaaggaattaaactttcgataagatttaaatctgttctttcaacgatataccttttttgttgtaaaatgtttaatccaaagtagaccattttattcattttataaaaagttattatgttttaatatttttattaatttcaattcatatccaaaaaggcagagaaattttttaataattttctaaaataataaaaaaaattattttttcattttaataaataaggaaattgccaattttaacattagtcacatttattttaacaaaaaaatattaaagactatcatttttaataaaatttttaataaagtttaattttgtttattttttatttgattttaaatgaacaaataaaaatacgttcaccatggaccatcattttattttatcttatttttgatttttcagttttttctactgaggaactgcttaaaacgatataaatatctcctagtagtattgttctaagtttgcaaaattattgaacttctacacattctaattattttcattgngtccaaaaattacagataattaggtgacgtataaattagaaaaatgccaaaatactgctttgcatacaanaaaggcacatatgcaaaagtgttttaagcgtatgtttttttcgtcataatttttttttcagatggttaaattttttaattttttgcaggaaataaaatgcataag

SEQ ID NO: 42600 - DNA, 1344 bp, Heterodera glycines
tctctctctctcccgctctctctctctctccctctctttctccctgtctctatttctctctctctctcccgctctctctctctccctctctttctccctgtctctatttctctctctctctccctcttcccctattctctttctcccttttttcctccttttcctttcatttcctttttctcaaaatagacgacgccctttaaacctttttgcgcctctctttcccatatttctctatttttttttgcctttttctcttttttatctctgttttcctccctttcctcttttgcctcctttctttttttccccatttaaatgcttttttgctcttacatttttctttttttctctttcctttttgcccttttctctcctcattttccccatatgtccgtccgtccgatcgttccaacgaatggaaatgatgaccaaatgcgcaaaaaagcaaaaaccaaaatgaatgaatgaatggccgatgaccaaaatgaacattttgtgtgaatgcatccaatggttttttacacttgaacaaacgaaaatcattttgaaaataatatatataataattttaaaaaataataattatttatttttgtgagttgttggttgggtggggctggttccccccccccccccccccatctacagatatcaatcgtccgattattgccaatgtcttttttttaaatatatttttatatattaatgcaaaatttagtggtgaaaccccaaagattatcgaaaggtttgcaaaaaaatgaatgaaatggaaggaaataaaatgggaaaaatgcataaaaatgattctatagttgttaaaaacaatcaaacaaaaaaaagtagtaaaatatgaattattttacattgaatcagaggacaccttcggaagtcattgaatttgaatgaatttgaaaggaaattaaaaaacgaaggcaaagaagagagaatgttttcgtgtcgaaagaaaattcaaaaggaaggcgattggactgacgtgtcccctccccccccgggcccatttgctcgtccgcccctttctttttgctgcgtgcgcaatcgcaattacgacggatttcgaagaccctcggcggaaggcaacaaacgcagctttaaatgggccaatttaacatcaaaatttgctataaaattgaggaaaacgcgtgggaatggaaaacccaaagtacgaatgggttacggtagaagagacagacaaattaagacgacagagaagggaaaggcaggggaatacggtagatcgaatgctaatttgtaaaagaggagaatgataaaagaagaggaaagctatggtgatctattttagtaggataggaagggtagaag

SEQ ID NO: 42601 - DNA, 835 bp, Heterodera glycines
aaatttcaaaaaacttaaaaattcatagaaaattaaattcataggtactactgctaaatcaacgcagagacgcttttccttgacctttttaggcccctgctggtgcgcttctgatcactactcgaaaaatgagtgattgaattttcactaaaaagttaagcctaaactttttggcctgtttaaaaaggaattaaaaatttttaaaaatttattcatctccctttttgatagaaaaagcatcagagtgcctaaactagcatgtaaataaaatttggtgcgtttcagagcattttctgaaaaaaatatttatgaattaattatgcaaaaataaataaaaatttctaaaaatttgatcgtccataaataatttgtaattgatcaggggctcaccaaattttgcagggatacgtatcggaacactacaaatgcttactaattttcctagattttttaaacccggtgaaaattttttgcagacaccaccacttttgcacttaaaaaaatttcaaaaaactttaaaaattcatagaaaatttaaattcataggtactactgctaaatcaacgcagagacgcctttccttgacctttttaggcccctgcaaaatctggtgcgcttctgatcactactcgaaaaatgagtgattgaattttcattaaaagttaagcctaaactttttggcctgtttaaaaaggaattaaaaatttttaaaaatttattcatctccctttttgatagaaaaagcatcagagtgcctaaactagcatgtaaataaaatttggtgcgtttcagagcattttctgaaaaaaatatttatgaattaattatgcaaaaa

SEQ ID NO: 42602 - DNA, 1047 bp, Heterodera glycines
cgcgcatgcactagcacgaaagtcctttgcgcgaagcgctcatgtcagcgcccgcccatatataccaaaagtatactgtctacaccgtgcaattactgtgcaaagcatactgcccacaacatcccccactgtgcaacacgctagtttatatataactaaagaaacaaggcaactcatttccaaaaacaaaatctccttacggtttgcaggaaggggttcgaaatttcgaccttgggggtaacttttgacggcgcattcaggaaaactatagattttccgatccgagggccagctgagcgccaggcgccgaaaagtcacttttttcgaagcagtttttgcagtttttgggattcaaaaattttttaaaggcctaaattaaaaatcggcctcgataggattttaagttggacttttttggattttttttgtttcttgaccgaaccccaaggtcttgtcagtttttccgaaaaactggctaaaaattgcatacttttttgggccatttcagcgccggctgaataactcgccggggtttgaccggaggaggtcggtgtaagcggcttttttgtacagcttgacgagctctatccaaccatgcttttagatttcagaaattttcagaaattttcgagctaggccccctcgaaaattttccgtttttgaattttatgattttttacagatttttccggggaaaacggagaccactttcaagcaaccgtttttcatgctctatcgattggtgtcattttcagaaaaatttttaaaattttttttggaaatagaaaatttttggttgctaggcctcaatttcagttctggcgcaataactcgtcaggagttgattttatcaaaaaatcgtctaagagcttttaggtagagaattttaagcccaatctaatgtgctttatcccagaattttatcttgaatttaaaaaaagttataaaattaattgtgattttgaaactcaaaaccaaagggggaccccaagggttttgatttcatgaaaaatttttttgccccaaaattaaccaaaagggattttt

SEQ ID NO: 42603 - DNA, 1113 bp, Heterodera glycines
  unsure (1)..(1113): unsure at all n locations
actcagggttaagctaatttcattaatttcttccctcaattgggtgtgttntcctgtttactaatgatggtgatgattaataattaccgtatccaatcactaattatgccttaattgactgcgggatactgtatctttctggaggatgcggattcagattaagaattgattgaagtatttgtatggtcattaattaagttccattaaaataaagacaataattaattgattattataacacggacattaacgaacacaaaacacggcacaaaaatgaacaaattattaattaattaattaactaattatttatttaagatttttcttccgcccaccaatgctgaatggctcctcatagtcgtcgtcgtcctcgccgtacgaaacaccgccgccgtatttggtcgggtacaagccgtccaggcacgactcggggtcggactggaaggacaccacggacggactggtgccggaccgtaacggcacctgtgccagaattgggaatgcgaatttaaaattttcaatacatgccaaaaaaaacaattttactaaaaaaaaatgaaaggactaattaatatgatgccaataaattttaattgctttatgtacatgcatgaaataatttatggacttttttaattttcaacaaatatgggaaaattttaacattgctcttactaaataaatgtaaatcaggatgccacggagtatccttatttttaaagatttgtccttattttagagtgttggaccaaataattgaaaatttttacaattgaaacaaatttgtatcgaattcgacatgtaaaaatagccaaaaaatcattaattgctgaaattatataattatttacattcatggaattaataaaaagtattaattgtttttttttaaaaaaaaaaaggatttttgccttcagtaaatcctcgtcaatttgatgcggataaacaggacttattggtcgatcaaacagtaacgaagtgttgggcgatgttggtggcattatttccaattttggtcgacctaaattgtgaaagatttttaggaaaaataaaaattattataaaataaaattacttttagtagataacaatttaaaagagaaaaaatataaa

SEQ ID NO: 42604 - DNA, 762 bp, Heterodera glycines
cttactatcctatggaaaaaattattttgagttttggccgtgtggcgctttactcgtaaaagtaaaggcctcctgggcctttctgagaaaaagcatcgaggctggtgaatcctttaattattttaaaaggtgttgttaaatcattgatttttcttctttcttccaatttgtgtaaatcagtgattttaagtctttccatatattttttgtacacaaatccacatttcgaaaagcttttcttgtgaaaaatttttgtacccgctcaattttgtctatatctttttttaaattagggttccaaacttcggtagcgtattctaattgaggtcgtacaaaagttttataggctgctgttagagtttttatttccctgcttttcaacactctcaaaatctgaaagcttctaagatatgcgtttcgtataattttgcttatgtgttctgaaaaattcagtttcgagtcaattataattcccaagtcacgaacattatccgactcagaaatcttttttgagttaataaaatattcttttttcatattatttttccctaaatataaaacaaaacatttttcagttgaaatttctaacccatttatttttgaccatttttccaaagcctcaattgctttatccaactgattcgaatggtcatcattttcgtgggcataatataatttaacatcatcggcatacatttttatgccaactgatgccgcttcatttgtaataacggacggcagatcatttataaaaattaaaaa

SEQ ID NO: 42605 - DNA, 960 bp, Heterodera glycines
atatgtgatggaaacgcaacaaagtaaaattataatctttttttttcagttattagcgcctgttttctagatttttattttgaagcctaaaaactttaaaaaaaattttgaaaactagtttttgtctattttggcgtttttaaagtttatttaaaaatgcaataaaaataattcacccttgaaaatcgaccccaaaaaattcttctgcaaaattaagtgaaaaatcctcaaaaattattttttagatttaattcttaaatatgagtagtcagcaacaacagttggatgtgcttattgtcatagatggtaccaacattgataagccttgtgtattttttgatcttttcaaatttcaacatttaacttatttaatttaaaggttgatattttttcgagttctggctttgttgcttcttgtctcaattgggtttcaaagcttcattctcctaatgtaattgttgcgttacccaatcaaccgaatgatgtagcagccgaacttttaaagtcggtttatataaatgaaataaaaaatgtttcaataacttacagaaaatgggcttctaaattcaagcagcttcaggtactacttttattttaaatttattaaatgttctaaatgaacttaattttgcaggcatttggtgtttcaaattgccaatctttaaacgatgttcttcgtgaagttgattttcgacaaattcttagaaatgatttcatgctcatacaaaatttagccactttttgtttttcctatctgacgcgacaaatcgaaaaatttcggttatttctgaattaaatattcaaattttcatggtctaaatttaagaaacgataggcggcaaaacaacaaaaatgtgctcacattgctttattactcaaaacgaaattatggaaggaaattcgaggaagatcggtctctgattggatacattgaacaaactcaaaaattaacacattatg

SEQ ID NO: 42606 - DNA, 87 bp, Heterodera glycines
acgcgggtattgtgggtcggccacggcaacagccgcgaggcggtccgcccgttctttgaattgctcggcaagcactgccattagata

SEQ ID NO: 42607 - DNA, 1579 bp, Heterodera glycines
agtgctggttcgtttcatcacggcaccgaaccttttgccttctgaggaatcgttgcttaacttgccagatcggacgggtgcttatgactttctgaaaaaaatatttatgaaacaaaaaaatcgattttttcaagtgtccgtttggggtactcaaacatttatggggagcaaaaatccaacgcagaattaaagtacaggctatagggaagctattcccgaaggattcggtctccccataaatctgggcgcatcggttcggggggactgccccgaaaacaaaaaaatcgattttttcaagtgtccgtttggggtactcaaacaattatggggagcaaaaatccaacgcagaattaaagtacaggctatagggaagctattccggaaggattcggtctccccataaatctgggcgcatcggttcggggggactgccccgaaaacaaaaaaatcgattttttcaagtgtccgtttggggtactcaaacaattatggggagcaaaaatccaacgcagaattaaagtacaggctatagggaagctattcccgaaggattcggtctccccataaatctgggcgcatcggttcggggggactgccccgaaaacaaaaaaatcgattttttcaagtgtccgtttggggtactcaaacaattatggggagcaaaaatccaacgcagaattaaagtacaggctatagggaagctattcccgaaggattcggtctccccataaatctgggcgcatcggttcggggggactgccccgaaaacaaaataaatcgattttttcaagtgtccgtttggggtactcaaacaattatggggagcaaaaatccaacgcagaatttaagtacaggctatagtgaagctattccggaaggattcggtctccccataatctgggcgcatcggttcagggggactgcccccgaaaaccccaaaaaaaaattttttggataaaaataatttaaatgaactgactagataatatttaaaataggttatttctcttcctttcagtatccctgcaaagtttggtgcgcttctgatcagtttctgaaaaaaaagttaagcctaaactttttggcctgtttaaaaaggaattaaaaatttttaaaaattttattcatctccctttttgatagaaaaagcatcagagtgcctaaactaacatgtaaataaaatttggtgcgtttcagagcattttctggaaaaaatatttatgaattaattatgcaaaaaataaacaaataatgaactctcttccttaataattttcatgcaccgaggtactcactcggccgcttcgcggcctcgtggtgggccttcgcccccccctccgcccttcaaaattttgaaaaaaaaataaaataataggagactcagaattttgaaaattttttataaaaactgatgacaagctaatgtgataaaacaggttaattcttttcctttcagtatccctgcaaagtttggggcgcttctgataagtttctgaaaaaaaagataagcctaaactttttggcctgtttaaaaagaaagtaaaaatttttaaaaatttattcatctccctttttgata

SEQ ID NO: 42608 - DNA, 1432 bp, Heterodera glycines
  unsure (1)..(1432): unsure at all n locations
attaagcaagccattgctaattattgtttgccagtttttctacncctctttgttttgtgccgcctcctccgccctccaattcgcaaaaccgttgctccatcggcacttccgtctcgccaatccgtcactgatcgccctgcatttggttggtttggtcggcaacagaacggcattattttgccgttcctttaacatttcctccaatttcagttttggttgctcaaccacgcgtgcaacccgagtaatttttaacaatcgcttcaattagcctttaattagccccgcctctcccttgtgtaagaagcagcaagaactttcgcatagcattcgtgttttgccaattctggattcagaatttggccctgaatgctttttcctttcctcgccccgttctacagtatacttcatacagttcgtccccttttccacagtaatctacgcctatttcaatgaacgcatgcgttcctcgtacattgaaatgttttcatgcgcctttctccgttcctcactccgacgacgcaaacgccgctactttgacaatccgttgggcatgtcatgggccacgcgactgtgcgccttcgccggactgccaatggcacggtattaccgtaccgaaaaggggcggcaataccgtagcaagagtctgcagacaattaaggatttaatggacccattttgcagcccgccccttaattcgcgtgccattccttcccactccacagaattggtcgttcggctaagcgtcggccgcactcccgcgccggcggttcctccgcagaaaaatccaacggaaattttgtgcgctcatcactgcagttgcagtcacgcgacttcgaacagtacacaaaaaaaagagaatagggggggaaggacaatggaaaaaaagtatgagggaagaatcaattctcgagccttagaaatgagctcgagattctcgaatttgccgacaaaaggcaaagggacggaaggacatctcttgaaaagggccaagaagaaaaattggcaattaagttagcatttaactcaatgctttcactcaatgctttcatgctttcccacacacagactctgtgagttcatgatgcgcgtcagtccgctgaatgattcgtcggagggatggcgcgagtccgtctcgcgctccgcctccgcgtcttcgtcctccggcgaagaggagggcttttggcccggaaggaaggttcgatcggaggtcagtgatcagtgcagggagacaatcgaaacatttcgccaatattttttttgaaacgcccgctaaattcagggcggtcttttgagtgcggtggaggccgtccgccgtttgtccaacaattccatttccatcgcgcaacagtcaatccgagagccgtcccgttccatcgttttgctgaacatggaccgaacattcgagaaacggtacagcaacaaaggcagcatt

SEQ ID NO: 42609 - DNA, 1507 bp, Heterodera glycines
cggggatgacgtggcggtggtaaaaggtgtccggggcttccttgcccgaatttgtgacccttctcgaaaataaagagaccttctcaaaaccgaaacgatcggaaagtgatgtcgtcgaagtgaacgtccaatcggtgaaagttgcgccgggttcgtctcacaattcgtcaatctttggtccttactttgtcaaatggcagggaaatggcgtgtggttgtcaaacatgtccccgacaataaattggtattggtgcgcatcgccacgggtctccaaattcgcaccgcggttattgcctcgaggaattgcgcacagcaaacgccggagggacaattcgacggttggaaaggctaacaaaagcgaagcgggaaaaacattaccggacgaattttggattataaccttatttttttctcaaccaaatcaaaattgaaaaactaattatttttgaaacataacgaatattatggtccaaaaaagtcttccggcaatgttttgtgtgctcccatcaaaaatcggaaatggtctttgcttatttaagacggatcaaacttcaagaacacgaagatccgacctgggctgaatgtgtttgacgagaagggcaatgaggtgggggagaagttgacgacccacggcatttccctttctttccgccttcctttgccatttttgcttttctcccttttctgtttccatccgatcataatttggcttgtgccgagtccggttgctcctctctctatctctcctcttttttctcgtctctctctctctctctctctctctctctctctctcttctctcctcttttttcttttttcttcccctctctctgtttattttgtctctccccactgatcagcttgactgggactacgaacacgacacgcgttttttcgaagagggcgactgggcaaccgacaaaatgcccgtggtggacgcaaaggaaagcggcaccgctcaaacgaaggacgcagcggagcaggcgaaagccatcgaagcgcacgtcaaagggatgaaaattcgatcacgcggacgcggtgccaaaaagtttctgcaggctttggcaagtgacgacgacgaatgatcagccgaagagtcgacggatcgaacggaatttgttgaatttaactgaaccatttatcagaggacaaacattttcggattttaatgttcgcccattcacacgcattggacaatattaattcattttgcaaattattttatttttcattttggtctcatcgtatttaaaagtttcttcaattaaaaatattttttaaaacggaaaaaataaatgtgcaaattgaaaaatgaattttcatttttatttatctgttggtcttttgcttggttagttagcgatgcttttttcatcgttttcatttctccatatttttcaatggttttgcgaccattccctccattcattcattcgtcatgtgatcgtcggttgggccaaacgttcacaacaccggtgaaaaatgagcaacgctcggcggtgggggg

SEQ ID NO: 42610 - DNA, 1291 bp, Heterodera glycines
tccaacacccacatgtttgtagttttcactgaacactgttccttccgtcctcaatgccatggttttgctggcacgtcattcgttcaatatccccggtcatcggagtgatccgatcgaccattccgttcgggaatgccacatctttcgttaatccaatcggccaattcctttgaaatttcaaattttctttaaaatattttaaaattatttacctgttgtcccagtgcccgtgccatgccaacacacgcatttcgtgccatttcaccatttttggttatgttgtcacatgacagcacagtgaatggatcggggccgtttgcacgccgacggctcagcgcggggacaatcagtccgaacacagggcgaggattggctatgaaaattaattaaaattattcttgtttttaaaaaaatagatattaaaatgataacatatttaatagtattttcgatattatttttaaaagaaacattataaaatttttaagtttcttatatatcttttatattttctatttaattttcatcaatgttcatgcattaagttttgaaaattatgataaataatggaatatttagttcattttttcttttttcctgaaaatgacgtcaaatgaaatataaagaaatgcaatggctaatttgaagaattttgtgtttcattatgctgacaaaatcacgtaaattcaaaaaacatttaagcgctaaaaaaaaattgcaaaatttctaaaaaatacgtgaaattcaggttaatggatccaattaaaaacataataatggcaaaataaattaaagccaatttacccggatcttttgagtcagcaacaattgccggatgggttgggtcaaattcgccagtggccgagttgatgaaatagccgccctccgtcacggtcatcgacacaattcgtattgccggatcagaaagttgggccacaatcgcttcggcattgtcaatcggcaggaagtcaatcattgcgtcagtgatcttataatttttaatattcaagaacattgttatcaattaaatcatgttacagtacgtggcccgtatttctgtagttgtcttgtccgagcgctagtagtcagaaagtcttgtccgctcaccccctccatatttttttggtttgtgtattttaaggtgataatcgtttatgtgacagttgaaatcggtttttgatctaaatcacaattatgggcattttgctaaatgaagcttccttctgaaataaatgaaataaatccctcctatgaggagggataaaaaaatagttctcccgatttttgtcaa

SEQ ID NO: 42611 - DNA, 955 bp, Heterodera glycines
ttcattttatatattaaaaattgatttaataatttttcccttatttctatattaatttataccgtcatcgtattatgatccggcgccgctggtggtggcagtgagtgaaatgatggcaaattgttgttgctgttgttgttggtgttggtgccgttggccgcagacaccggaaccatgggttgttgctgttgcggttggtgatgttgctgagtaagtgccgcaattgccaatagttgttgcaattcgcaaggtaaaaaagcgttgttattggcggcggcaccaccgatggcatcgttcggctaaacattaaataaaattaccttcccttcccttttcatccctccctcaccatgatcagtgtcggtgttgaagcagcagccggtgcgctgttcacttcgtcagcaacgcctgcggcaacagaatccgatttgggaattggggaaaattgctggagagaagcgaacggatgaaggtgttgttgttgctgttgctggagttgttgttgctggttgtgttggtgctgcatttggaggactaattcgagcggactcagctgactctgcgcgtggccatggcccgcgggggttggggcgggcgaatgaactgcttggacccggtggtggtgctgcgcaagtgtcggcatttgagcggtgggtcgagggaattggaaaagctgcaaagattaaaaggattgattatttggcataatttgttggtgattaacatttgccgaaaactgtgcagcacgtgccggtgccaccgcctcggcgttcgcgtgcagcaatggcacactgcgcgtgcccatttcggttggcgagttggagtgactgcacgcgccgccctcgtcgctcatgatgccactgtcggaactgaatttatattcgtattttaagcattttgtggctgacaatgaataagaggcctcctcacctaacactttggcggcccttcagcc

SEQ ID NO: 42612 - DNA, 1040 bp, Heterodera glycines
  unsure (1)..(1040): unsure at all n locations
tttcccctttgatcggtacaaaatggcccgaaaaagagatagccatcctctgaggcncgaaggaaaaattgnagagggctaatttatatgtaatattcgaaagtgccaagctaattagcgattcaggcgcacattggggcctgaattaagccattttccctttgatcggtacaaaattggccgaaaaagagatagccattttctgaggcccgaaggaaaatttgagagggctaatttatatgtaatattcgaaagtgccaagctaattagcgattcaggcgcacattggggcctgaattaagccattttccctttgatcggtacaaaattgaccgaaaaagagatagccattttctgaggcccgaaggaaaatttgagagggctaatttatatgtaatattcgaaagtgccaagctaattagcgattcaggcgcacattggggcctgaattaagccattttccctttgatcggtacaaaattggccgaaaaagagatagccattttctgaggcccgaaggaaaatttgagagggctaatttatatgtaatattcgaaagtgccaagctaattagcgattcaggcgcacattggggcctgaattaagccattttccctttgatcggtacaaaattggccgaaaaagagatagccattttctgaggcccgaaggaaaatttgagagggctaatttatatgtaatattcgaaagtgccaagctaattagcgattcaggcgcacatttgggcttgaattaagccattttccctttgatcggtacaaaattggccgaaaaagagatagccattttctgagccccgaaggaaaatttgagagggctaatttatatgtaatattcgaaagtgccaagctaattagcgattcaggcgcacattggggctttaattaagccattttccctttgatcggtactaaattggccgaaaaagagatagccattttctgaggcccgaaggaaaatttgagagggctaatttatatgtaatattcgaaangtgcctaagctaanttagcgattca

SEQ ID NO: 42613 - DNA, 989 bp, Heterodera glycines
aaacatgtcaaaaatgaattctcacccagaacaaggtatttatacaattctgatagtatgatcttttgtacctttctatgacatattttcgactggtgcttttaagtaattttttattcggtaaattataatgtttttgttaaataggtatttatttttaatttctgaggactttgaatttaattgctatttgaatttatgatttcaaataacaatctaaccgtttttgaagctaattttatttttgcatatttaatttaaggaattactattttttgtttcttctaaataacactaattatggcattggtttttaaatggactgaaataaattaaaaggcaaaaataaagtaattgcttttttacctttaaatttttacaaataaatgaaaacaattttaaggaataaaggaaaaacatgaagcaaatagcttaagaaaatttaaatgcgaaattttattttaaaacatttcaaaaaagcaaatgaaaggcgtaataaaaattattttaaaattaaacaaaaaattgaagtgtgtaaaatttaaatataaaaaggttttcagaaagtgttgttaacacatgtaatcttgtttaaagaattaatcaataaatgtttgttttgcttaatatatttatttattgaatttttactcaaaatataatcatctttgcatacttttgtttaagtaaatttccaatatgctttttcgtatttttttaaaatcatgttctgtcgtccaaacttttccttgagagatatttcctttattctaatctctttttaaatgttcaatgaatttattaataaatgcttcacaattttttgttaaatatttttaaatttgtgaatttcgcctctgctcaatatttttgtttattagaataatgaatattaattagacagtaaaagttccgtcaaataaataaacaaattcaattacatgattttttactttttgagttattttgagattttttaatcttttata

SEQ ID NO: 42614 - DNA, 941 bp, Heterodera glycines
taatcattttattgtttcagcttcatctctgctgactgttggcttaaggtgttcgatttgcttccgccctctcaacttggccttggcattgcgttgatcagtcgccgctttgactattacgtcgacgaacactttaaaactcgcaaatggacattggacaaaatggaaattcgaggcaaaattggagagaatggcacagaggaaatggaaattgtcaattccgatggaaaagaattgccaacccctcattatccgttgccgaacaaagtcatcggattcaaactcattttgatcaagtgaaggatttgaaaatgatttgtgcccatcaatctactttttttgattttcagcttcatcgaccaaaatgtgctcacttttcctggccattttcaccgttttttcgcgacatccacaacaaaattgttcattcgcactgaaaatattcaaattttggagtttcttatgcgcaacatttggccaatgttcaaggccacaattcgtctgatatattttcactccatcgcttttggtcaaatccggcaatttgccccgttaatgcttaacgattgtccgtcccttcatgttgtcgatttcgatggtggcattttgcccgaatttccgcctgatgacagtgccaatgcgtcggatggccaagcggtggccaaatggctgttcacgcctcgtcccgacaatttgacgaaggtgctctctgtcaaaattacatttgttgaacaattgttggcaacagtggaacacatcaaagcggtgattaattaatattttcaatttaattcattttttctatttttgtcttattttaggcatttttcaatgcttcttcgcctgtttctttcgtcatattcattgactttccgtcgtcctcttcgttttcttcgcttatgccatttcaattgaccaatgaattcaccggggagaaattg

SEQ ID NO: 42615 - DNA, 1200 bp, Heterodera glycines
  unsure (1)..(1200): unsure at all n locations
atggttagatatattaaataaaacaagatttatttaaatatttttcttcaattnttgtgtaaaaaattcctacatcccataaaaattgaaaaaaaattaatgataaataaatntaaaaataaattaaacaatttattatacaacatttaatttgaagattaaccagatcaaaaattaaataattattcagtaaaaggctgaaattccgaaaccccgggaaatgccataaataaaaataatgcatttatgaaatattaacgaaaaatgttaagcaaacaaccgatgtaaagaaacttaaatttaaaaacaaagaaattgttcgtaatttgaagtttttaaaagataatatttaaaaatcaataaaattaatactagattttaatagacgaaaatattgataatttaattgtataaaataactaaaaaaatctcattcaaaaaaaaatttaatttacataaatgaatttaaattaaaattagtcttcaaaattttgaaaaaaaataaatatacaaaattatttataaaaccaacttgagaaaattaacaaaaaaaatttttaaacataggaataaagaaaattactattcttcatcttaaattgaataaaacatttaaaattaccgaattaatgttatataaattaaaaactatttaaataaacataattttaattatacgtaattaaataaacccagataatgtgtttcaatatgaggttgagcagatcattgcttaaaggaaaatcaatggcaagaaccaattcatagtaaaatattatttgataaatttaaattatttttctttttggtgttttataaaataaaaatttaattaataaataaaaatattctggaaaggattctcgtatagcgaagacacgtggaaaccggaaaacatttggaaagaaacaaaatgcttttggaggagttcaaaaaatgaaagtaaaaaaacagtgaaataagataaaataatttatttaaaaaaacccaaacatcttccaatgctacaaaaatggtaataggaaaaaaaaccaataatgagaaaataaataataattattaattaaaaaaaatacatttctaaataagttacaaacaaaagtcaacaaagatcagcccaaaaatggattaatagttaatattaaaaacatattaataaaaataataagtaaaaaataaaataagataaagcgaaaaaat

SEQ ID NO: 42616 - DNA, 877 bp, Heterodera glycines
cgcgtaattaccgaccacaaagcgctaatttggatgtctcaccgcggaaccgaaacgggaatgcgcgaattgaccgctgcctattagaattgaattcaagattcattcttaaagttgaatatcagcccggcaaaaagaacataattgctgatgttttgtcacgatcgggaactggcaacgaaattgaagaaggcgaacaaaattccgaagaaatcgcattcatcggtaaaattcggacaacagaaaatgatttggagaattttggtttgatggaagaaagacaagaatgggtcgaacagaccaaaattggcgaaatgaagccaatttacgagtttcttgaacgtaaagttttgccaaatgaccaaagagatcagcaaagagtcattggtaaatgccataaatttgtcgtcttcaaagaccttttgtacctttccgagaaggaaggcaaaatgagactttttgtcccacaaaaattcagaaatgagttggtgaaaaatcgccatgaaggaatttgtgcaggacatatgagtggataacaagaaaaaggtatgagaaacggaggttactttttaatcaatttttttggctcatatttttatttagataataattttttatttgatttactattgtgattagaaaaccttctgaaataattttttatttgatttactattgtgattagaaaaccttctgaatacacgaaaaatttaaattaatgttttgacgatttgtttttatttattattttatcaaaaaatttatattagatttataatcataaaaaaggtaataaaatatttaaagttgggtctcaaaagaccgaaataatcagtaaaaaagaaaataaatatttaacaaattacataagaataaa

SEQ ID NO: 42617 - DNA, 935 bp, Heterodera glycines
  unsure (1)..(935): unsure at all n locations
ttttttttaattttcgcaaaaggacaatcttgtgttatgattttcgctctcgaacatcactaggttttngccgttttanaattaaaattttgaaaggacatggcncaaacttcgtcagagagtgcaggcggctcaacaccatcacaggagcagcgataaccaaatatcacacgttccatgatgaagtcctgtactaccggcggtacatctggcggtgcaatggtccatgccgtgagcgtggaccgacctatgggtggatccgccgttttcgcttagaagccccaggcatgaaatactttgaaatttaattattttaaaaatattaaggcaaaaaagaattaaaatatttcagtaataaaattttcaaataaaaaagatataagaaaattaggctaaaaattatatgcattaaaatgctaaattgcgcataaaatatatatataaatccctcaaatatgccttactgtcaaaaaatgccaacaattgtgtaaaatatataattgaattatacacattaaattactttttaaaaaaccaattcaaattataaatatatatcgtccaccgaattgtaaaatgatcctatgtcaaatatgctgattgagtttatgaaccaaaaacaattgaaacagcatgttaaagaaccgaccagagaaaatacgattttagacttagtaatgactagtgaatcagaattaattaatgaattaattgtattggaacatttttcaacttccgatcataaaatggccggatttaaaataaaagaaaaattccgtcgtaataatcccggtgtttatagaagagattttaaaaatattaatttttcgaaattaagtcaggcgatacttgaaaatcgtattgatttatcaataaactcagtgtacaccgttgatcaaaaatataaagaattcttaaataaagtactgaagtta

SEQ ID NO: 42618 - DNA, 1081 bp, Heterodera glycines
aaatttaattgataaattctttcgttctaattctccctcatttatatgtaattgaagacaatacaatacatatatgtacctcgtaaaataaattaataacagaaattataaactggaagaaaacaatttccatttttgccatttttaggagtttgtgccgaaaattgtgaccgaacaaaacgccaaggcgcggagaaccaatgggccggcattgcagggacaatcagcgaacggagcgcaaaattggaagcggaactaagccaaataaaagaacgattatcaaagcttgaaaaagcggaggaaattccaaatgagtgatgctaatgaatgataatgatggcacttatactcataatggaattgaatattcatttgatcacaaaaagacaatcgtttacataatttgattggagtctccaattattttttgttccgacttacagagttacgtaccggaaaaatttcttaggggctggataaattcttcgtggaagtcgaaaagagggacagaaagcggagcggctcgttccccccccgagaaatttttttttaaatttgctaacagaactttttcaagaaaaaaaatcttagaaagttttttcataagaaacttctaagaaaaaaaattttcgaaaatttttccaaaaaatcgctgagaatttctcgaaaacgacaatcttttgaatgaccggaatttgatgactcgttccgacttccgaaaagtttgaggactcagaatgccatccctgcgctataaacttaaaataaacattcatcccgttcatgcattttattgagtggactataaacgacctaatattattatcagagagaataaattgcaaattgcatcatctaaaggcataattaggtaatttattttgaaaacacatcaaaataaaatgattgattccttcgttcgtttgtccattttcaataggtcgtcctaattcccgtcgcctgagcatgggcaaagagcagctcaaccagcagccgcacttccaagtgcgctttggcgtcgttgagccaatcgctgaaaatccgagccgactcgcctctgaaaatgaggagggtttttaaa

SEQ ID NO: 42619 - DNA, 381 bp, Heterodera glycines
gccaatgtcaatgttaatcccgataacatcaaccatttgctcgttggtatttctcgaaattatgaaatgcgcccgtaatttttcaatgcttgttttttttgttgttaacacattgataaatatgttatgttattaattttataattttaaacattttttcggaaaaaatcagtagaatctattttggacaaaaaacagcttgccgtactaaactgaccctcgtactaaaccgacccctcgtactaaaacggccgtactaaaacggccgtactaaaccggccgtactaaaacggccgtactaaaacggccgtactaaaacggccgtactaaaacggccgtactaaaccggccgtactaaactgacccggtccgagagatttg

SEQ ID NO: 42620 - DNA, 1207 bp, Heterodera glycines
  unsure (1)..(1207): unsure at all n locations
tgtttgtatgtatgtatccgccttgctttgaattggcgtggcgttttgtaattgttttgtgttaaaaaatgatttgaaaaatggaaatgttttgtttttgcgttaaaaatgcatttgaaaaatggaaatgtttgtttttgatttttcaatttgttttgcaataaacattcttaaaattgtacctatttatttgctttttattgtatgttcatagtttattaagttatttgttatataaatttgttttttgtaaacgaaaaaatttatcagtatattgtttgagtttgatttagtggttgttgtttgtttgtttattttgtttttgtctttacgtgaaataagtatgcttatgcttaatgttatttgaacttttaatgaaatagaaatgcatatctttggtttgttctgtgactttagtgtgagacactaatgtgtgtcatgcttttgaaaaaacattaatggtctgttctgtgactttcgtgtgagacactaatgtgtgtcatgcttttgaaaaaacattaatggtttgttctgtgactttcgtgtgagacactaatgtgtgtcatgcttttgataaaacattagtggtttgttctgtgactttcgtgtgagacactaatgtgtgtcatgcttttgaaaaaacattagtggtttgttctgtgactttagtgtgagacactaatgtgtgtcatgcttttgaaaaaacattagtggtttgttctgtgactttcgtgtgagacactaatgtgtgtcatgcttttgaaaaaacattagtggtttgttctgtgactttagtgtgagacactaatgtgtgtcatgcttttgataaaacattagtggtttgttctgtgactttcgtgtgagacactaatgtgtgtcatgcttttgaaaaaacattagtggtttgttctgtgactttagtgtgagacactaatgtgtgtcatgcttttgaaaaaacattagtggtttgttctgtgactttagtgtgagacactaatgtgtgtcatgcttttgataaaacattagtggtttgttctgtgactttagtgtgagacactaatgtgtgtcatgcttttgaaaaaacattagtggtttgttctgtgattttagtgtgagacactaatgtgtgtcatgcttttgaaaaaacattagtggtttgttctaagagtttagtgtgagacactaantgtgtgtcatgcttttgata

SEQ ID NO: 42621 - DNA, 953 bp, Heterodera glycines
gtaagctttttccttttttcacttgtaaattatttaaattttcaattttttagcttttttcgaaaaaatttttgtcttttttcggcaggcactgcctctgacaatgttttttatttatttagaaaaataaattgatttttttctttttgatttattttaattatatttcatccttaaattttttaataaacattttcaaactttcaccttattaatttaaggcgaattttgccttttttaataaattctcttgtgaaaaggcaaaaaaataggctcttttaaatatgcctatttaaattactttcattgctttcctttcgtttacgaccataccacgttgaaagcacgccatcccgtccgatctggcaagttaagcaacgttgggccttcttagtacttggaacggagacgtcctgggaatcgaaggtgttgtaagctttttttccttttttcacttgtaaatttatttaaattttcaatttttttagctttttttcgaaaaattttttgtctttttttcggcaggcactgcctctgacaatgttttttatttatttagaaaaataaatttttttttctttttgatttattttaattatatttcatccttaaattttttaataaacattttcaaactttcaccttattaatttaaggcgaattttgccttttttaataaattctcttgtgaaaaggcaaaaaaataggctcttttaaatatgcctatttaaattactttcattgctttcctttcgcttacgaccataccacgttgaaagcacgccatcccgtccgtctggcaagttaagcaacgttgggccttcttagtacttggaacggagacgtcctgggaatcgaaagtgttgtaagctttttttccttttttacttgaaatttatttaaaattttcatttttttaacttttttttccaaaaatttttttgtcttttttt

SEQ ID NO: 42622 - DNA, 512 bp, Heterodera glycines
  unsure (1)..(512): unsure at all n locations
tatttgtgccttttcgtccttagncggcacagtaatggcatcacgcaaagaaagtcaaacgggcaaacaacgtcaacgatttcgctcgcaaatccacgcccaaacggacgcgcaccgccgcactttcgtttttcacgggcctcgccagcacatcgtaaccgtgggaaaggcgatcgtacagacctaaaagggcaaaccgaaaatcgacggaacgatcatttgacagcgccgcccaaatcgtttcgacttctctcgtggtcaccggcccaaacagccgctgaaaaggaggaaaatgcaaagggacggagagggggggggggggtaatataagaggggggggggggaggaaaaaccattcaaagggcaaaaagtgcaaaaaatcattaaaaggaagcataaaaggaagggcaaatgggagaacaaaagaaactacactttataaataattaattcactggtttgatcgagaagagcaaaatgaagaaactgaaaaactgaaggggggggggggg

SEQ ID NO: 42623 - DNA, 818 bp, Heterodera glycines
tttccgttaattctaacggaaagtgatcatgatgaataccgccactcatccaagtcggaattccggtgcggagacggcgtgccacgcttcgacgggaagtcccgcgaattcctcttttccggacgatagtcggcagttcgggacgacgcagaggaattcgtcggtggtctcgccagtgatcagccaccgatgaccccgttttcgtcgtcgggcggcccaaaccccccgttatcaaattgctcgaacctcgggctgatcgggggggggggggagtgactgaggtctcgaggagcggaaaaatggaggcaatgtgttttgaggggggattgtcggacatcgtcgtgatgagcacaaatggggcaaatgaatgatgaatgaaaaaatggactttttgggggggatgaatgggtatttatgcacattttggccatctccgccccgtcgtcgaagtttatgcaaaagaggggggacgcgctcatcctccattgttcattgcccgggggaagagacgttccccctggtgtttgagcccacatcgtcaacaaactgttgactatcaccaattacaaaggaaattgctggccccctttacgatagacaagcgatgggcgacgggggttagagacggatcgccagatggcccggcccaaaacacagagaagggtgaaagtggcgaaaacaaagacggcggcgcacagcgaagttaatgcaggtgtcgacgatccgtcgactccacatgcaccactcttcgttgctgtacccaaagggcaccacctggggggcgtgatccctgaccacccccttattcacggtcgggt

SEQ ID NO: 42624 - DNA, 986 bp, Heterodera glycines
  unsure (1)..(986): unsure at all n locations
gtcttaacgatgtcaaaagtaaaatttgaatacgtattcgtgatcagcggcccaaataacccctaatgccatgtttttggatggtttttaatggaaaaatttttcactcaaaaatcctggtcacacccctttggtcccgaatcccaaaatcacttttatttttataacttttttttaaaaagggataaaaatgtaaaataaaatttatataatagagcaaaaaattgcggatttttgtagtattttacttttacagaaagacttttcagaagcgagttctgaatttttttctgaaaaatcttaaatttccagaatttctggaataacttttttcatattgatgttagaaaacccaaataaatcccataaaattctcccgattttttgctatttttaaagttttatttgctcaaaattggtcaacccttaggctagatatgaatttttcaatattagcccaaaatcccgtgggccaaaaaattggaaaatattttcgaatttttaaaaaattccaaaaattttgaaacgaaaaataaacatcatattcgtgctcagcacatcaaaataccccagaaaaatatttttgacccccattttcaacccaaaaaaaatttccgaaaatttctagggggcctagctcgaaaatttttgaaaatttccggccatatggcacaccattcgatagcatttaaaaagctctacaaaaatgttctaagacaatttttcgctaaaatcaacccctgacgagttatggacccgggactcaaatgtcccgctcaggccaaattttttttctatttccgggaaaaaatcgaaatttttccgaaaaaaataccagtcgatagaactcgaaaaatgatgttttggaagtggtctccgtttttcccagaaaaatcgttaaaaattcctannnatcaaaaacccgaaaaccgttttttanngctaactcgaaaaattttgaatttttcaaaatttaaaactggaaa

SEQ ID NO: 42625 - DNA, 1464 bp, Heterodera glycines
  unsure (1)..(1464): unsure at all n locations
aaaaaaattccaaaccttttaaaattttataaaaaatttaaaaaagagaatttctgggaggattttctggaaataaactttattaggccttagttaagctgtaaaaaaaattttggggggatttgaaagaaattaaaaaaacccgggttcgagaaagttttgttaaccaaaaaaaaatccaaacatttaaaaaatttataaaaaatttaaaaatgagaatttattggagattttttggaaataaggttaattggggttagttaagttgtaaaaaaaatttggggggatttgaaagagaatagaaagaantaggttngatgaagttttggtaagnaaaaaaaaatnnaaacatttaaaaatntataaaaaatttaaaaatgagaattnatgngagattttntggaaataagatngtnnataaataatttgtaattgataagnggntnannaaattttgnagagatatgtatnggagcagtagaaatggttagtaatttttatagattttttaaagnagatgaaaaagttaagnttaaantttttnggnntgtttaaaaaggaattagaaatttttaaaatatttattnatttnnntttttgataatataagagtnagagtgnnttattgaanttgtaaataaattttggtgngtttnagagcagtttgtgaaaaaaatttatgaattaattttgaaagagaatagaaagaaccaggttcgatgaagctttggtaagccaaaaaaaataaatatttaaaaatctataaataatttaaaaatgagaattcatgcgagattttctggaaataagcttaatagggcctagttaagctgtaaaaaaaatttggggcgatttgaaagagaaaatttggggcgatttgaaagagaatagaaagaaccaggttcgatgaagttttggtaagccaaaaaaaatgcaaacatttaaaaatctataaaaaatttaaaaatgagaattcatgcgagattttctggaaataagcttaatagggcctagttaagctgtaaaaaaaatttggggcgatttgaaagagaatagaaagaaccaggttcgatgaagttttggtaagccaaaaaaaatccaaatatttaaaaatctataaaaaatttaaaaatgagaattcatgcgagattttctggaaataagcttaattgggcctagttaagctgtaaaaaaaatttggggcgatttgaaagagaatagaaagaaccaggttcgatgaagttttggtaagccaaaaaaaatccaaatatttaaaaatctataaaaaatttaaaaatgagaattcatgcgagattttctggaaataagcttaatagggcctagttaagctgtaaaaaaaatttggggcgatttgaaaaagaatagaaagaaccaagttcgatgaagttttgttaagccaaaaaaaatccaaacatttaaaaatctataaaaaatttaaaaatg

SEQ ID NO: 42626 - DNA, 880 bp, Heterodera glycines
taagaaaattagtaagcatttgtagtgttccgatacctttccctgcaaaatttggtgagcccctgatcaattacaaattatttatggacgatcaaatttttagaaatttttatttatttttgcataattaattcataaatatttttttcagaaaatgctctgaaacgcaccaaattttatttacatgctagtttaggcactctgatgctttttctatcaaaaagggagatgaataaatttttaaaaatttttaattcctttttaaacaggccaaaaagtttaggcttaacttttttttcagaaacttatcagaagcgccccaaactttgcagggatactgaaaggaaaagaattaacctgttttatcacattgtggtgattttggtggatggcgaagtgtaaaacgttaatccgcggtgggactcgaacccacgacccttcctttccgtggaatgctctaaccaactgagctacacggacacattctacactcctctcaattccatagataaggaagagagagactcattcccaacatgagggatttgagccgcatcacatccccggcctctgagaagaccggtccccgggctcttttatatgctgtcggccgccagcacgtaagagtggagagagtgttagaataagatcaacatctaacacacggacgtgaatccacccaggagcgccatgtggtgattttggtggatggcgaagtgtaaaacgttaatccgcggtgggactcgaacccacgacccttcccactgtggaatgctctaaccaactgagctacacggacacattctacactcctctcaattccatagataaggaagagagagactcattcccaacatgagggatttgagccgcatcacaa

SEQ ID NO: 42627 - DNA, 1028 bp, Heterodera glycines
  unsure (1)..(1028): unsure at all n locations
aaaaattaggttctctcaaaaattgatgcattttttgctcattgttcgcaactaattgcatcaaaaatttagaaaatttaaatagggtacctacctgcattcggaccattttttgcatcggtgtcagcccagcatttgggtcgttctgttgcttgccatgcattcgcttctccgccgcagccgcaatcaattcagcatcagagcgacgctaatagaaaaattttttttttggctttgccgtaaatgggaatttttatttcggcccatcgccaagagtattatgtcattaattaaaaaccattataatgggcgctctaaaaacaaacttttaatccttggaatcattcggtagtactaagtattctctattaggctgcaaaatttcaaaaaaattttttttgttaactttcgaaaaagtattgccaaaaatatttggaaaacaagagttttttgagttcttttgtcaccttttttgaaacttaatttcaattttacattctgatagagatcacttttggctatcgactgatacgttgaaattaaaattttgcttgttttggagcagttatgaataattttttgccaaattttcatatcggtggtttttaaacaacgccttttattgcggttttttttttaattctgcaccatcgccaaatccccctctccctccaactcgtttcaaaaattcgtcttttgaaaaaaacagttaacccatgtcaacctgctgagcggctggcgacggtgaccgtgtgctgctcgtggtacgtcccgccgcttgttccgttcgctgttgttgcgctgggccgcccagctggcgaccaccgcccaacttcttgaatttgttgtccaacttcttcttcttgaccaagtctttgagtttttgcattatttatttggcctgaaaaagaaaaattgcgcacaatttnttgtggaaaatngtgtaacaaaaagcctaaatcctgtggtaaattgctccagaaatctgcccccgtccgaccgagtctctcaatcaaaagatttttgaa

SEQ ID NO: 42628 - DNA, 980 bp, Heterodera glycines
  unsure (1)..(980): unsure at all n locations
attcagatcggcacaattctgttattttttaacaaatttctccccccatgccagctctaactgaacgacaaaaagcgcaacttcgaagacgctggtacgagaaaaggcaaacatggaaagaggcgaacgaacggggcgacttaccaaagcccgcaccaccctgcatgaactgggtcatctttggttcttgcggaagctgatggaatgcatagacacatttataaaggtttctttttttaaatgggaaggaaaaaaaattttttttgagagtaccaaaaccataaactgtctgaaaaatttttttcaaaattaaacgcgattttttgaaaaattctcgaaggcctcggctccgcctgggaatgccattggcgccataaattggggtttcaaaaaaagtggatttattttttgaggattaattattataattaaacagattaccattgtaaaagacgctgatggaaatgagggctcggtgcaatacaccgaagcgcccagctacacacgcagacaactcaaagccaaatcctcatgtgcatcggtggcaagacggcggaattggttttcttctcgaaatgcgtgggcgatggcacggacagagatgactggaagcgattggccgcgaaggtttatcactgaattagaattttttgctgaaattttccttaaaaatgcatgcattttttcgaaattgaaaaaatcaccattttttggtgaatctgttaaattttgctactccccccccccctcttcaccggcgactcccccctcttttaaaccggccccctacgacgaacgaggagggagggggcgggggtgggcaggagcacctcgtctctcgtgctacagccggatccctcccttaaacaaaaaaatttgaacgcaaaaaacaaaaattttttattcagctagccgatacgagccccagatgggcacgaatgcgccgaacgccgnaaattacgagctgctccgaaaggcta

SEQ ID NO: 42629 - DNA, 1438 bp, Heterodera glycines
  unsure (1)..(1438): unsure at all n locations
cgatcatatcttttttaaaattaacattttttacntattttttaatttttgataattcttaaagtttctggattattaaaagtgaaattntgctaaaaaaataaaataaaatnttctgcaggcaaatggaggtccgaattttctggcaaagtgttttggcccagtattccaacaatgacttttggcgaagagcttattgttgcggaagcaccgctcgcgcgaacatcgggcgttcaatttttaaactggaggtgggaaaaaatgtgtgaatggaataatcgggaataattggacaagacttgtcaatcaagccaaagatattactgatcagtgttgaacaagaaattgatcagcattattggacttgatcagatgaatcaatgtgtctgatcattgatcacgcaatgacatggttgatcagtctgatcattatttgaattggtcagatcacaccatggcatgatcagtctcattctttgacttgatcaaatgaactaatatgtttgttcataccatgatctaatcagtccttgatcaaattattacatggtctaatcaatcacattttattggacttggtcagaccaaccaatatgtctgaacacaccatggcatgcataatcagtctcaccattatgtattggacttggtaaatgaaccaagacgtctgatcacttatgataggattagtcttgtacaaggaccgggcaaaacaaaatatgtcagttgaacacgttctgatcaaaaaacgatacttatcagtagggccgcaacttttagtgaaaaacttttttttttgctctattgttttgaagaaaggcgctcaaaatacgcatttctgcattaaaattttttgattctgatgtcactatctgtcactagaaatcactattttggggtttcgtcactaaaatagttaaaaatcactattttggggttttgtcactaaaatagttaaaaatcactattttggcgttttgtcactaaattagttaaaaatcactattttggcgttttgtcactattttttcactatttcgacattttttggaaaattccttaacaaaaatgcaataaaaccaaaaaatacacccctaagaatcgagctaaaatttttcaaaatatactcctatgaaatgaaaaaaaattttctcaaaaatttactttcttggcaaaaatttttaattttaaaaatttttttaggtaactattttgggttttttggtcttaaaaatcccagtcctactcatttgcaactgcaatcagtgaataaaaattatttttgctcaatttttggctgaaaattatgtcactattcgtcactatttcagactttttgacactattttgtcactattttggcatttttactcactattttagttaactatttcgggatttttcgtcactaaaagttgctgccctagtgattaatgca

SEQ ID NO: 42630 - DNA, 957 bp, Heterodera glycines
atctcccggttacctctctcctccttttctcctcaattttctcctcctttgctgtgccaatcaatgccttttcttttcatttgtcttcaattttcgtccctcatttttctttttttctctccacccactctctttttcccattttcttcttttctcctctttttccaatttccccactctttttttgctttttccccctccttttgctattctctcccccttttttcttttcctcctcttttccctttttgtttgttttagatgtgttagtttctctctctcttctcactgacttgatcagttccggatagaattgcgcgtcccacacggaatacagcgaattggtcacgtacagccgacgcccgtccaggctcagctgcatcatttgtgggcccccctccacgcgacggcccttcacaattagcgggtcgggttgggcctgggaaaagtcaaattgaaaatggaaacacttcggaggaggggcaattaaagctgttccgcataagccatcatcattaggttttgaaaagattaaaaattgccgaaaataaattgttgcatttgattaagggcataataatgcaccataacggcaaatgaatggtccatcgtttttggccaaaaaaaaacacttgcgctttgctttgctctcgcccaccttcagttctttgtcctccaaaacttcgacgccgctttttgagtgaattgatccgccgacgaaaaactgaaaataccaaaaaattgccgaattttcccgaaaattaattttcgacctgtccgaccaatttgacatcgaatgggtctgaaatgtcgtactggcgaacgtcgccatgaagccaacacgaaaggaacagaaaacggtcgtccatggacagcaaaatgtcggtgactaacgcgggcatccaatccatggcccaaccgcgcactctcttcggaggcaccgccaccgccaaccga

SEQ ID NO: 42631 - DNA, 1174 bp, Heterodera glycines
atatgatgtaattaaagctaatatttctaatccaactcaaaaacatatctaaaccagggatgggccaaattgataaataaaaagcgaaatgcgaaaagcgaaatttgcgaaactgaaaaatgcgaaatgaaaaaaaaagcgaaatgcgaaaagccaaaatatgcgaaaatgcgaaaagcgaaatgcgaaaagccaaaatatgcgaaaatgcgaaaagcgaaattttttctacaactttttaatagttaaaatcataaagcaaaaatcattttttaaaattttattccaaatttaaaaatcaataaaacgcttttttgaggcgcgctttttccaaaaaaactttttgggaagagggggcaggcggcgccgggaaaatttttgaaaatttgattaaaatttgttgacagattttcactaaaaaatgattaaattttgtgatttttatcatttttctaatgagaaataagagttttggcgcgccgctgagaacagtttttcatcaaattaccaaattttgcgattttgggccattttctaagaaaaaataggagttttgggggcgcggcggtgccgataggcgccgccggggaaaaaaattggaaattttgatcatttataaacagtttttcactgaaaattagccaatttataggtaaaattttgaaaaattttatgggaatttaatccaattcttaggggtgtaaaagtcgcatttcgcgccaaaaagcgaaatgcgaaaagcgaaatgcgaaacgccaaaaaatgcgaataatgcgaaaggcgaaatgcgaaaagcgaaacctcggcccatccctgatctaaaccatgtatcttacaaataaagggcatgaaatcgttaaactccaagcgaatatttttttttaatactaaaattatggaatttccttttaaatttattgattaatatatttgacgaatattaaggttgaatgctcaatataatatcaaatcttataaaattattttaatataagtttaaaagaataaacatattaaaataaaaatgtctttaaaatattataatatatgaagcaacgcagtaaagaaatgaatacccaacaactaaaacaattaaaaaagataaatgaacatgtccaaatgaatgtgtaaaaaaagaaaaataaatagcctttgttgtaagtaattgtaaaaa

SEQ ID NO: 42632 - DNA, 1283 bp, Heterodera glycines
  unsure (1)..(1283): unsure at all n locations
taagaaatgaatgactttcctttttatgttctttgtctgtgtgttgntccataggtaataaatcgggtcaaaacgggcggtgaatggatgatcagacgatcaaagtgtatcattaattagctaatgagcttaatgacatgcgtaaccgttcaatgtttttgcttaatcctcacggattgntgagaggcgacgactgcaaatggcaaaaacggctgctgctgatgtgcgaggtgcgtttacttgtcgcgtttcacatttttgatcaaatgacgggcaaagcgataaagcatgatttattagcattaaaaagtaacaaaaaagaagccatcttcgctacctaagctcaaatatatttaatagaaataatacaaacataaaaaaggaataaaaaaagaaaataattaattttcaaaaaaataatgaattttaaaaatctatgctgttcaaaagtttgtgttaaaagattcatcggtcaaatcatcattaggatcattttcaagatgttctctcaaaggaaatatttgattaatttccccaaaatttttttattatttttcactattcaaatatgtatttttgtagataaataaataaaaaatataaaaataaaaaatcgcacgatgaaggataaatcaaaaaaaaaagaaattttgtcaaagttacattgggtggaaggaatggaaattattctcctaattaattaaaaaactcaatttctatcgtttatttgacaataaatgttttcacaaatctctttgttcttattcttatgtttagtaatcagaagaaaaattgtttgacaaatctattgaaattcaaaagataattgctttattatgtaaatttataaattttattgattaaaatatccagtaatgattatgtaaattcttaggttttactgaacattaattgtatttatgttacacagcgactgacgaattaaacattgcgttcgtgactaggaaaaaattgaaacaaattagcatcatgtgcattaatcccgaaataattttcaacaattatttatttgctaattgaaaaagcatttttaaaactgagtcagttaaatgcatgcatcctttcagtcttcgatcagttttttgacttcagcagcacttcacactttcgcattttgaagcagtacaagttggaccagtcgactttgcttctccagcaggacaacggacggtgaccacacacttttggtcattgcagctcaaacagacgcaacagcagtcgccactctccgtgttagctaatattttttaaattaaaatgaa

SEQ ID NO: 42633 - DNA, 1502 bp, Heterodera glycines
  unsure (1)..(1502): unsure at all n locations
aaaaagttaagcntaaactttntggcctgtntaaaaaggaattaaaaattnntaaaaatttattcatctccctttttgatagaaaaagcatcagagtgcctaaaatagcttgtaaataaaatttggtgcgtttcagagcactttctgaaaaaaaaattatgaattaattttgcaaaaaattggaaaagtacgcaaaattgcaatgtctaaaatttttaaagaaacattatgggacagttaaataattatatgaataagcattattctcagctgttaccctgcaaaacctggtgcgcttctgagcactactcgaaaaatgagtaaattaattttcactaaaaagttaagcctaaactttttggcctgtttaaagaggaattaaaaattttaaaaaattttattcatcttcctttttgatagaaaaagcatcagagagccttatttaacatgtaaatagaatttggtgcgtttaagagcactttctgaaaaaataattatgaattaattttgcaaaaaataaataaattgtgaacctttaaaaattcataggaaatttaaattcataggtactactgctaaatcaacgcagagacgcctttccttgacctttttaggctcctgcaaaacctggtgcacttctgatcactactcgaaaaatgagtaaattaattttcactaaaaagttaagcctaaactttttggcctgtttaaagaggaattaaaaattttttaaaatttattcatctccctttttgatagaaaaagcatcagagtgcctaaaatagcttgtaaataaaatttggtgcgtttcagagcactttctgaaaaaataattatgaattaattttgcaaaaaataataaataattaaataaaaacgaaagactttgatttttgaaaaaatttttaaacccagctagctcggcgctcatttcagtgtaagttagtcctttaccggggagtttccctgcaaagtttggtgcgcttctgatcagtttctgaaaaaaaaagttaagcctaaactttttggcctgtttaaaaaggaattaaaaatttttaaaaatttattcatctccctttttgatagaaaaagcatcagagtgcctaaaatagcttgtaaataaaatttggtgcgtttcagagcactttctgaaaaaataattatgaattaattttgcaaaaaataataaataattaaataaaaacgaaagactttgatttttgaaaaaatttttaaacccagctagctcggcgctcatttcagtgtaagttagtcctttaccggggagtttccctgcaaagtttggtgcgcttctgatcagtttctgaaaaaaaaagttaagcctaaactttttggcctgtttaaaaaggaattaaaaatttttagattttttattcatctccctttttgatagagaaagcatatgagtgcctaaaataacttgtaaataaaatttggtgcgtaaaagatttgatcgtcccataaataatttgtaattgatc

SEQ ID NO: 42634 - DNA, 1454 bp, Heterodera glycines
  unsure (1)..(1454): unsure at all n locations
ggttgacctttttggtgtgactcaaggtctttcttttcctctaaggggggnggagangagnaagaaggaggggagaaagtcttatgaagagaaagaaaaaaagaaagagaaaaaggaggaagaaaaaggaaaaggaagaggaaaagaggaggacaaaggagaagaaaagagaagaggaaaagggaangaagaaaagaaaaagaggggagaggaggagggaagaaaaggagatgaaaagaaagaaangggaaaggaagggagggagaaagagaagagaaaaggaaggatagattgaggatttatttttgatataaaaaaaaatagtttagagttaatatttgataagggatatgtaaggagggttaaaatttcttaataagttgagtatatattaggatttgatagtatagattttatgatataggaaaatgaagaaaaatttatgttagatatgaatggtggagtataatattttaaagtttataatcgagatttgattgaagcaatgatgattggtgatgtcatagtatcagtgttacgcatcgtcacaattcgaggaaaaccttgatgaaatagttgaagaacaatttttagcaatacaatatcacaaaattttaattaaggaaatttctgaactcctgatcgaaattcgtacaaatagcgggagcctaatgccattccatatggaatatgtacattaactttacatttccgaaaactgtcctacttctgaagatgaataccttggaaattgataaaattttatcgacaagcccattcacaaaacagacttatatcggctgttttgcggctgaccagataccaaatatggaaatggtaaaatttccaaattgtctggtaatgaatattgacccaatcacctctaaaggatcacattgggtttgtgcttacagtccttctccgtcacacattgaatactatgactcgttgggcatttggccaccacctagcatacacattgcaaattatttgtcaagattcaaacaaattcgttatagtataattctacttcaatctcccaattcaagtgtgtgtgtggtcgtcatgtgctcttctttttgtttaatagatgtctgggaactccctttgaaaagattgtaagatttttgcattttggaaaaacaacacctgacacacttgtgagttcttttgttacaagaataataaatataaatagttgaaaaaatatagttttttcacaaaaatgcatgtcgattttgatccccaccaagtggattggtctacattctcgcacgaatttattcaatatggaggttacaatatttttcgtggtgtaccatatcagcgcggtgctggtatcggttcagtatttagaagcttaatgagatttaaaggaccgatagggaaacaaattggatcgtcaattgcatttaaagggcttgaaagcgggaatcgagtgttaacaaatgtat

SEQ ID NO: 42635 - DNA, 1233 bp, Heterodera glycines
  unsure (1)..(1233): unsure at all n locations
gacgccccaatgcaaaaaaggaaattggcgcctgtgcccgcatccgaaggaattgcagtggcggtaattgtagtggatgaaaaagcagttgaattagccagaaacggagcatctgcaaaagtaattgtttatttccgaataatttatttacaatttaaaatgcagattaaaaattgcaatagtttgctggggcggtgccaatgtttaattcctaacaataaacctaaaatttgtggccttttttgctctttttcacaaattattttttgcaatattttttaaaattttgtgtagggaatgaaccggcggttgggttggcggtgcgtgttacagaagaaaaaatctaacagttttaatgaaaatattaggaagattggccaaatttccagaactcttccctcccttttttaccaattgctgtgtttggtttcgtcgtcatcgttggtgctcccccaaacagaggggcgttggcgattgaacttgtctccgtcaatgaactggacgcagttctctttccatacggcgaaatgtcatcgactgattgtgcagccgatcgcttacgagatcgaccgttaacttgtggttgtgagcctgaaaaggagggaattggagcaggacgggagtccaatagtaaaaaagtcttacaataccccgagtttatttcgaaaaaagccggtaagcctgaaacaattatgttctattccgcgctctttcgacatggcatcccaggggaattgggtgggggcgtctctctcaccattactcccccattccaaacccacaaatggaggaaaaactatgcaaaagaaccaacttttgtagaaaacgaaggtggtttttttgttgttgttagttttggtatcaaataataacaatttgtttaattcggtcaattatgaaatgagttataccccttaaaaccggtctattgccaagttgtaacccactgcaaaacctcgttgataaaggaatgatcacacagtgtggtttgtcattcggagatttgtatttataatttagcaaaaaacgaacttgtcgtgagggtgttggcggtggtcgaaccgaagagagtgccaccggcggcggaggagccaaaagaagggaatttggcggtgccgaaagagaaggcggggacggaggaaggcacagcggcgggtgccgtcgttttctgctgagtgccaaagagaagcgggagagtggccgaggcggtggttgtggtggcgccngggggaa

SEQ ID NO: 42636 - DNA, 1234 bp, Heterodera glycines
ccgaaggatcggtctccccataaatctgggcgcatcggttcggggggactgccccgaaaacaaaaataaatcgattttttcaagtgtccgtttggggtactcaaacaattatggggagcaaaaatccaacgcagaattaaagtacaggctatagggaagctattcccgaaggattcggtctccccataaatctgggcgcatcggttcagggggactgccccgaaaacccaaaaaaaaattttttggataaaaattatttaaatgaactgactagataatatttaaaataggttatttctcttcctttcagtatccctgcaaagtttggtgcgcttctgatcagtttctgaaaaaaaagttaagcctaaactttttggcctgtttaaaaaggaattaaaaatttttaaaaattttattcatctccctttttgatagaaaaagcatcagagtgcctaaactaacatgtaaataaaatttggtgcgtttcagagcattttctggaaaaaatatttatgaattaattatgcaaaaaataaacaaataatgaactctcttccttaataattttcatgcaccgaggtactcactcggccgcttcgcggcctcgtggtgggccttcgccccccctccgcccttcaaaattttgaaaaaaaaataaaataataggagactcagaattttgaaaattttttataaaaactgatgacaagctaatgtgataaaacaggttaattcttttcctttcagtatccctgcaaagtttggggcgcttttgataagtttctgaaaaaaaagataagcctaaactttttggcctgtttaaaaaggaattaaaaatttttaaaaatttattcatctccctttttgatagaaaaagcatcagagtgcctaaactagcatgtaaataaaatttggtgcgtttcagagcattttctgaaaaaaatatttatgaattaattatgcaaaaataaataaaaatttctaaaaatttgatcgtccataaataatttgtaattgatcaggggctcaccaaattttgcagggatacgtatcggaacactacaaatgcttactaattttcctagattttttaaacccggtgaaaattttttgcagacaccaccacttttgcacttaaaaaaatttcaaaaaaagttaaaaattcatagaaaatttaaattaataggtactacagggaaatcaacgcagagacgcctttccttgacctttttag

SEQ ID NO: 42637 - DNA, 925 bp, Heterodera glycines
ttcatcgaacctggttctttctattctctttcaaatcctcccccattttttttacagcttaactaggccctattaagcttatttccagaaaatctcgcatgaattctcatttttaaattttttatagatttttaaatgtttgcattttttttggcttaccaaaacttcatcgaacctggttctttctattctctttcaaatcgccccaaattttttttacagcttaactaggccctattaagcttatttccagaaaatctcgcatgaattctcatttttaaattttttatagatttttaaatgtttgcattttttttggcttaccaaaacttcatcgaacctggttctttctattctctttcaaatcgccccaaattttttttacagccacgaggccgcgaagcggccgagtgagtaccttgggcgcaggaaaattattaaggaggagggttcattatttatttatttttgcaaaattaattcataaatttttttcagaaactgctctgaaacgcaccaaaatttatttacaagttgaataaggcactctgactcttatattatcaaaaagggagatgaataaatattttaaaaatttctaattcctttttaaacaggccgaaaaagtttaggcttaactttttcagcgggtttaaaaaatctagaaaaattagtaagcatttgtagtgctccgatacgtatctctgcaaaatttggtgagccgctgatcaattacaaattatttatggacgatcaaattttttgaaatttttattaattttgcaaaattaattcataaattttttttcagaaactgctctgaaacgtaccaaaatttatttacaagttaaataaggcacactgactcttatattatcaaaaagggatatgaataaatattttaaaaatatgtaattccttttta

SEQ ID NO: 42638 - DNA, 1232 bp, Heterodera glycines
  unsure (1)..(1232): unsure at all n locations
gatgcagtcgcggcgttgacanctgagatggacccaaagtttccataatatctttccataaggctggaaaggcagaattgaatggccagtcgatatttacactgagcacccgttgaagcgggtgatgcgaagccatagcaaactgtattttaaattctggccgcaattctaccaaaaacgtgtttagaccgcagtaactcggctcagagtgaagattaagggacgcaaaagagacgatttaaaagcgattcgaaaattctatcgactgatataataacgatgcagtcgcggcgttgacaactgagatggaaccaaaagttccataatatctttccataaggctggaaaggcagaatttgaatggccagtcgatatttacactgagcacccgttgaagcgggtgatgcgaagccatagcaaactgtatttttaaattctggccgcaattctaccaaaaacgtgtttagaccgcagtataacgatgcagtcgcggcgttgacaactgagatggaaccaaaagttccataatatctttccataaggctggaaaggcagaatttgaatggccagtcgatatttacactgagcacccgttgaagcgggtgatgcgaagccatagcaaactgtatttttaaattctggccgcaattctaccaaaaacgtgtttagaccgcagtaactcggctcagagtgaagattaagggacgcaaaagagacgatttaaaagcgattcgaaaattctatcgactgatataataacgatgcagtcgcggcgttgacaactgagatggaaccaaaagttccataatatctttccataaggctggaaaggcagaatttgaatggccagtcgatatttacactgagcacccggtgaagcgggtgatgcgaagccataccaaactgtatttttaaattctggccgcaattctaccaaaaacgtgtttagaccgcagtaactcggctcagagtgaagattaaggaacgcaaaagagatgatttaaaagcgattcgaaaattctatcgactgatataataacgatgcagtcgcggcgttgacaactgagatggaaccaaaagttccataatatctttccataaggctggaaaggcagaatttgaatggccagacgatatttacactgagcacccgatgaagcgggtgatgcgaagccatagcaaagtgtatttataaattctggccgcaattctaccaaaaacgtgtttagacc

SEQ ID NO: 42639 - DNA, 1179 bp, Heterodera glycines
cccaacccactaaaaacatatttaataaggcacattatttctccccgacggaaagtgtggcgatgatacgggccaacggacattgtcggggtgctccatcttagcaaaaaattcaaatttaaatgtttgaatttggcatttgtgccgtgccgaccaaatcccaaagtttgcgctggaatttgttactcggcttccgatatgccgactgaacgcggcagccttcgctctcgcaaaaatttgcccacacgtcgtctttcaattcgtagaacaccaactcgtcgatgaacagctccaccgggatggacgcctgacaaagacaaaagaaagattaaaggttaaagccaaacatttaaattaaaatttaatgaaaatttctaatgggagtaaaaaggtatttttaatttaaaaatattatatttttcattaactagcaattaaaaaaaatatattttggcacaaaaatatttgaatttacttatgaaatatattttataaaagtattcaaaaatattagacttaatttcataaaaaaatattttaatttttaaattaagaaattaatgacctattttattaaaaaaacaatcagtttatatctttccgtttattagttaaaagaaaataatttcgtcaagaaaactcacgggtctgatcacttgtccgcccgatctgtacacgtgcagaatcgcttcgaaactaagaaaatttaatttaatttttttaatttggcaaattgacaccgcaccattgactgcttcggtcgaggaaaatctcatgcaattggtcgttccacagctccttgcgcttctccggatttcccagcaacgagtcggggaaacggcgtaaagtgctctcaaaagtcttttgggaaattgggaaaaattccgtaatttgggatatggccatttttcccggccaaaaaatatggaaaaacaaaaatggcatttgtcgtgggcaaaaaaaaaatatatatatttgcccgagggcaaaggagggcgaagggatcagttccgtctgagccaagtttagagcatcataacttttttctttgttgaccaaatccaataaagttggtatcattcgaaagctcttaacaagctctatcggcttcccatagatcagataaaacgacatataaaaaagttataaattaaaatatgcaaaaatactgactttttg

SEQ ID NO: 42640 - DNA, 844 bp, Heterodera glycines
tgtgcgaacgaactcatgaaaagcataatgaggttttctcccccaagaattttagaattttaaaaataattatttttaattctttaattgtatttctaatttgttcaaatgttggaagaaatgtccgaaaattagtttggaataagcttgggagcaaaattctataattaaaaaaaacaaaattttgtcaaaaaaacaaccatttttttttggtaattaattcttattttatatagatgaaatttttgatttgtcaatggtaagaacaaaaaaatttggaaagattgaaatgatcacaatttatgcataaaatcatgtttaaatttttattaatgaaaataattataatttaaataattaaagcgctttcttctatgcttttatgttaatttatatattatagtttcaaataaaattttaatgtttttaattcagaaaattagtagaaatgattcagaatttctgtcaaaaatatataaaattcatgaaaaatttttttatttttagaaaaaacaattttctttaaaatctcggcttttttattgtttaaaataaatattttaattcaaatttttaaaatttttaactcagcatgaatccctgaacaacccattatggaaaaagttggaagacattctcaactttttcggcattcgtggagcacaacaggacgacacaaatcgtacaagcggacttgaggaggaaggctattgggacagagtgttgggcaaaagcgatgctttcaagaagcgaaatagtgctgacctgcaggagagggctgagaagcagataaattgccaaagcatcaaaaccctgaaaatccacaacaaaatgcccaatgcgc

SEQ ID NO: 42641 - DNA, 959 bp, Heterodera glycines
  unsure (1)..(959): unsure at all n locations
ggggttgaaaaattttgggggttggggggcccaaaccgttagttgatagaatttgtcaaagtgttattttttatcgcccctttaaagcgctatatagaaaagatacccgtttttggaaaatttttttcactttttttttggtaaatttttttttgtttaaaaagtgatgaaaccaagtacccgggggttttagaggtcgctgatcatgaatatgacaattatttgggcctattaagaaatttggcgctagttataaagtgacagatttttaattttatcaaaaacaaagggggacccttttgttttgcaaaaatttttgagataaaaaatcgtgaatatactttttattcaccataattgtaatagaatatcttgaaactttaaccatttgctaaaaaaagttaaaaagcatttttaaaaaaaaaatattgtcattaaataaaatgtttgaaagtattttcaaaaacggtaagattttatatattttagccttgtttgtctttgtgctttagaatgataccaaaaagataggatttcttagcacatgcacgaagttacagtataaaacactgggattgacaactgattggaccccaaaaactcaattgngactcataaaagtcgattggactcataaagtgcactagagccgaaattatgataaaaattgaacaaaacgaacaaaatgaaactatggtaattgataaaattggtgaagaaatgggaaatggtccaattgatcaaatgggaaaaaatcagaaataaatcaaaattaatcaaaatataaaaacgaagaaaatgatcagcaaaagagggaaactgttgaaaaatttgatgcaattaaagaaaaactgagagaaaaggaaacatatgcaaggaaagaaagaccaatgcaaaattgagacaaaaattggaagaagatgaggaacaaatagaaaattaatacaaaaatggaaaaa

SEQ ID NO: 42642 - DNA, 961 bp, Heterodera glycines
  unsure (1)..(961): unsure at all n locations
ctctnnagagtcggaattaaaaatcagatttattttttttaatttgttgcccggatacaccttaattgggtatttcgcctagaaaatagagacaggaaaaattgcactttttattattgatttttcttaataaatcattaaaatttcaaaaaaaaattttccggcggtgcctatcggctccgccggacaagttcttcgggttctccccccctcgaattttttttctggctattgattcttataaatgttgaaataactagtatataaatccaattataatgatcagactttcaaaaaaaattacaaaatgaacctttaaattcaaaaaaatgaatttacccaattataatttctttgtataattcaaatttaagaaaaaaattcattccaaaaatctgtttttgattttcattaattcactatttaaaagctttttaaaattttgacaaaaattgatttttgaaaaataaggattgcggatttccgtaattgaaaatccagttgcgcccagccctggtgagggcagacgttgggtgctgacggtcaccgccgtaaaaagtgtattttatttattctcttaattattatttttattcaagaattaattaatattttttttagttttataatttaattaatcaaatctttgcattttcaattattggtgatttttttaaattttagacttattatttgtttataatatgtatcctgtgggtaatgcttataagttcatttgtgtgaattaattgaaattaaattatctctcaacacagtattcattttatttttattgttacaatttgatattgaatatatatgcttttaatagttcaaaagtttttaaaatttaataaatggaaaatctagacatctaaaaatggaaaatcatattttcattgatttgactatattcaaaattcaaatttctagaaaattacgttttaagcatttaataatt

SEQ ID NO: 42643 - DNA, 962 bp, Heterodera glycines
  unsure (1)..(962): unsure at all n locations
ctaatagcttttcttttcgaaaagagaggcgaggaatataaaggttgcatccaaatgtaatttttttttacattgaagcatttggatggcttgctgtttacagttggctaagtcttctttgcaagaagtagcacaacttttgtttgggccaacgaccccaaaccattcgaatagcaatcgattgggctgactagactgcatatttgcaggaatagcaatggcaggtctatcttaaaggcctgacgagttatgtttcgacaaacatcctgtacaccataaatcgatttgcaaatttagtcgaactatataaatttttcaaaaaatgattcatcttttttatggttagcgcatatgtctctagctttatagaaacggtccccgaatctgcgaggaactactttttagagaatttctatagattattattttgcatgaatccttcgcttaaattcccatttatcttataaagtcagattaaattaattaccccgatttgttttagaattggtccaaacacgcttgctaatagcttttcttttcgaaaagagaggcgaggaaaaataaaggttgcatccaaatgtaatttttttttacattgaagcatttggatggcttgctgtttacagttggctaagtcttctttgcaagaagtagcacaacttttgtttgggccaacgaccccaaaccattcgaatagcaatcgattgggctgactagactgcatatttgcaggaatagcaatggcaggtctatcttanaggcctgacgagttatgtttcgacaaacatcctgtacaccataaatcgatttgcaaatttagtcgaactatataaatttttcaaaaaatgattcatcttttttatgggtagcgcatatgtctctagctntatagaaacggtccccgaatctgcgaggaactactttttagagaattctatagnatattattttgcatgaatcct

SEQ ID NO: 42644 - DNA, 780 bp, Heterodera glycines
aaaatttataaaaccctccaagaattttcccggcgacgtctatcggcaccgccggaccccgctaccccttccggttccccataatttttgaaaaaagcgcgccactaaaaaggtcttttgaatagcaaaaaaaaggtcgcaaaaaggtggctcaaaaaaaaggtctgcgccggtgaaaattgtgggccttcgtactcagctaatgatgcctgctgggcattaatttattttcatataactttttctaaagtgaaccaaattttttaaattttgcaagctaatagagaaaaagcttggctatcgaatggtactaaaaatgtaaaatttgattgtctttaagcaaagttatgccatgttttgtcgaaaaattcgctaaaattgacggattttatgaaacgacccagcacggaaaaagacagacatttacacaatgacaagacaaatggcacacactcagctaatgatgcctgctgggcattttaattttggaataattcgcgaatgttcgatgaaaatcaaccccttcccccctcacctatacgaaatgtcgtcgtcctcgccgccccacccccaataatcgttggagtaaccgttcacccgctcgaattgtttgcgcgtcatcgctgtcgcaccgccaaaaaggtgagcataaggcagcctaaggatggcaccacattaggatttcttccaaataaatgttttccctcgtgcgcgagacgaagtacgaaaagtgcaagtgatcaaattaaaaacaaaataatcattttaaaaattaaaaat

SEQ ID NO: 42645 - DNA, 1009 bp, Heterodera glycines
  unsure (1)..(1009): unsure at all n locations
catttttaaattttttatagattttnaaatgtttgcattttttttggcttaccaaaacttcatcgaacctggttctttctattctctttcaaatcgccccaaattttttttacagccacgaggccgcgaagcggccgagtgagttcattgggcgcaggaaaattattaaggaggagggttcattatttatttatttttgcaaaattaattcataaatttttttcagaaactgctctgaaacgcaccaaaatttatttacaagttgaataaggcactctgactcttatattatcaaaaagggagatgaataaatattttaaaaatttctaattctttttaaacaggccgaaaaagtttaggctaaactttttcagcgggtttaataaatctaggaaaattagtaagcttttgtagtgttccgatacgtatctctgcaaaatttggtgagcccctgatcaattacaaattatttatggacgatcaaattttttgaaatttttttaagtgaaaaagtggtgggtgtctgcaaaaaattttcaccgggtttaataaatctaggaaaattagtaagcttttgtagtgttccgatacgtatccctgcaaaatttggtgagccgctgatcaattacaaattatttatggacgatcaaattttttgaaatttttttaagtgcaaaagtggtgggtgtctgcaaaaaattttcaccgggtttaataaatctaggaaaattagtaagcttttgtagtgttccgatacgtatctctgcaaaatttggtgagcccctgatcaattacaaattatttatggacgatcaaattttttgaaatttttttaagtgaaaaagtggtgggtgtctgcaaaaaattttcaccgggtttaataaatctaggaaaattagtaagcttttgtagtgttccgatacgtgtctctgcaaaatttggtgagcccctgatcaattacaaattatttaatgacgatccaattttttgaaatttttttaagtgaaaa

SEQ ID NO: 42646 - DNA, 944 bp, Heterodera glycines
aatttccgcagctcttagggtaatggaaaaaattttgaagaggctctccggaacggattagcatcggggttacgagatagaaaattgtcctaaaaagagatagccatttttctgagaattaattcacaatttccgcagctcttagggtaatggaaaaaattttgaagaggctctccggaacggattagcatcggggttacgagatagaaaattgtcctaaaaagagatagccatttttctgagaattaattcacaatttccgcagctcttagggtaaggaaaaaattttgaagaggctctccggaacggattagcatcggggttacgagatagaaaattgtcctaaaaagagatagccatttttctgagaattaattcacaatttccgcagctcttagggtaatggaaaaaattttgaagaggctctccggaacggattagcatcggggttacgagatagaaaattgtcctaaaaagagatagccatttttctgagaattaattcacaatttccgcagctcttagggtaaggaaaaaattttgaagaggctctccggaacggattagcatcggggttacgagatagaaaattgtcctaaaaagagatagccatttttctgagaattaattcacaatttccgcagctcttagggtaatggaaaaaattttgaagaggctctccggaacggattagcatcggggttacgagatagaaaattgtcctaaaaagagagccatttttctgagaattaattcacaatttccgcagctcttacggtaatggaaaaaattttgaagaggctctccggaacggattagcatcggggttacgagatgagaaaattgtcctaaaaagagatagccatttagcatcggaggtaccaaagataaaagtgattaaaaaagacatatgcaatgttctgagaattaattatggatttcct

SEQ ID NO: 42647 - DNA, 1064 bp, Heterodera glycines
  unsure (1)..(1064): unsure at all n locations
ctgactagactccatatttgcagggatagcaatggcaggtctatntaaaggcctgacgagttatgtttcgacaaacatcctgtacaccataaatcgattagcaaatttagtcganctatataaatttttcaaaaaatgattcatcttttttatggttagcgcatatgtctccagctttatagaaacggtccccgaatctgcgaggaactacttttttgagaatttctatagattaattattattctgcatgaatccttcgcttaaattcccatttatcttataaagtcagattaaattaattaccccgatttgttttagaattggtccaaacactcttgctaatagcttttcttttcgaaaagagaggcgaggaaaaataaaggttgcatccaaatgtaatttttttttacattgaagcatttggatggcttgctgtttacagttggcttagtcttctttgcaagaagcagcacaacttttgtttgggccaacgaccccaaaccattcgaatagcaatcgattgggctgactagactccatatttgcaggaatagcaatggcaggtctatcttaaaggcctgacgagttatgttcgacaaacatcctgtacaccataaatcgatttgcaaatttagtcgaactatataaatttttcaaaaaatgattcatcttttttatggttagcgcatttgtctctagctttatagaaacggtccccgaatctgcgaggaactactttttagagaatttctatagattattattctgcatgaatccttcgcttaaattcccatttatcttataaagtcagattaaattaattaccccgatttgttttagaattggtccaaacacgcttgctaatagcttttcttttcgaaaagagaggcgaggaaaaataaaggttgcatccaaatgtaattttttttacattgaagcatttggatggcttgctgtttacagttggctaagtcttctttgcaagaagcagcacaacttttgtttgggccnacgacccncaaccattcgaatagcaatcgattgggctgactagactccatat

SEQ ID NO: 42648 - DNA, 1141 bp, Heterodera glycines
gtcctcacatttttcccatcaatgcgttgcttgcaacacatttacttgatagatctgagaagaattggtaattaggctaattagtagcagtaattagatgcctcttgcgttgcaggatcagcttcagttgtgcagcttgtgcgcttcgccgttggctgctttaataactatcattttttaaatttgaacttttattttaatatttttaattaacatacaggctattaaaaagtaatgaatagcgatggtaatattatattcacatgaaacagtgttaaatgcatgaaaaacatgttttagcagcatgatttgatgaagcttctaggacaaagttccatatgcataatttgttatttgcgtatatttcacaatttatgtgcatatttttgcgttttttcaaaaaaaaacctctattaaagcggcccttttgacctcgaaggaccgaaaaattttaatagactaaattttttgggtattttctcaataaaattaataaaaatagaaacttatgccaaaaataaattttcgttttttaatttcatttatttagaatattggcttctagaaaattaaaaaataatttcgtttttgaaaatttaattaataatttgcgttatgcttcaggggcctaattcgagtcataatctccgatatgacatatcttaattagtttcatctgcagaataaaaaattttgaacactcccgagtcgagactcgagaaaagtctcgggttttcacgaaaaaattttgtgtttgctttcttcctctcacaaggcctaatttcaaccaaattaatatttcatggtgtcattcaatagctgcttatgtgttctctattcaaaaaaattaattttcaaaattttttaaaatacatagaaaatttggttgaaattgggctaagatacgaatttatatgtctcttacatttttttttattttcctacaacttggcagtttttaagaaatgacatagccaccgtgcataaaaagaaattttctgatgagtagccaaccttttttttgtatgttttttccatttctttataataaaatatgatttctttataataaagtagagtagagcgggaccgggaccgggccgggaattcccggtcatccgaggtcccggtcccggttccg

SEQ ID NO: 42649 - DNA, 967 bp, Heterodera glycines
ctcacgggtgccacgcatgcacattcgccaagcatcgggttccaactgttcacgggtgccacgcatgcccattcgccaagccctcgggttccaactgttcacgggtgcacgcatgcccattccaactgagcacgggtgccacgcatgcccattccaactgctcacgggtgccacgcatgcccattccaactgctcacgggtgccacgcatgcccattcgccaagcccttgggttccaactgctcacgggcgccatgcatgcccattcgccaagccctcgggttccaactgagcacgggtgccacgcatgcccattccaactgagcacgggtgccacgcatgcccattccaactgctcacgggtgccacgcatgcccattcgccaagccctcgggttccaactgagcacgggtgccacgcatgcccattccaactgagcacgggtgccacgcatgcccattcgccaagccctcgctttccgactgctcacgggtggcacgcatacccattccaactgttcacgggtgccacgcatgccattcgccaagccctcgggttccaactgttcacgggtgcacgcatgcccattccaactgctcacgggtgccacgcatgcccattccaactgctcacgggtgccacgcatgcccattcgccaagccctcgggttccaactgagcacgggtgccacgcatgcccattccaactgagcacgggtgccacgcatgcccattcgccaagccctcgctttccgactgctcacgggtgccacgcatacccattccaactgctcacgggtgccacgcatgcccattcgccaagccctcgggttccaactgttcacgggtgccacgcatgcccattcgccaagcctcgggttccaactgctcacgggtgccacgcatgcccattcgccaagccctcgggttccaactgttcacgggtgccacgcatgcccattcgccaag

SEQ ID NO: 42650 - DNA, 965 bp, Heterodera glycines
cctcctcttttcttcatggtttctcttagttagtgctccaccccagtcatttggtgttcccgaaaataaacaatcttgcctttaaaattgagtcccgaccatttcatttttagtgtcattttccgctcctcgcttcattttcatttcaaaaatggcgttaacttttttttgcctcaatttgccattgccttcccttcgtccgacaattcgtgtggaattgagaaaagcatttttacggaatttgcatttgttgagagaaaggagagcattttaatttttaggggggaaacgaaggcaatttttggaaatgaaatttaattcatggccagcagcagccaattatttcttctgctgctgtttatcctccaccttctctcaatccctcttttggtcttttcccctgcccattcatttccctggaagattttggaatattttgccaatttctctgtccttgtattttcttcattcacttcatcaaactcgtgcctttttgccctgtcggatttatcaaatttccgtcctttcctctctcttccctcttccctcttcctccttcctcatcacctcatcatcagtcctcttcccctccccttcccctttttatccgctcacttccccatcatcgcccccggccgcttcttcgcttccgtccagcagttgtcccttccccccccccccaaatcgtcaaaatgtcaaaaacgccaatccttttgctttctccccctcaattggcaccctttttcatttaataactttttttcatttgccatttcaattaattatgtatgattttcctattttctcatccaaattacctcccgcgttgtttcataaattggtaagtgcttttggcgtccaattgcgcgcaacattcacctccaatttcactaaatgccaacattcatcgttggttaatttatttacccattctgttccccccgtcgccgtcggcactttcttca

SEQ ID NO: 42651 - DNA, 1003 bp, Heterodera glycines
tttaatatgccaaaaaatgtaggcttaacttttttattctttttcgttctctcatattttttgctaattgagcagaagcctaccaaactttgcagggatactccccggtaaaggactaacttacactgaaatgagcagccgaggctagctaggctcaaaaaaatttttcgaaaatctgagtctttcagtttttatttatttgcaaaattaattcataaatattttttcagaaagggatctgaaacgcaccaaattttatttacatgttagaataggcactctgatgctttttctatcaataatggaggtgaataaaattttaattgctttttaactttgggaaaaagtgtaggcttaactttttactgaaagattgaacactcatatttttttagtctaatctactcaaaacggttcagaattcaataaaaataacattcacggtgcgaaaaatggggtttgacaagtttattggggaaaaaaagactttacaaaataatacccctgggagaagggagtgggaaacatgatttcaaaattttcaattttttctagtctaatctactcaaaccggttcagaattcaataaaaataacattcacggtgcgaaaaatggggtttgaaaagtttattttgaaaaaaagactttacaaaataatacccctgggagaagggagtgggaaacatgatttcaaaattttcaattttttctagtctaatctactcaaaacggttcagaattcaataaaaataacattcacggtgcgaaaaatggggtttgaaaagtttattggggaaaaaaagactttacaaaataatacccctgggagaagggagtgggaaacatgatttcaaaattttcaattttttctagtctaatctactcaaaacggttcagaattcaataaaaataacattcacggtgcgaaaaatggggtatgaaaagtttattggggaaaaaaagactttacaaaataatacccctgggagaagggagtgggaa

SEQ ID NO: 42652 - DNA, 928 bp, Heterodera glycines
ccccgaaaaaaaaaaatcgattttttcaagtgtccgtctcgccctactcaaacaattatcggggagcaaaaatccaaggtaacaataaagtagaggtatatcgaagctattcccgaaggattcggactccttataaatctgggcgcatcggttcggggggactgccccgaaaacaaaaaaatcgattttttcaagtgtccgtttggggtactcaaacatttatggggagcaaaactccaacgcagaattaaagtacagactatagggaagctattcccgaaggattcggtctccccataaatctgggcgcatcggttcggggggactgccccgaaaacaaaaaaatcgattttttcaagtgtccgtttggggtactcaaacatttatggggagcaaaactccaacgcagaattaaagtacagactatagggaagctattcccgaaggattcggtctccccataaatctgggcgcatcggttcagggggactgccccgaaaacccaaaaaaaaattttttggataaaaattatttaaatgaactgactagataatatttaaaataggttatttctcttcctttcagtatccctgcaaagtttggtgcgcttctgatcagtttctgaaaaaaaagttaagcctaaactttttggcctgtttaaaaaggaattaaaaatttttaaaaattttattcatctccctttttgatagaaaaagcatcagagtgcctaaactaacatgtaaataaaatctggtgcgtttcagaaccctttctgaaaaaatatttaagaattaattttgcaaaaaataaataaaaacgaaagactcagattttcgaaaatttttttgagccagctagctcggcgctcatttcagtgtaagttagtcctttaccggggagtatccctgcaaagtttggtacgcttctg

SEQ ID NO: 42653 - DNA, 689 bp, Heterodera glycines
gggttgctccccgtccccgagctccccggtcccccactccgatccccgacttttttgggcctattccccgccccgaaccccgacatgtcgctccccgaggttcccggcccccgactttttgccctccgactccccgacactaattcggggaattggggactccgagcattgtaaaaatttaaaaagttaattcaacaacgaaggggggaaaggttgaaaatttatgaaattttgaacaattttcttaatattaattaattaaaaattccgaaaaacttttggtcggcacctatcggcaccacggtcccccaaaactccaatttttttttttgcaaaaaattgtcccaaaattgcaaaaattattattttttaggataaatctgttagggcaccgccgggaaaaaattgatatttgaatacaatacactgtcagattttgtccaaaaatgaccaatttttgcaattttttgagccagtttttttaagaaaattaaggattttaagggtccggcggtgccgataggggccgccgggaaaattttcgaaattttggctatatatttagcagattttgaataaaaattattaattttaccaaaaaaaaactcaattcataccagtgcatttttactcacgtttttttagtatcaaaatatgaacattttacaacattttttcaaacatttggg

SEQ ID NO: 42654 - DNA, 756 bp, Heterodera glycines
  unsure (1)..(756): unsure at all n locations
ccccccattttccctttctctgccgatcacagatatgagccgttggactttcacactgacatgtggtgagtgaggcctttaaaaataaataaaaattgtgaatttccggctcaaaatttctataggttaaccccctggatttttttttggagggggggggggacccatgaaactgtcagcaaacattaaaaatcccatcaaatatttggacaatttcccctcacattttcaggtccctcggcgtgatcgcttacattctgttagttttttcttaattaattttttttatgcattttttaaatgtttccatatttttttttagcctttcgggccaatcgccctttttgggcgaaactctcgcgcacacttattgcaatgttgagcgtggcaactggatgttctgtgaaggtgtgtgtgtgtgtatggcatgtgccattcatgtgtctgtatggggtgcactgtttttgccgtgccccgccggctgcatcatttcctcgcaacccgaaaatttttcaaaaaactcaaaatcgttaatttaataaattcttaaagatttttaaaattaaaaaaatcgaaaattttttgccttttaatggcacacaattcgagaattttctattaagcctcgagactgtagtgtctcttggcccgcatattgtaatattttttgttatggacaaagggggatttgatgaaccctacggtattgccccattaacggttgacggatgcggagggnggggggggggggggggg

SEQ ID NO: 42655 - DNA, 1465 bp, Heterodera glycines
  unsure (1)..(1465): unsure at all n locations
tttttggttctttaactaatagtgtttaatggatttaggagccccaacttttctggtttcaaaaatggatgaaatnnatattnttccanaattcattattcttttgatttttttattagagtgtcgggttttttagggtctcgccgggacaaatctcgccgcaaaaattnaaaaaaaattcaaaaattgaatttttcaaggaaaaaatcttagaaaaatttattataagaaaatataagaaagaaaaattattgttaagtttttcttgaaaattgcgcggccaaatttggaagttccatggcataaaaaagcaattttttctaaattttgaaagtttttacttttaatagaaaacttttggttttgtgtagcagtctctaagagattttggtcaaaaactttttgtcaaaaacttattgtaaagatttctcattcgttttttggtgcaaaagtgccctttttagggtttttgcttttttgttgaaatttattagaattttcacaacagcttagcaaaggaatagttttttttaaatattgtgtgcccaaaaaacgcgctccagttttaaataggctatgaaaataaaaaaaaactttctgaattcggcgttttttctaagggacagaggctttttgctgcaaattttttaagatttataattttcatgactttttcagcacgtgcgcaatgacgtttggatggacattttcccttttttggccatgctcaactcggcctcaaattcgcactgatttcgcttcgtttcaatgcgttggtggacaaacattttcaatggcaaaagcggatgctgcgcaagttttaatttttttcaaattaaccggtcaaatgttttataagctctaaaaatttttgattgcattcggcaattaataaattcgaaaatgtaaacattttctttgttgaaaaaccttttattttaaaaaaactagcaatttaatttttatgaaaatcaattattgtgattttttgaaaatctcaacattgatgggctaaaaccattccatgcagttaattttttgtgaaattaaaaaattctcacaggcaattgccgtttggccggttaaatctttaaaatttatctatctctgatgaactgaatagaacaaggaaaaatttttagatgtaatatatgaaaaattatggcaaagtgtatactaagtgaatagttatactaacccaaatctgaggttggttaggaataagtttcgtacactttggcacgcataagctcctaaatagaatttaagaagtctttacgcttgactgaaacttaaatgtgtacttaaaattattttataaatattattgaagtcaattgtaaagatttctgtccttatccccatttgagactcacatttatttgtttcaaaatcttatcggtctgctttgcgaccatgatgagatttttgcacgtgccggtctgcttagcgaccatggcaacat

SEQ ID NO: 42656 - DNA, 1137 bp, Heterodera glycines
ccttaaagcaatgtcatttttacattacaaaatggattctcacaccagcctctttcctgaatgttcacttccatccgaagtctttggacctctgccaattgcactgcttcctccaattcttccacctgcatgcgcaagtcctccatctccttctccatggcacgcttcgacttctccagctcgaaagtgttcttgccaacgtcgtccttgttggtcaactacaaaacgcacaattttacttcaaatattagaaacatgaaagtgcccgaacatccaatccagcaaagaaaaaaaaaaatttcgggagagggatgtggcaccatccgtgtcatgccgttcacgccaaaaaattttctacttaaaatttaaaaaattcggttataatttgcatacgattgggaaatgcaagaaattgttcaacttaccgaaatctctttatttgatacacagtttcaacccgtttcattatatattttttggcacttttccgtttgggggccaaacattcaaatttgtgtgaatagctttttgttctcggacctcttttcatcatctcttgcacccaattccttttgattttatagcctgtccgaatagacttaatcgctgtttttgaatatgatgcttagatcatagaacgcatttttatataagaacgcaccccatctgatattcccatttttctgtttctcaactggtccacgtggactgcgctcattgactctttagctgcccccttaaggtacttggactttccacagtaaaatgcggcgcggattttggaactgccccccctcgcttgggggcctactagcatttgtagcgcaataaaaaaatttattgctttcaatttttcacctcttgtttaaaagagcccacaatcccgcgtccaattttaaaaacgaacatagtgcaccaaaagaagccgcctcacggcggggcttaaaagcattgtacatcataattaaaagcgaatataattttcgtatattttttcacaatttattttcaaagacaacaaaaaattgataaaatgttgaaacgaaatagagcacaaaaagggaggggatgcttagaccaaaagaggaatttttagaaaacaacgcaccccatctgaatattcccatttttctgttt

SEQ ID NO: 42657 - DNA, 933 bp, Heterodera glycines
tcaattggagcaatattttcggcatgtagtgctggaatttctgaattctcgaaaactggcatcttagtgagaactgaaaacggtacgggagaattacaaaataagtccccatttgcgcttaaaagggtgagaaatgtcaattggagcaatattttcggcatgtagtgctggaatttcaaaattctcgaaaactggcatcttagtgagaactgaaaacggtacgggagaattacaaaataagtccccatttgcgcttaaaagggcgagaaatgtcaattggagcaatattttcggcatgtagtgctggaatttcagaattctcgaaaactggcatctttgtgagaactgaaaacggtacgggagaattacaaaataagtccccatttgcgcttaaaagggcgagaaatgtcaattggagcaatattttcggcatgtagtgctggaatttcagaattctcgaaaactggcatctttgtgagaactgaaaacggtacgggagaattacaaaataagtccccatttgcgcttaaaagggcgagaaatgtcaattggagcaatattttcggcatgtagtgctggaatttcagaattctcgaaaactggcatctttgtgagaattgaaaacggtacgggagaattacaaaataagtccccatttgcgcttaaaagggcgagaaatgtcaattggagcaatattttcggcatgtagtgctggaatttcagaattctcgaaaactggcatctttgtgagaactgaaaacggtacgggagaattacaaaataagtccccatttgcgcttaaaagggcgagaaatgtcaattggagcaatattttcggcatgtagtgctggaatttcagaattctcgaaactggcatctttgtgagaattgaaaacggtacgggagaattacaaaataagtccccatttgcgc

SEQ ID NO: 42658 - DNA, 1027 bp, Heterodera glycines
  unsure (1)..(1027): unsure at all n locations
ataaaatagagaagtatnnatatagnnaatggaaagaaaggaaagctaatgnggatatggttaataaataaaagtatattaaataataaataaaatgaaagtttccttctgatcagtgatcccgaccaaaacgcgactttggaattcgaaattgaacggaacgcattggtcgaagttaacccgcaaaacggcattttgtcactaattaatgcgaattggcagcaccaaattgactcggagcagagcatttgcgtgtcaggtcaaagaatcaaacggattttgatgaagcaaagcttgaattgaatttttgagggattttgggacaattggcaaaaataattaaattggaattttacgttttaacgagcaaaacgatggaaattgaaaacaatttagaaattgtggaaaaatgccaatgctaaatttgtaaaatttaatttatttcagacggaccaaactcagtttgtgccaaggcattgtttcatttggtgaccgtttccaccgaaatactcaaaaagaggtgagacaaatgacacggatatttaaattgaacagcttaattgccagtgccgtcagtgttttcgtggaaggcatttcaatggacgaattgctaagcgtcgccactttcctccgatttgtccaggccctttcctcgttgtgggattgggcaatgcctgaaaatgttcaaaatgccgaaaataattttgtcaaaaactaaatttatttttcagtttcgcgtgttcggcatcgaagaactcgtaaggaattcgaatggcacggaattggccggcactgttctcaatttgttcgtcgctcgcaatttggaaatggacgaagaatcagtgacgacgacgatcaggtggagaaattcattgcacaattttgctatgccattctctttctttcgttttggcattttgtccctttttttgtttcatttgtccccttttccgatttccgattcccccattttattttatgcaatttgcccccccccctatcatttgccattcgtccgtccgtcgct

SEQ ID NO: 42659 - DNA, 920 bp, Heterodera glycines
atttttgtaaaattttattttaagttggtgccatttcttaatttctatcccacagaaaaggattatttgctggaattaagttttattattccttttaattgaaatgcgatgattaattggcgcttttttgttggattcctcaaaacattttgtgtaaaatcaccaacctggcgcgcaccacgcgcacacggcgctcgtactcctcgtcattgccgtccgctggcggtgcttccgttatgcgctcatagctgccgcgtttgtgtccccctccgtgtttgtgtgctcttccgcgttcgtagcttccgtctccgcccacggaagcgctgctttcgccatagccgtacccgtgcttgtgtcccgcttttccctcttccgctgagccgtgttcgtagctgccgtacttcttgttgttgtggcctgttttgctgcttgtttcgtaacttccgtctttgtcccgaccgccgtgtgcgccgctttcgtcactttcgtctccccctcccccgtgtcggttatttccgtacaaatgccgatgcttgtgccctcgtccgccgtgtccatgccctgcatacctatggccaccttttccatgtttgttgttgtggtaatggttgagatggtgccggggctggtacttgtcctgttccaacttttcatcgtgctcctcttcgccctcctcataagttacgcctttgccaccgtcttctgttggctgataggtatcgccgtcatcgccgggcgatggcgggcatttgccgggctctccggccggacccgcgggcccgggaggaccggcatcgcccggggggcccgccgggcacttgtcctcgtaatttgcgcgaacagctcgggtcagcagaaagccttccttcattttttaattttaattattttctttaaattaagctcacgcttttaccttc

SEQ ID NO: 42660 - DNA, 879 bp, Heterodera glycines
cgattattgccatgggcgctcttacccacagaccctcaccctagatacccaaacggtaaatttgttcgtgcattccctctaaggaatgaagcggaggggttttcgaattcatcagagagtaatgggattacttttgcccaatatggaagaactcattgcatttatgtgttcaatatgaccaacagcggggacgatcaggcggcattgtttgatctgataaagaatgggaccaccgcggtgagcatcaaatttaaccacccagtacccgatggaggaataatgctagtggtgatgggagaatgtgactctctggtgatgttagacaaaaaccgatcaataagcactgacaccactatttaaaccaccccgcattgtcatttcattaaaataaacatgtcatcaaaaaagctgcctctaattttacttttccttcgcatttcgattcccgtaactgcatatagagaagaggactcttcatattcagaatatttaagaagaaggacattatctaggtttactagcacaacaacaacaacaacaacaacaacaattactcccaataccacaccaaatgtgacaacgcctgtactaccaaagcaagaaaaactaattgatgaacatgtctctgctgttctcccaccacttattcgattgtgcaaggacacgccggaggaaagcagcatattccatcaagctatttgttgggcccttttcactctctatttaatgttgatcatcagtttggtgttgcatcaactctgttcaattttttggctaaagtatggacagcgtacgaatcacaaagattttgagcgaaaatcgtcggacagagcgagtatttcggggttgctacgccagtgaccaattgccgacgcccac

SEQ ID NO: 42661 - DNA, 961 bp, Heterodera glycines
taaccccctcgaatataagcccgccccatttggagtgcttccaaaatgaggaaatacggtccctctgattgtgaaggacatttaggttttgtgtaaaacatttccctgtttctgcatattttttaaattagctttctatttttttatttgacttttgtgtgacttttttcgatgcttcttccgtcgttttcggttgctttattcaaccaatctctctttcttggtaaatttaaatacatatgactcgactttcaaataacgttcccttttttggcatttgtgccgttctttcgcttcccattctttgccttctctgagatcattccgtccgtccgtttcgccaatgctttcctttccctttttgcttttccattctttcttttatttatttctctccttttctacaacaatgccttcttcgtaattgacaccaatctccacaaattctgcttcaatgtcccccctttcgtcgtgccattcgctccctttccaatttcttttttgtccgtctttttcattgcttccggcagtgcgatctttgctttgggaattgaaggggaatttcgtgccgctggcaatttctgctcgtggcaaaggccctggaggatggccaagtcgaacacttccttcaaattgtgctgagtaactgcctttttgaaatacaccaataaataaatgtccgttcgttttgagtctctccctcagaccgaacattccagccaactgctcagttcaaatctttcgctgagttgtgccattgcctttgtctcgacagtttctgatcggtgactgatcagtcgtcgatcactttgagtgccgatgagcaaaactaagcaaaaaataactactttattgtgaattttgaaatgaaacaaactgggtgctgagggagccaacgaacgaatttcaggaagccaccgttgtgtggccgaattgagggaggagggacgggtgacactga

SEQ ID NO: 42662 - DNA, 788 bp, Heterodera glycines
cccatttggtggatttaggaaacgcgcatggttagaaacccatttggtggatttaggaaacgcgctgccaccccattttggcggatttaggaaacgcgtggcggatttaggaaacgcgctggcggatttaggaaacgcgcatggttagaaacccatttggcggatttaggaaacgcgctgccaccccattttggcggatttaggaaacgcgtggcggatttaggaaacacgctggcggatttaggaaacgcgctggcggatttaggaaacgcgcatggttagaaacccatttggcggatttaggaaacgcgctgccaccccattttggcggatttaggaaacgcgctggcggatttaggaaacgcgctggcggatttaggaaacgcgcatgggtggcggtttttaggaaatgcaccagcaccgttttaatgccatttatttaatgccaaatcataagtttgattaaaattcacaatatgtttttttaatttctacatcagcatttttcagaatacgagcattagagcacattaataatgacaataaaatttggtgcgttttttctgaaaaaatatttatgaattaattttgcaaaaaaataaaatataaaataatagaaaactcgaattttgtcgaaattctcgtaaaatcaaatttgtggaggctcctccacaatttttaaaattttttaaacccaataagcgttgaaatattttttaagttagtcctgtaccggggagtatgcctgcaaaatttggtgcgattttattaattatagaaagggttaa

SEQ ID NO: 42663 - DNA, 1710 bp, Heterodera glycines
acttcatcgtcacgatatcgcgtgagcaaatttggcactctctgaattcttcgccaaattgcttgtccaaagtgaaacaagcatccggttcttatggaatttggaaagacgttgccagctgcagtgatcgctcccgattcgaaatcgctcataatacggtacgggaaccaattattgccaacagactgacgaattgtttcgaagaatcttgtgtatgtggcgagagttttgctgggcagtaaaccataaactgccggaactgcacaatgatcgatgacaactgccattgtgtagacttgagtaaatccccttgggcatgtctaagataaaaacaattttacttattttgtggtatattggtagcggcacattttatatgcctctcgccactatcctttttggcttagctacttttttgcgggatttctgcattaggctcccgtaccgcgaaattctcacacaattaatttttaccccagattgctttaaattttctttccttaaaatttattgttttaaattaaaaatttacatatcatttgagcgttaggctacatcaacgattttccgagtttttatttcccagattctattaccgtccgcatttataccgaataaagccgcttaatttgcaataaggacggcagataatttatagattagaaagagaaatgcaagagcactataggtacgccccagtgagcagagaaaagcctagtactatctcgtcgtttttctttttctttgtgatttctctcactttggcgttctatctcttcattttaattatgtaaaaaacaacatttacttcgccacacataacttttttttctactcatacaattttcaccaatttttgcatatcgatagagaaaaaaattctgcatcgattaataaggaaatttaatacaaaaataaggccaactgtagagtttatgggataataaatttgcatttctttttctctccttttggcgtactattttcatatctctaacacacgaaaaaaaatagaaattcgtaaattctaacaattttcattataagggtacaaaatcactttgaacatttagaatcaatagaaaaaagaataaatttagcatttttggtgaaaacagcagtttaggacttgagttataacgtgataaaaatttgaaagtatcacaacttttttctgagatgtcaaattgcttagcattcgcttagaaaaagattctccttttcaaaaacttttttagataccaaatttgttcagtttaattgggaatgaagcgagttatggcagatcaaaatacaaaaaggcattttccagtgtaaattttgaaatagcgcgcaaaaaattacgccaaatgcgctatttggcgttatgagcaattttgtctgccactggggcgtacccatagtgcaagagctgcacttgaatcatcaatcaattatgcaaaattctcaaaaaaccctcttgaatgcaacagtttcaaaaaaattataccgaaaattaattttttgaacgaacaaaattttgggatttaaattttttcaaaattttttgaatagtcgttctgctttgttcatgaatcatgataagctaaaattgtattcaaatttctgcaaaaatttattagcgaagaaacaactgatatgaataaactttttaagtgattcagcgttaaaattgctaatcgaacaataaataaaaatatttaaatatgg

SEQ ID NO: 42664 - DNA, 877 bp, Heterodera glycines
taattagcattattccaattaaattaaaataaatacttaaattatgcaacataattattaaaaatatttataaataaattaacaaaaatatctgtacaaaattggatgaaccatctcaataactaaatagcataattaatctagaagaatttaacttttataatgctttatttaaatttaattatatatttataaatatttacaatataaataaaaaaatttactttttcaatctcagtctgataattttgttgtcggcgatttggttcatctaaaaaacgcaaaacaaaggtatataaataagcatgcttaagaacataggcaaaacaattaataagtaaatatttgtttaaaaattaaattatttttaatcattaaatggttggatgcctatgaggaatgcggagaacagttcaatcaaccaaatgaatacattaggaaagaagttactgtccaactaatgaccgatcaggtaattgaaaaaaaaattgttagtttataaatcaattctatgggcttaatacagggatgtaatctggtatttaattttttattttattttttctgacgaaaatttttttcaaagtccagccttttttcaaatttatctcccggcagcgtttgttagcacctagagcaaaacgagcccaaaatttcaaaaattttctacgacggtttgagaaaatttttggctatgaaaaattccaattatgtctattggttacaaaatcatggaaatatacccatgttggaaaaattttcgaaaaatttcacattattgttccgaaattttgggttgaagtcccgtaaataatttcaaaagattttaattttcaagaggcctcgcaaaagtttcttgcctcaacttatgtctatg

SEQ ID NO: 42665 - DNA, 1094 bp, Heterodera glycines
ttgcgggggtctgagtcacgggggcgggggtgaggtcaaaaaacctgtcccgtcccctggggcggggctcgaaccctacctttttatcatttacaaactataaaaatttttttttctaaaaaaccatggcgctaagcgcttaaatcccacgggtcgcgcatcgcggattcaaattgccgcggtcgaggatcgtgcaaaaaaatctcgcggtcgcgctccacccctgccgccaaagcttctaacaattgggcgtcgccgggaaaatatgagaactttttcaaaaccctccccctgagtccgtccatggttggaccacccgttgcaccgaacaatcctctgtctgataagaatctgttctttttgaccgaactttcttcacggcaggtactgctccttctgtgcctttgtcacgcgttgtgcacccgccatggaacgccaccgtttgctgtccaaatgcaacgcggcggcaaaggcggcgcggacagtacgcaattttttagactttatttgataaaagttcgccattggaatccatcttttattttaaaagttttcgtttatattatcaaattttgaaaaattttttggaaaaatagtcaaaaaaatttaaggaaaaattgagtatttgtttcaaaatttaaaacaatctgagcctagccaaaaccaattcatcgagaatcattgtgtcaaaatgctttttactgttccattttcagccctttctcggttggacttctccctctgacacttccgtcgcctccctttcgtcgtcgttggccctcgtccagttgagctgtcttctgtgcacctcattccgttccgtcaatgtaaaggttcggacggttttattaacgacaaattttctttaaattttccaaaatctgtcctcaacaaagttcaaaaaagcttgtggccttgggttttctggaccgggattttgtgggatttttatcctcaaaatccccaacctacatgggatccattttaaaagtcaatcttttttgaaaggcgttggaggagcacatggccaaagttcaccatcaaatgccattcttaccgaacatcaagaacaacggaccaccactgatcatcag

SEQ ID NO: 42666 - DNA, 1011 bp, Heterodera glycines
acccgcagcagcagcagaatcagccggtgctgaccatgcgcgacgcggtcatcttcgccatcacttacagcaccgacttacgacccggcatcaaaatgccctactttctcacgctgacagctcgccgagttagagacgggcgccgatttggccgctcggaggagcggccaccgtacatttgcgggggcgcactcgcaacatcacaagcggtgggtgttgttggcacggggcaaaaggcacagggaaaacgaccaaattgaaaagtgatcgctcggcatttgatttctttggcatgtcattctgacttttcagagacttttgtttgcctgaacaagctccgtcccagggcttccgagcagcgggacaattgttcctcgtacagcttcggttggccccctccgccttcggacccattggcggaggagcgactgctcgcccaactgttcctctgcactcgcacgacggcgcgcgttcggcaggactcgctgtacggcgattacacgctggcggccagtcccgcgagcacgcaactgcgcaccactcactcgtcattttggacacaacaacagcagcaactcaaagtgagtgagaacgagcgagcaattgggatgatcaatcattcccattgatcatttattggccaatcaatcaatatttgattggctaattattatttgatttatcggtcaattagtggataattcaatgaccaattcataggcacaacagcagcatcatgcccagcagcgcgacaatccgctgcagcagcaacaattggcaatggaagtcgtcgaaaaggacgaaacgccaaaaagggagccgacactgtcagacagtaagcagcgaacagcagctgaacaataagcagcagcacgggaatgggacgacgaaagtattgacacggacagagtcaatggcagcgaagcagcaacagaacaatgatgacgatgatgatgatggaatgcgcaattgtaaaagaaggatgtgagtcatggggaaaggatgacgaaa

SEQ ID NO: 42667 - DNA, 1059 bp, Heterodera glycines
  unsure (1)..(1059): unsure at all n locations
taactttaaaataacctttataattaatatatcaatgcattagtaatatatatgaagaaacaataatataattaaagatnttatttgctatatgtacatatgaatcaaaaaattatacaccagccacactgggaaaattacatgcatccgggcaagttactgtataaaaaaattagatttttaaaattaagctggaaatatattattatttaaaaattcaataaattgtaattataaaaaaatgcattctaacttaatttcgaaaaataaaatttcaacaaatcacatagaaaacaatttaaaaataaacttagcaaatgtgaaaattttttgctatttcttttgcaatttaattaatgttatgtgataaaaatagtaattcgctaatttttgaaaacaaaaatatattaaattagtaaattataaaggaatgacaaacaccccaaaaaccaattaataaccaaccacctgttgtgatttaaaaaactaaagtaagcaataattttatttaaaacttttttaatagttaattatttcgtaaaaaaactaaatcttgatcaattaattaatatattcataaatattttattttatgtatttaaattttattttagtgttgaaaataattgtatgaaaagtgttaaaaaggactaatggcaaactgaaaaagaagaaaacccgtcgtaacaaataaagcaaagcccattaaataaaagccaaatatagaaaagaaataaatttaataaattattaatatcaaatgactacatttcgaggctgatcatcaatactaccaacggttctcgccatgaaaataaattaaaaaataatttaaataagttatatcaatttaattgataaataataataaataatgaataaaagacacaaatatttattataacatagttaatagtttggggacgtgggtggtaccgttcgaaagctgagctcatttagaaactttttgaccgtcggcttttaaatcgccccaaagaaagtttttagataaactaagttttttgagttagttttttttttttggactttttcgatttt

SEQ ID NO: 42668 - DNA, 242 bp, Heterodera glycines
tttctaggctagaaaatccatttagatttttttatttaaaaattctaagttttagttaaaaattcttcgaaattttttttgtacgagttgccatgacaccaaaaatttatttatagtgcaataattttcgttaaaattgtctattttttaaatttcaaaatattcttagagaaatttttctgtgttttcaacttattggcaaagtcttttttgcttaaattgtttttttacggcgcaccttt

SEQ ID NO: 42669 - DNA, 1392 bp, Heterodera glycines
cgtaacggaaacgacgacgacgcagcgggggcggcggaatgcgcggcaacatcaaaggggagggcgaaattgctttgggccggggggaagccaattttcattggcactcaactccattcatccgccgaagtcgcgaaccgcagcacaaatcattcattctctcattcatctactgttttttttttggaggtgttgtgccgtgccgtggtcaactctttttttgggcaccaattaatatttttgcactctgtcaattatcttttagcattttcatcaaatccgtttgggcggttaattaattaatcatcctgttaaatttattttttaatcatttaatctcattgaacgcactattgtagaattgatctccaatcaatttttgcatacggtcacaattatcttttatcatctttcagtcaaatccctttgaatggtaattaatttcttaattaccctaattagtctgtcaatggatgccatttctgagattgattctctctctcttccgaatgtcgctttttcatcttccgccgatggtttatatatatgattttttccggcccgtcaatttttcgggttgccattttctatttttcttttttcattaattaccctcccagcacactaatgaatggcaccaccaccaccatctgctcctattactgttgctgctttgcaacagaacataatgccaatgcccaatgccacatttttaaatttaaaacaactaccataaacttgtcactcaaaaaatctcttttgtgctgtgccgtccgtcttccgctcctccaatttcgccccgggggaaaattctttccgttttccccattttagcactttctccccccttggccccctcctcctcttcatcatcattcattttcttcctcttcctctgtttgctcttcctccccatcctttgtctttttttcatcccttccttctgctgcgcgtgccttaatgttcgttccttcccctcttccccccccgccccgtccccctttaatatttttgtcatcgccgccggggccatccacttcacacctcctccacccccaccctccttccccacttcatcgtcggtgtccccgcctcgcgcggcgcgacggactgtccccgtccttatcgtcatccgccctcgcattttgccatagtttgttattaccccggcattttcaccccggtccccgtattttgccatagtttttttcggcgttttgaattttattttaccaacccggcatttatcccggtcaccgctttagtatgttttttgccacaatttattaattcgatatttttgtcacattccccggaacttgttttggtcgactcccatccccacattttgcaattcaattgtaaatttatttccctggaatccaatccctc

SEQ ID NO: 42670 - DNA, 928 bp, Heterodera glycines
ctctgtggaacggattagcatctggggttacgagataccatttgttctaaaaagagatagccatttttcgtgagaattaattcacaatttccgcaactcttgcggtaatggaaaaaattttgaagaggctctgcggaacggattagcatcggggttacgagatagaaaattgtcctaaaaagagatagccatttttctgagaattaattcacaatttccgcagctcttgcggaaattgaaaaattttgaagagtctctgtggaacggattagcatcggaggttacgtgatagaaaattgtcctaaaaagagatagtcatttttctgagaattaattcacaatttccgcagctcttagggtaatggaaaaaattttgaagaggctctgcggaacggattagcatcggggttacgagatagaaaattgtcctaaaaagagatagccatttttctgagaattaattcacaatttccgcagctcttgcggtaatggaaaaaattttgaagaggctctgtggaacggattagcatcggggttacgagatagaaaattgtcctaaaaagagatagccatttttctgagaattaattcacaatttccgcagctcttgcggtaatggaaaaaattttgaagaggctctgcggaacggattagcatcggggttacgagatagaaaattgtcctaaaaagagatagccatttttctgagaattaattcacaatttacgcagctcttgcggtaatgcaaaaaattttgaagaggctctgcggaacggattagcatcggggttacgagatagaaaattgtcctaaaaagagatagccatttttctgagaattaattcacatttccgcaactcttgcgttaatgataaaaattttgaagaggatctgcggaacggattagcatccgggatactagatagaa

SEQ ID NO: 42671 - DNA, 966 bp, Heterodera glycines
ttcatgaagattttgtgaaaataaatttttttttgtattgttggggaatagccgaggatgggttattattcagtcccaaaaaatattttaataaataaaaaaaacctaaacattttaaaattgacacggaaatttgccatttttacgagatgagcaaatgtaagagttataaaagtcttttttatttcggcatttaattcctctaattcggggattattttcgtgtaatattttttctataaacttaattatctttcatctaaaattgtttgaaatcattaaatcaaaaatcttccaatttgtcataaattcataaaagtattttaatttttattaatagtaatttaaaattaatagagttcgacctggacctggatccaggcctggatttttcctggatccaggtccaggtcattttttgacaacatggatttttcctggaactggatttttgtccaggaaatccaggtccaggtcaatttggaaatccaggtccaggtccaggcttgaaaaacctggatttcctggataaaatttttttccatcttttatggcgaaatgttttaaaatgggtgtaaattcaaaaaatttaatttttttttaaaattttacacatgttaatgaaaattctttttgtttttaggcattaatgaattcttaatttggaatataggcttgttcgaaaaaaataaaattggcaaagttgggatttgcttagtgtgcaaggagcaaaacagacaaaagtctgaattttcaatcaacgacagctcaacgaaaagcctaattgtccatctcaattcgtcgctacacaaaggatcggaatatgacaaaaaattccagcaacttgagacagaatggaaaaacgcaaaacaaaagaaacataaggagcagccaaaaatcgccgacttgatgaacattacttcatcccggtaaaaaggcattaatttaattcagtatcagtaatta

SEQ ID NO: 42672 - DNA, 1114 bp, Heterodera glycines
  unsure (1)..(1114): unsure at all n locations
gcatcagagtgcntaaactagcatgtaaatanaatntggtgcgttcnagagcattttctgaaaaaaatatntatgnaataattatgcaaaaataaataaaaatttctaaaaatttgatcgtccataaataatttgtaattgatcaggggctcaccaaattttgcagggatacgtatcggaacactacaaatgcttactaattttcctagattttttaaacccggtgaaaattttttgcagacaccacccacttttgcacttaaaaaaatttcaaaaaactttaaaaattcatagaaaatttaaattcataggtactactgctaaatcaacgcagagacgcctttccttgacctttttaggcccctgcaaaatctggtgcgcttctgatcactactcgaaaaatgagtgattgaattttcactaaaaagttaagcctaaactttttggcctgtttaaaaaggaattaaaaatttttaaaaattttattcatctccctttttgatagaaaaagcatcagagtgcctaaactagcatgtaaataaaatttggtgcgtttcagagcattttctgaaaaaaatatttatgaattaattatgcaaaaataaataaaaatttctaaaaatttgatcgtccataaataatttgtaattgatcaggggctcaccaaattttgcagggatacgtatcggaacactacaaatgcttactaattttcctagattttttaaacccggtgaaaattttttgcagacaccaccattttgcacttaaaaaaatttcaaaaaactttaaaaattcatagaaaatttaaattcataggtactactgctaaatcaacgcagagacgcctttccttgacctttttaggcccctgcaaaatctggtgcgcttctgatcactactcgaaaaatgagtgattgaattttcactaaaaagttaagcctaaactttttggcctgtttaaaaaggaattaaaaatttttaaaaattttattcatctcccaatttgatagaaaaagcatcagagtgcctaaactaacatgtaaataaaatttggtgcgtttcagaaccctttctgaaaaaaatatttataaattaattatgcaaaaaacaa

SEQ ID NO: 42673 - DNA, 1168 bp, Heterodera glycines
tttttctcaaaaaaatggctagaaatcgcaaaatttggtcattttttggtgcaaatctgttaacaaattacactcaaattttcaaaaatttcccggcggcgcctgccggcaccaccggacccacgccacctccgttctcaaaattcccaagagttttttggaaaaagcggttgtgaaaagtaaaaaaaaattttttgttgatctcgccgtgagaaaattttatgaaaaatgaaagcgtatccgcgctgcgttttctcttataagaagaatttattttttgtgaaaaacggtgaaaaggttcaatctcaacaaccattttaaaaatgccctcgagactctcgaccactctgcttaatttggcatcatttgcactcaccagcgcctctttcatgccgcgcaagtgtggcgacacgagaattgacgtggtgtaggagcgttcaccaaactttttgttattgccgctgatgcccgacgaaggtgtgccattgttgttgccgttattgttggcattgtttgccattgtggcgacgacccgtcgctgttgtggcgccgtgccgggcggcatcggcaatgagcctcgaggggcggcgctgaggtggcgcgaactatcaatgaaatgtccgattataaaaaatgttgaatgatgccaaaaaacactaaaatgcggttccatccctgatctgggccacataattgattttacatagaccagaagaaaggcgcccactttgccccgtgaccaaacgcttattaattatgccttaatgaggtccaaaatgagaacttaattaggtccgaagaattctaaatctaatttactccacgagaatccaaaaaagccacaaattgcaaaagattaccgtgccgaactgatccgagcgagcggcgattggggcgccacttggcactgtcgtcggcggagcgggcggttctaccgccgttgatcgtgccgatgccggtccggtcgcccgttgttggccgtttgttgtgcccattgctgtgctgattagacggttgttgttgttgttgctgcgcgggatgttgcaacgccactgaacgagttgctaggtggtgtgttgctgccgacgaaccccgttcctgctccagagcttgctaaaccaccagccaagccaaatagcttttaatacaattaatgttaattaaataa

SEQ ID NO: 42674 - DNA, 823 bp, Heterodera glycines
ggacaaaaaagaggggggagtggaagaggaaaataaaaggaagagaaaagaaaaaggaagattggaggagaggaggaggaaaaggcgctcaatgtctaaaagtaaataataagcaagtgtattttcttcttttcctattacaatggctagatggagtttaatacgaaatagccaagagagttgcccttcgaattgcccaatcaacgccaatgacaccaaatgaccccccacacacttttcaacaaaatcatctcttcatcccattaaccaatcggtaaacattaaactgctcatcagacttgagttaatgcaaagtcaatgggacagttgcgcaagaaaaaggggggggggggccgacgggagggagagagtgaaaagggaagggagagggtgtggggggacactggggaggggggggatgatgccaatattattttcgcgatttgggtcattattttatgacaattatttaaggataataatagcaataataaacataatggggagggtggggggtaactcttttatcggaaattaacggccaatgggagaggggcacagctgagaagtgtgaaaatggttgtgacaccgaaaatttggcagcagttgaccattaggtggaagaaaacacttggccaaaacagcgggcaaactttgtttttctttcttcgtaaagtaaaaatgtgtaaatgtgcgaaaaaagtcagaaatgtgtgaagggaggacggatgagttatgatgagacggatgaatggattttggaaggacgggggagtgatggatatgcgcgaagggacaacacattgtccgccccaggggcgaa

SEQ ID NO: 42675 - DNA, 299 bp, Heterodera glycines
atatatcgtatttgctctaattatcgccccggggggattattgttcatcctcctcagaaaggggggggggattattagatacggggtgataaatggagacggggggattatttttcgaccgattatttactgaaaaattttttttgaacatttcgccaaaaaatgttatcgcttcaaaaaaaagacgtcacaccggagcttggcatctatggctgtctgatcggcaacatggtcaccggtgaagtgtcctatgtctcccgatttgggcatacgataaaaaccaaaacggcggatgagga

SEQ ID NO: 42676 - DNA, 963 bp, Heterodera glycines
cttaaaaaataatataaaatttataaatgttttaattcattcattaactaagcaataggaaaaggaccaagggcgcttcttaaggagcgaaaaggcagggaaaaacacgaaacacggacgggccaaacaacggaccgaaccaccaacagatttgcgaaagcacgagaacggagaggaaagaccccgacaaagaaaaaaccaaaaaagacgcacaaaaaaagaagaacagaaacgaaggcagaaaagcgaaacaccgccgaaaccaacacgaaaaagaaaaaaaaaaaacaggacggagacggcaaaaaacaaacgacaacggccagaaggagaggcagataacaccccaacaggccaagaaacccgatgcaaaacgaggaccaagaaaccaccaaacacaacaaacatcgagacgcacaaaaacaacgcagaacggaccacaatcgatacgaaaaaaagaaaacgcgactccgaattacatgaaaatattgaaaaatagggttttttaattctatatgtcatttctcaatatctctgaaaaatcgcgccattttttgttttcatgattatattgtatttgaaaaggagggataaatttaaaaaattgaagaaataaaattccaatttatgtatttgtttttatatatttttcaaaattgtaaaattaatttatgacatatttttgcttataaaattgaaaccggcaaaacccaacaaattttacgaaatctttgtcgacggatggagggatcaaaagaaaatgatgaaaaaattgatttttcattcatttggttaaaaataaggcatggtacatattagggttaagccccgaccccgagctccccggtccccgacccccgacatttttgggcctattccccgccccgacccgcgacatgtcgccacccgaggtccccggcccccgactttttgcaccccgagggctcggggcttaaccctagt

SEQ ID NO: 42677 - DNA, 438 bp, Heterodera glycines
agttcatgttagaaagttggtggtatagcaaaagaacttagttgatagttaaaaaacggtggctgctggttgctccagcagaaaatttaccatcttcttttgctaccgtttttctcatgtttcgtgttcaaatgaccaggtcaaataagacatggttaaatgacctcgtcaaataaccaccttcttatgctacggcccctggtgtgggaaaccttccgccgggtgtcacaataaatttcactctaagtaccaaattccaagactcggaattttggtaaaattttgactagggttgctccccgacccctcgggaggcaaaatgtcaggggccggggacctcggggggcgacatgtcgggggtcggggcggggaataggcccaaaaatgtcggggatcggggtcggggaccggggagctcggggacggggagcaacccta

SEQ ID NO: 42678 - DNA, 1195 bp, Heterodera glycines
  unsure (1)..(1195): unsure at all n locations
caattaattgcctacgaacacagtcgcctttgtctcttatggagcagaaaaggggaaatatcagatggggtgcgatcctttcacaaaaattactcttttcgtctaaccatccctccctttttgtgcactatttcgttttaaaaattgggaacatttttttgtttgtttttttgaaactaaaatgtaaagaatttaataaaattatttttgatttaagtaatgcttctgtttcgaatcttttgactctaagaaattaaactataaaatttagaacaattaattctctaaagtttttaacttggctttaccatgtttttaagtcccaccgtgaggcgggacagttccaaaatttgtaccacattttactgtggaaagtccaagtaccttaattggacaattaattgccaacgaacacagtcgcctttggcctcttatggaacagaaaaggggaaatatcagatggggtgcgatcctttcaaaaaattactcttttcgtctaaccatccctccctttttgtgcactatttcgttttaaaaattgggaacatttttttgtttgtttttttgaaactaaaatgtaaagaatttaataaaattatttttgattttaaataatgcttctgtttcgaatcttttgactctaagaaattaaactataaaatttagaacaattaattctctgaagtttttaacttggctttaccatgtttttaagccccgccgtgaggcgggacagttccaaaatttgcaccacattttactgtggaaagtccaagtaccttaattggacaactacgtgtcaatgagcacagtcgccgttggccagttgtgaaacagaaaaatgggaaatatcagatggggtgcgtcccatcctaaaaattcctcttttcgtctaaccatcactccctttttgtgcactatttcgtttcaacattgtatcaattttttgttgtcttttgaaataaattgtgaaaaaatatacgaaaattattttcgcttttaattatgatgtacaatgcttttaagccccgccgtgaggcggctcctttttgtgcactattttcgtttttaaaattggatccggattttttggctttttcaaataaattgtgaaaaattcaaaacaaaaaacttttattgcgctacaaatgcttttaagccccngccgtgaggcgggacagttccaaaatttgca

SEQ ID NO: 42679 - DNA, 1107 bp, Heterodera glycines
cacattccaaaaatcctcgttttagtcaagaaaatagcgagttctatttagaaactaaaaaaagagattgtgtatgaactgccaggatactaatgtgagaatatatcgtatttttgtccatctactcgccggcttccaattggttcaaaattacttcggcgtccttaaaaaaaataattcactataacatcaaaagtgttcaggggtgggaaggtgtcaatttcttttgttatcagtctgtttatcgtaggcagttctcgacccattacctatgccataaattaaagtcaaaagtttaacccctcccaccgccttgaacatgatgaagaacttacctttattatctcatctgcaaaaccaacaactttcgctatgttaagtccaaatgagcggtcggctacgccagaaacaactcgaaatagaattgtgagttctccattttcgcaaatcgtatccatccggtaattttttacttttccggggtatttcgattgaagtcgagatatttcatgaaaatgagttgcgaacatagcaaaacaaccaattcgcgagatgatatccctgaaatgactaatttatctcattttttagtattaacacactctgaaatagcataggcaagcccaaatccatcataagtgctcgtccccctgcccaactcgtcgatcagaattaaagaatgttcagttgcgcattccaaaatagttgagcaatccatcatttccgccataaatgtcgagatacccttacattggaagtcgccagctccgaccctaaaaggaacaaaaaattattaactacaacggaatttattgctgttttttctccgaatgacctcgtataaatgccgtctaccagtgaaaaggtagcagaagtgcatggaacaaaagagccaatctgtcccatcaaaacggtaagtgccgccgctttcagataagtgctctttccccccatatttgcgcccgttaaaacgatgaattggctattttgtgctcgtttgcccatcaccaaatcattcggaataaattgcacgccttccaattgttcgaccattgggtgtcggcactcacgcagttcaagcacaccggaaccctaacacatacctat

SEQ ID NO: 42680 - DNA, 1490 bp, Heterodera glycines
  unsure (1)..(1490): unsure at all n locations
gtacgtttggcattttcgtttgccgatttattaattgaccncaaaggtttattcaatcncgcggagtcagtcacttgcgcacatttacatcccttatgtatgatcggaaattggaccatttatttattcattttttaaacttagaatgacatgcaacttccgcccgatttgttggcactttctgtgagttttccatggctttttaaattttcggaaatgttttttttccttcagaatccgcaatgtatatggagtgaaccatccccaggatagcaatttttatcattattgtatatcttaaagaaaataaatttaaaaattatttttaatattttaaaattccccaaaattaatggcattaatttatctgtgcgtgttatttgccaattttggccaaatttgacgacaagccacagaacaaataatccatgagagattaaaagaaatgtgatgagtcatctcgaatatggtcaaaacaatgccaaagttttgaatgattatgccaatttcgaaatccaatcgaatgagtttcgctttccttcgttcatttacactttgacgcggcttcggcgcgcgaaaacgctggtgcgaggcgggcaaggacagtaagcaccgtcgtggccaggctgaccagcttggcccgcggctccgggctgtccagggcctccaggctgtccgggtcctcccggctgtccagcaggtccgggaggtccctggcctccgggctgtccaggctgtccgggtcctccgggttgtccgggtccaccaggctgtccgggaggtccgggcgggccgggcactgatgaactgaagcaaacagcataattttgttgtttctgtgtcggtaccttttcgttcctggggctccaggctgtccgggctggccaggtcctccgggctgtcccgggtttcctcccgggccaggaggtccgggagggccaggcggtccctgtcctccgccttgtcccggctgtcctggttgtccatcgcctccagggggtccgggcggtccttggcctccaggttgtccaggcggaccggcggggcacgaagggcacccggcggaagcttgagggcaaggangggggctgttgtccgggctggccagggccttccgggttgtcctggtccgccgggctgtccagcgggtcctggtgggccagggggccccggggttccgggcggacattgcggctgctgcagctggcacacacactgaggcggcaacccgccgttgccacgtttctggcgcagaaagatggaattgaacggattctcacggggacgggccggaggggtgacgctgatttgaacgtccatcagctctgtccatgccgagtcggtgttcacgcggaaagcctacgacggaaacttttccaatcgaattttggacgaattgtccacctgaacaccgtcgaacactcgcgagttgacctcgttgatctgttggtacagctgaggcacaacgatcagagtagccaaaatggccg

SEQ ID NO: 42681 - DNA, 900 bp, Heterodera glycines
gattggcaagggacaaatggacaaagacagtgagtgttcgattagagggaagggagaaatggaaaatgaaagagaggaagccttattgggaagggacaaatggacaaagacagtgagtgagtgggattgtaaagggacaaatggacaaagacagtgagtgagtgggattggaaagggacaaatggacagagacagtgagtgagtgggattggaaagggacaaatggacaaagacagtgagtgagtgggattggaaagggacaaatggacaaagacagtgaagtgagtgggattggcaagggacaaatggacaaagacagtgagtgagtgggattggcaagggacaaatggacaaagacagtgagtgagtgggattggaaagggacaaatggacaaagacagtgagtgagtgggattggaaagggacaaatggacaaagacagtgagtgagtgggattggaaagggacaaatggacaaagacagtgagtgagtgggattggcaagggacaaatggacaaagacagtgagtaagtgggattggcaagggacaaatggacaaagacagtgagtgagtgggattggcaagggacaaatggacaaagacagtgagtaagtgggattggcaagggacaaatggacaaagacagtgagtgagtgggattggcaagggacaaatggcataggacaaatggacaaagacagtgagtgagtgggattggcaagggacaaatggacaaagacagtgagtgagtgggattggaaagggacaaatggacaaagacagtgagtgagtgggattggcaagggacaaatggacaaagacagtgagtaaagtgggattggcaagggacaaatggacaaagacagtgggtgagtgggattggcattagacaaatggac

SEQ ID NO: 42682 - DNA, 950 bp, Heterodera glycines
  unsure (1)..(950): unsure at all n locations
agtggaccaaaatgggaagcaggggggagtttacgaaatggacgaagtaagtaaaaaatattcattgattggtgtagggcttgctcaagaccaaaaattcttgagactcgagaccgaggcctaaaaagacaaacccttctcgagtcgagactcaaggccgagagactcatgaacactaataatgctaatgaatagggatgacattttttggcacaaaagtcgcgaaataggcacctaaaaagcaggaaaaaatcgtaaaataggcaattacataggcagaaaaactctcgaacagtcacaaaaatagttaaagtctttttcgaataaaaataaaatgttaaattaaaaattttaattaagaaaacaaaattgtaggtaatcaatatttgtgaaaatttttaaattgttaggggcgaattttctgaaaaatttcgggtcattattagggtgtaaatcgtttttaatgcttttttgttaaggatttttctaaaatcctttttagtcatttgcctaaaaatgcaaaccaatgctaagtcgttattgacgccccttttggtggtttttattctgtataacggtcccatcaccgtattcagcctagagaaaccgtaaaaaattaatttaaaattgtaaaaagattacatataaacaatcttatgggaattttaatttaatattttattatttttttaatatttcagatagttttgtcaaaaatccgcaatattggattcatattgcggctaatgaacaaaatagaagcgaatttatggtgatatcgctcttacaaaaatacagaagagaagagcgacgggtcaaattgcaaatcggattctctgtttttcgtgtggtaaaatatgtcaggggtccgggtntttaggggaaaatatcaaaaaatagggaccgaaataagggcgaaaatattaaatggggatgaaattaaaaaatat

SEQ ID NO: 42683 - DNA, 966 bp, Heterodera glycines
  unsure (1)..(966): unsure at all n locations
cgattttattggttttgctgacgnagataatggttaccagagacaaaccngggncccctcgtattgtacgtgagagtgaaattctggacncgtagcaagacggactacaagcgaaagcctttggcaagaatgtcttcattaatcaagaacgaaagtcagaggttcgaaggcgatcagataccgccctagttctgaccgtaaacgatgccaactagcgatccgccggcggatttattcgccctggtggggagcttcccggaaacgaaagtcttccggttccgggggaagtatggttgcaaagctgaaacttaaaggaattgaaggaagggcaccaccaggagtggagcctgcggcttaatttgactcaacacggggaaactcacccggcccggacaccgtaaggattgacagattgatagctttttcatgattcggtggatggtggtgcatggccgttcttagttcgtggagcgatttgtctggtttattccgataacgagcgagactctagcctactaaatagttggctcattgcttctgtgggcacaacttcttagagggattttcggtgttcagccgcacgaaattgagcaataacaggtctgtgatgccccttagatgtccggggctgcacgcgcgctacactggcaaaatcagcgtgcttgtccttccccgaaaggggttggtaaaccggtgaaaatttgccgtgattgggatcggacattgcaattattgtccgtgaacgaggaattccttgtaggggcgagtcatcaactcgctctgaatacgtccctgccctttgtacacaccgcccgtcgctgcccgggactgagccatttcgagaaattcggggacggttagtgttccggcttcggtcggtatgcagactggaaccgatttaatcgcagtggcttgaaccgggcaaaagtcgtaacaaggtagctgtaggtgaacctgctgctggat

SEQ ID NO: 42684 - DNA, 896 bp, Heterodera glycines
agggcatccaattatatggaaatccatatttttttcctggacagagggaggcctaaaacgcaggaaacacatgtttttacttggtttaaagcttctaggatgggtttccatatccattttttccatatttcgcatttatgtccatatttccatatttgtccatattttggcacttatgttcatattttatgcccatattttggcatttttccaaaaaacctctaatagaacggccccaaccgataaattggccttttgacctcaaaaaccggaaaattttccaaaaaataatttttttagcaaaattttcacgaaaaatattgaataaatttaaatttgccgacaatcgaatgagtttttcagctcaaaatttggaaatgtatcttatatgcaattcaaccaataaatttgaagaaattttgagaaattatactctaaatttggaaaaatttatgtccatattttgagattttatgtccatattttgagatttttgctattttatgtccatattttgcgatttgttgtccatattttatggctatatttcgtgattttatatccatatttttggttgccctactcatgagtagggctgtcaaaaatatgtacaaaagtggtccaaatatgtacataaatatgtatgaaaaaacccaaatatgtaaataaaaattttttttaaatggttattttttggaaaaaaaaatcctcgtaaagtatgaaataaaaaatttgccgaaatttttaattttttttttgaatatttccaaaaattttggtaaaaaatcctcaaaatatttttaaaaaaataaaaaatttgtcgaaattttggcttttttttttgaggattttccaaaaattttcccgtaaaaaatccctcaaaatatgtaaaaaaa

SEQ ID NO: 42685 - DNA, 1244 bp, Heterodera glycines
  unsure (1)..(1244): unsure at all n locations
ttttcttcatgctctgcacatgaccattaggtgttcaattttatgcggaatncagggcttgaagtgtttatttaggtcaacaattttattaatttcgagtttttttccttacatttgacatttaattttggattttgtgttttggttaagctaattttttgtgaaacaatgcatatttttagttctttaacataaaagaaaaaggttcttcaaattaatttatatgattgattatcattattttctattcgttcgtgaaatttattaattaaaaattttttgcatattttaaaatgtttcctaaatattccgcatttatacgattattttgtacccattttatgaaatattcgcatttaatttttgaaaaataatttttggataacttgttaattatttaaattacaaccaatcattcatttaagtttaatgtagtttacttatttcacaacaatcaaataagaatattaaataaattttaattatttaaaaataggaatagttgattaaaatattttttgtaaaaaacatagaacatgatttaatttattttttaaatataattttattttattctcattttcctacataataagcactctctcatcaaaaattgataatttatttattttaatttcatttcttaaccaaaataatgaactttatttctttcgtttgtcatcattggttgattatataaaaataagaaaatcggaatcagaaaaatatgggaaataagaatctgatgaaaaattttatttaaattttattttaatcaggaatgttaatagtaaacccgattaacaaagtattttcaatatatatttaattatatttaatgaaaaaatttaattttttgttatttattatattttcttaaaataatattttaattttaatcaattaattgatgtgaagatgcggaacatccacaaaaagtcgcatgattgatgtcgcttaagatttacaatattcatctcttcaaacctcataattaaactttttttaaaatttattaggtagcaaaaaagtttacatattaagcaatttatgcaaattgttattgaagataaaaaaaattaaaaatccatgaattattcaatattatttttcaatattcaattcattctaaataaaattttgttgaattaataagcattagaaatttattttttttcaatacgtgatgtcgccttttgaatattcaagccatattgaatatttttttaatttatgataaatta

SEQ ID NO: 42686 - DNA, 867 bp, Heterodera glycines
  unsure (1)..(867): unsure at all n locations
tatttctaaagattccgaaatttaaaaaaaantcggacattttcaaaaatatttcatgttcaaaattcattttaaattacattcataaaatcatttttctcacgagaatcttacaaacaaaaaaaaaattgaattttttttaatggtgaattaattagtgtttgtgaaaaaaacaatccaataaaacccagcttattgcaaacattgatttgaaatcaggaggaggaggatttgcataaatgttcatgaattaatcatataaacaaacaatttattagaagatatttaataattcaaaagtaaagtggtttttgcgtgaaaaataatggaccaacattatagtaaaggtttggcaaaatggtactgggagggaatcgaaccctcgacctctggtgcggcaatcggcttcccacccaaaccagtggtgctctttccgtcggagcccttcccttttatggatcttttgcccccgctttaagcgtttcaaccgtccgctggctcattccttacattatttatgaattaagaaaaattgtatttttcccaatgacgttcgtaattgccagaggagagatactgtcgagaagaaaaatctttcattggcttacaacgataagataaaaacaaatttaaataaatagtgaaagtccaataaatttaaaaaatggtatatattcccactgacctttataattgccggaggagaaattctactgtcgagaagaaaaattcaaacgacaaataaaaatagggattccgtataatcatcatataataatagttttacgatttaaaaaaataatctattaagagaattataacaatataaaattatttaaaaagaaaaattggagcaataaatttcta

SEQ ID NO: 42687 - DNA, 1178 bp, Heterodera glycines
aaaaaccggtaccggtaccaactttttcaaccggtccttggtaccggtaaaaaccggtaattttccaacgtaaaaatttcttggacaaaattttccaaatacaaaatttttattcagttttcgcgcgagtacctgttttttagcattagaattgttcagaagtatatgtatattgagggtgaccaagtttttttttcaaattcaggataaagaacactaaaattcagatatagacctcaaaattcagattattgcaaaacaaggggtcagcagccaattttccaattttgcgaaggggtctccggccatgtaaattaatgtaaatcaatgacctttttttgctttcaacaccgctttttacgcggcacgttttttccaagacttttgggggacaaggagggccggcggtgccgataggcgccgccgggaaaaattttgtaatttttaatgcgatttgttaacagaatttgtaaaaaaaatgaccaattgattaagttttgggtttttaggatgcttaacatgaaagaaaaaagttggaatattttttaaaattaaaattttaattaaaataatggtaaagaaaatgtgaggaatattctatccaagtggggaattgaactcaggcgaaaaattatgaaaggtagaaagtttaaccactacaccacatgtgcatgtgtgtaatcccatgactaaatgaaataaaatttaattttttctcaaaaatttctccttcttcaccaatttcctactcttttctcgaccagacccccattcttaccagtgcaaattttttaccggcggtaccggtactagacaaaccggtaaacggtattttcatttttgaaaaaaccggtaccggtaccaaaaaaaccggtaattaccggccagtaccggtaccggtaccggtaccgctcaaccctactataaatccttaacaaaatgattgtccggaatttcctctccgacccccgagttttctctccccgagttcggcgaccaaccctaatgctcaaaaatggattttatttggtcaaaatggaaggcaattaatacaacgccgggatcactatttataatctgtcatattttaatcaggcatttctttcattgtgctatttgttgctatcggacaacatttacacgttgatcaattatgtggttggttagcatcaataata

SEQ ID NO: 42688 - DNA, 1117 bp, Heterodera glycines
ccacaatgctttttttcgggcatttatcagggtatccttttgatggcaaatgcaattaaatggagaattttttataaatcttgattagctaattattttgcaattttctatcacattacaatttgtaaataatgatcagctaattagttggcaattttttatcacattagattaatgggtgttgggtgatcggaatttaataaaaacccatgatgattttccatggagtttttgaaatttttttaaatgcaattatattgtaatgggatagaaaattgccaaataattaggtgatcataatttacaaacaaattctgcattttattgcatttccaccaaagcataacccgaaaaaaagcatgatgcccaacatgggcaaggtgtactttggtggaatcatgctaaaatgttgcagtcaagtttaaagtttttgataaataacgatcagctaattacttggcaatttgttatcacattagataaatgggcgagtaagaaacggattgttagatgttaaacaggcaaaagcaaaaaatttgggtcatattcgaacccgccgcttaatttttcttgtacatttagaataaaattgacttgatagaaagtcttaacaaaccatatttgttattaaaaagttatttgggcatataatgtcaatttctgaccaacgtaatgtatgcattaaattgaaatgatataagttattaaaagaaagcaaaacataagtttaagcttaaatttttgatatatctttaagtctgaccaagttattctatgttagttaaatttcagtcaactttggaacagctgtgtaaatttgaggtcgtattatatggagtatcaacaaattccataagcagtagttaagaagttccacgatgcttttgaaagtatttatgatttttcgaaataacagcgtttaaaataaaataaattaaatttgtaacaattaaccaatcagtgttcatcaaattcaataatatcatcatcggtttccttttgttccgtacccaccaaatggacatcgttgttttctttgtcttcttcaagcatatgaacgtcgcattggtcggctttatctcgaatcgtacccacctaaaaaaaaaataaaaaagat

SEQ ID NO: 42689 - DNA, 1341 bp, Heterodera glycines
gggaagcgaagtgcggccaatgaaagtgccgggggaaacgatggagggcagcaaatgagtggggaaatgggcgtgaggaaaagcaaaatgaaatgggaaacagagggagggcatcaatcagcttatctgttggacggtccaaatgaagtcggagacgaaacccccacgactcggcattttgtgaggaaataaacgcacttttggactgagtcaagagggatgcttaaacggacggcagaatgtaatcgtttggttgcaacggtcacccaaaaagtccatgatggtgcccgctctgtcccacttttctccgtccaattggcctttttcttttagccatgccaaagtcgccattccgtaccccgtggcaattcttttttccttttgtgggtcatttccgtccaaccatctgcattttgggtccacctgaccagtttccctcaaaagcgtactttggcagtttccgcaggaattgctcgtcgcagcgcgagtccatccacgtgatcagaggggagcagtggcaacggtccacgcccaaacttcactcacttttccgttttcattttaaaattaaaggacccaattgagtcggcttcccacagcatcactccgtgcatttgtcccgaaatgccaatgcctttcacttgtgccaatttgtccgtttccatctctcccatcaatttctgtacggtgtccaatattttctttgggctttgttcgtgtttgtccttctcctctctctcaattaatgcgttgtgttttctgtcccattccaaaaatgtcctgcaacttttaattactctcaaaataatcccttttaagaacactttttgtctccatcgattagggcaattttcactgacgttgtgccgaggtcaatgccaagaaaaagtggcatttgtcaaataaatttattaattgtgcactattaatgtaaacgaatttaattaaaatgtaaaaaaatatattaataatatttaaaaagaattatttttaatttgttttttaattaattaattagaaaacaaagaaatgacgatataatctttttcctttctgataatgaccacatcgatttcttttttttgtaaacatattcctcattcttttttaatttctttctttggagaatgaattaacacaatcatttttaacattcaataaaaaacatataaaaattcatattttttatataaaacattgtgccaaatttatattttaaaaatttaatataaatcgatttttccgttcttcctcatttctgtcggccttaattcctcattttgctatttgagttaaatcccaaaaactcaatggaagctgcttcaagtttgaatgatttaa

SEQ ID NO: 42690 - DNA, 747 bp, Heterodera glycines
tcctttcattatgcttattccattccccctccccccccactcttctacagtatgccgagttcaacgcaatggtcgctcagctggaggcactgcccgagagctggggcgaccggcgcacgctgctttggctgcgccaatacgaacagtttgatcgccgtaccgacaaattctggcgctcacttggcttcgccaagcaccgccaatacagtcccggctatgagaatttggcattttttctcgaccagttgggccatccgccggccatcaaaacggaagaggtcgcgcaaagcgttggtgatgccaaggtagaagcggcgtacaccgtatcgttcccgtcccctagaaatatttaaaaaaaaatttcaaatttagaaaaaatcttagagaattttacaagaaaaattataagaaaaaatgggtttgaaaagtttttaagcgattttttgtaaaagttttttgaaaagccttagtaattcatcataaaatttttaaaaaatcgttgtaagtccaaaattttttcttggaatttcttatagaattttctaagattttttttttgaaaatttctaaattagggaaaagaatttgaaaaatttttggatttctttgacttaaaattttttatttgaaaattatttaaaaaacccaaaaattcaaccaaacaaactcaaaatcaacggctaggccccaaaatcggtaaatctcgggtttatatgcagatacaaaagtcataccctcgctcgggat

SEQ ID NO: 42691 - DNA, 1079 bp, Heterodera glycines
tgaggcttttgaaaatcttcatctgggagccctgtctttcccaaaacttcgtggccatttgaccacgtcattaaccatgttcgttggttgactgctcatttaaccaccttattatagatcgggcccgggtaaattggaaattttggatcggtgaaattgaaagaaaatgccttgtcaaacattttccttttgctaattaattcgcaattagtcttgacaaaatttgtaattagttgcactttctcaaaaaaacatcaaattgctaacacagtagcctaatttattattttaagaaatgcataatttacacacaatgagaaacgaaaacgcattcagagaattcggaagtagaaaaagttgatgggttatcacatggcttgttctcgtaaaagaaagtgaactcgctaatcttctttaaaagtgaagaaacaattgattgtgagaatcgtgtggatttgtgtcaatgccaaacattcaaatggcgctgaacccgctgcaaacagagcctacactttgtaatcgttcatgtaatagaaagtcttccagaatttgctcctgttttgtctgtatttgaagtaaacgacgatcagagcgaaggcgaacagtccgagccacagaaattggagctgcgctcggtcggtgactccttcaaaagtccgttcgttgtgccgacccgcccctccgccgccttcgaaattgtcctcgatgttcttccactggcgcttaaacccttcctgttcctgtcgtaaccgtgactcaacttcctccaatttgtccacctaaagaatgaattggtctgtcagcagaaaaatggaacacctatcgatgctcccaaaccaacgccacttttaatacccaatgattttttgaatttctctccccgcgttgcgacccctcctgcccctgcctggtaaagtccactcgatagactcgtgtattatttttataatccgagggctcaatgcagtgcgattcatattcaaacaattcccgccgcccctctcactttttcggcattcagcttaaaaaaaagaaaaaaaaacggttcgcctccttttcaactttccgacctgcaggca

SEQ ID NO: 42692 - DNA, 1218 bp, Heterodera glycines
tgcatatatattccctgtatgagtgtttggatccatgcagaaatttattcaaattaatgaaaaattttgcattgttaatcaattggaaaaaatattttagttttttactattaattttggagaaatttatttagaaaaaaagtggcagaatttttgcttttttagataagaggagcaattaattgttcttaagaagacaaaattatttaggccaaaaaactcgttatttagctatttcttgaaataaaataaagattacaattttttaaaataattttatttcgccttcctaaaaactcacagccttattaaataaaaattgtcatatgaaaaaggaattagcatttaaaataaagcacaaatttatgaaaaatatgtggatcacaacaaatgattaaaacatattaaggaaaatttgtaatataaaataaaattttccatttttgattaatccccatgatttggggtgtgccaaggacgtagcaacaaaagtttttttttgtgaatggtgccgtcaggaaaattttaaattcgtttttttgaatttttcagaatcactatgcccaaaagtggcaaatttagtttaaatttggctgaagtaaatgcatcacattcatgaacatctgctgctcaacaaaacccaccgaaaacttttgctgtagcgatttaaaatgtttaattatcgaaaatggtaacaatagaaagtgcattagatatgctcatttcgtgcaaccgtagtcctattatggaatacacagcaccatgcgatgacgtcgtgaattacacataaacaattcccgttataaatacagaaaaaggtgggaggagggggtagaataataaaaattgataataaaaataataataatgaaacgatgataatggaacagaacaaaattggagagagagtaaatatgcaacaaaacaaagccatattaaataatataacaataataaaagggacagcggtaaaatttataaaatccataaaaacagcaacaggcagagagaaagagaggagagtcgtacgagaatgatcaagataagcaaaattgagaaaagtgtgtaaggacgaaaatgacggatacaaaaagggagtgcgggatgggttgagttttgttggttgtgtagtgaacggatggatgggcgcgacgacgttgggggaaacggctaactgagaacagccaattggattggcaggtgggcggaagtgaacag

SEQ ID NO: 42693 - DNA, 906 bp, Heterodera glycines
  unsure (1)..(906): unsure at all n locations
atgtgtgtcgaaagtgaaaggtgcgaaaatttgccttatcagacaatgaaaaaaggggggaattttnggggaggaatttttgaggggagcccttccccccccccccgaagcgacgaccgtttacagtgaaacattttaatcgaaaataattaatcaccgaaaatgtacccaattacccaactaaaccctccttccgtgttgataattttctcccttaattatgcatttgcacatttctcattctgtctgtctgcacgtcgttttgtttgtttaactaattaattaattaatgatcaccagcagaggccgatgaatgatttgtttttagttttttcatttttaaactaaatttgtcacttttagccatatggattctgaaaaattctaaaaaactaatttaaaattttcctgacggcaccattcacaaaaaaatatttttgttgctacatccttgattacaccccaaatcatggggattaatcaaaaatggaaaattttattttatattacaaattttccttaatatgttttaatcatttgttgtgatccacatatttttcataaatttgtgctttattttaaatgctaattcctttttcatatgacaatttttatttaataaggctgtgagtttttacgaaggcgaaataaaattattttaaaaaattgtaatttttattttatttcaagaaatagctaaataacgagttttttggtctaaataattttgtcttcttaagaacaattaattgctcctcttatctaaaaaagcaaaaatttctgccactttttttctaataaatttctccaaaaattaatagtaaaaaaactaaaaatattttttttcaatttgataaacaatggaaattttttccattatttggataaattttctgcattgaatca

SEQ ID NO: 42694 - DNA, 637 bp, Heterodera glycines
tttgaccgtggacgattgtttcggtgactttccgttcgttgcgtccgctcatgcgacaattcgctacgtttgtcgggggtcggcgatcacgttggacaaaggtgagcagccgaccgaatcctttcaatgctttttcatcagcaatttgcccccctggcggtgccattctttcttggcccttttcttccatcggtgtcctaagagatgactatctcgcgtctatcattgagttataagctacgttcgtctggcgcattcatatttcacattagttatttgctgaaataacaaaaaaaccaaaattttggaagttttttcttaataacttttttacaagctaaaatttttttttattttttgtaaggctaatatagcttgtgaagggctttcgaatgataccaagattgttagatttggccaacaatgaaaaaagttataatcaaaaaactcgcgttggcgccaaaacgtgggcgccaaaacgacccagtcccaaaaaacagaagacgccatgccaggtgatttcgacaatacagataatttttaaaaatggagtacatatgatttgtttgtccctttttcgggttagtcaatgcgttaattgacttctgtcaattgatttacaaattcttttttcctt

SEQ ID NO: 42695 - DNA, 928 bp, Heterodera glycines
cctgcgaaggtttcgggtcgaaagagacaatcactccatcttcttcagccacgcgatggagcaaaaagcgggccatcctttgaaaatgaaaagcaatttaaatacaattttataattttcggattaatttgaaaaactgaccaaagctgatctcccatttggattccttaaatgaaagcaaaatttgcttctttttttattttaaaaatgacaccgaccttcacatgggccgacctgaaattcccattggcccggcatcacttcggcatttgtacccgaaatcagaatacccgcgtaaagacaagcgcttgaaaaagttaaattaaaaatagtaaataaatagataaattaattaaataaaagtgctaaaaaagaatcaccgatagtgtgagtccacaatatcacgaccataagcctaaaaatgatttaacagaaaaaattgtcaactaatttatagtcaatctcactttgttagctccagcaccgcaataataaggcccttaatttgccatttttgaatatattaattcaattttaaaattttatagagtaattagagccaaaaaatgattaggccgggaaatgaccttggggcccggggaagccgaacggcgcctttggccatccgaacggatgctggtcaacgtccagcagtgtgtactcctgctccatgccaaaccacgcgtgctgaatggggaaaagcacaactgtataggatttaagccaaaatgattgattgtcattaaaatgaattaaagcaccattaaaaaagataaagccttttaaatatttcaaccgctcatcctttgttccagccgaaacttttggaaccctaatccgaaaatgatctaatattttccaagattcccgctactgcaaatgccatttaattttcatgtatttaaattggagctgtgctataattttg

SEQ ID NO: 42696 - DNA, 1524 bp, Heterodera glycines
  unsure (1)..(1524): unsure at all n locations
ggtgtttttttcaaacttggtcaatacggcgtggtcggtactgctgcttccctgggtcatccctcgaagtgcgccaacgccaactcggccccaccatgtcgtcgcgtgtgtcagcgaaattcgaaggcctctcctggatgtgccgttttgctgccgcctgagctttgcggtcgacacctaaagttcaaaaaatatcatgccatcactaaaagaatccaagttcctacggaaggagcagacttccgcagccagtccccgacgtgtttctgttggttgaaaccaatagccaacattggcacgatggtttcgtttattttcaaaaacgaaagcatcccattgctgccgccatctggagtgacaatgctttgccaagtgtccctgtttgaggcaggcaaagcagtattttgacccttccttgatgttccagggcagcgccctccttgctgccgcctgatttactaaagataaaatcggaataatgattaagtatgtgtgcctcggatcaacacggctcctgttttttttcacggtgacgcttatctacgccaccggaatctcccaccaaaatttcgataattctttaccctacaaccctttaataaaataaatgacaaacgaactccaatcttccaaaatccaacagttcgctgggaggtggccgctcgctttacaggcgatgcacctcttgttgaaatgtccgtttccaggccggtcagcaggacagatcccgacggtgtggccaggttggcggcacttacagcaggaatttgacgggtggatttttttgcacttcttgcagatcgattccatttgaatataaaacaaaacagaaataaacctgttaaaataagttaatataagcgtttttttaaactgcctcaagtgagtgaaaaatagggtaacggtaatgttaacgatattttatggcgtttcagggtcggagaagccgatttggacgcgaatcccggacccgggttcgaacaaaaaatcgaaaatcaaaattttcaatttagcttttttgtgcaaactttgtttaaaaatatggaaacaaaatgaaagtcatcagtgcttcaataaaaatcatttaagccatttttagagtatttcaaaaattttgaattttcgaccttttgttcgaattcgcgtcagtgattcagaattggtgaaatggaggtacttgtaggttttgtcacccccccctgaattttttttttctaataattttttctcggctagtttttgatgctgattacgaatatgacaattatttttaaccatgacgtctttccagtgtgaaaaattttaaaaggtaacagtgaagattgtaccccccccccttttcgaaaaaaaattccaaaatttttttttcttgaagtaaattcattttaagagttttcacggtcggagaatccgattcttatattcatttcgaccgaattcgaaccttntaaccgaatcgaaacaaaagtcgaaacttgtaattcttttctagttcgcatttttgggtcaaaaccggcttaaata

SEQ ID NO: 42697 - DNA, 1238 bp, Heterodera glycines
  unsure (1)..(1238): unsure at all n locations
aattgccatatttgtcctttccagtggcaaaaacacgattatttgtgcaccgacgggcagtgggaagacaattgtggccactgacattatccgaacgcatttgtggcgtgccaagcaggagggacgggtggcacgggtgaggccaaattggggggggagggcacttggccaaaaaacagtgactggatttgttggcattttgtataaaaatttcacaccgttttttcatctgtttgttgttgtacagtgcgtgatgttggtccctaccgtaccgctggtggaccaacagagttgcgagtttgtacagtacttggccggccactattgggtggacggcttctcgggctgcgagaattggcacgacggacgtgcccaacgcgtgttggcatgcggtgggaattgttacacattttatttcgcctttttaaatgtctgtccctttcccacttagatttgtgcgttatgacacctcaaattttgatgtaagttcattgaacatctgactaattgctgtaattgttagaatattggcatattttttgttcaaacagtcagcaattgaagatgctttttagcttcttaatggatcccggggccgttcacccaattgcgtattattttatgtccaaattacaaagtttggtgtcctcaatttcgggctgttcctgtttttagggcttctgcaactcggtgcccactttttcctaatgtttaaacatttttgcttttgttttggaattaacacattgttttacccttttaattttgatttgttttctcgcttttgggcgggactcgagtttcttcgtctccgcgtttttacaatatccctcccattccgcttcagcaacatgatgaactcggtgctggagtcggaacgtctttacttggccgacttcactctgattgtgttcgacgagtgccaccactgtgacaagggacacccgtacaaaagtgccgtcaaaacaacaacccccaattttctttaaatttattttgctattagtgatcatggatcagctggccgagttggacgccaaaaattggacaggcaaacggccacaaattgtcggtctaaccgcttcgcttggcgtcggcgacaccagctgggacatggcggcatgccgacgggtccagcagaaaaatcggattaattanattttggcaaattgctttttagcacatgctaacgctgtgtgccaatttgagagcggaaacgatcangtccgtgcgccatc

SEQ ID NO: 42698 - DNA, 863 bp, Heterodera glycines
  unsure (1)..(863): unsure at all n locations
aaaggtatatgagttgccaaacttttctacctttggtctcccaaaattgcgattgctggcacgtggtgggatgggaatgcgaagaacctgtgaaaaaacgcaataaattgctaattcttgctataaattgaggaaaaagtgatcagcagcatattataaaatatgataaaccgatcagaaaatagagaaaaaagtgagatggttaatgatcaaaaatttttataggcaattaaagaggaaaaatgaattaactaattgctattttttttttataaattactcaaaatgattacgacaccaaacaaaatgattaagcaaggtaactaattactaaaattagctaaaactttttaaataatcagctgatcagagtgaacaatcagttttttgtctcttaccgagtttttacgcgaaaaatactgcacatttgggctgatctgatcatcgtcctcctcctcttcgtcattctcttcctgatcagaacggacggcaccgccaagcggcactccccgtcgtcggttggcatcgtttgtgtgctgttcccctgccaaatacacacgagtcactgtggcagctgatgctcggcctaattagtttttggaataggtaattagcaaataattaatagtgatttgacattcaagaaaattaaatacctatgacaaaagtgtaaattcaaaaaaaaaaaaaaaattaaaagaaaattgatccatattttagcataaatgagcaaaaaagttatcagcaatttttatgtgtttttgtctaatctttttagcatttatctagcacttttttagctnttattagcaacaattattttngttttcggtttttaagaagctaaaaatcccatttctaat

SEQ ID NO: 42699 - DNA, 1072 bp, Heterodera glycines
atcacaaagtgttactgttttccagagtcggcaaatgctttcgatcattgaaagttttgttatcattgaagggttggtaaatataacgcccaaaaaacctttaatttatttatattactgtattattacagttattccttccttcgaatggacggcacaactccaattggcagtcgacaaacccttgtcgaacagttcaacaaagttattgctgcttttcttacaatcctcactttaattctaaggatcccgatctttttgtgtttttattgacgacaaaagtcggtggacttggcataaatttgaccggagcgaatcgcgttttgatttttgaccccgattggaacccgtccacagatgctcaagtcgatttgctcaattttacaaattaattttccttatttttttggtcttaggcccgtgagaggtcctggcgaattggacagcatagggcggtcacaatttacagactgtgcgttacaaaattattgcccaattaaacaattaattaaggttgacaagcggaacgatagaagagaaaatttaccaacggtgttgtttttcatcggttttcgttaattaatataaatttattcgtttaattattacctttaaggcaaatattcaaacactttttggccaatcgcattttggacaacccaaaacagcaacggttcttcaaaaccaacgaattgcacgaattgttcaccctgggctcgtcaaaaagcgaccggaagtatggcacaggtaaaacaatctgtaaaaatctcatcaatttcactcccaaattttagaaacggcggttatttttgccgccaacggaagcgaagtgagcagaaaaaagttgaagaataacatggataaaagaagggatgaaaaggaggcggagaacaaagcgaaagtggcggaacggacggacgacggcggaaaaatgccctcggctgattttaatgacagtgcactttcggacgaggcccgggaaaggcttaaaatggtcgccaaacgattagcggcgtaaaataaataacaaaaaatgcttaaattaacaataattttaaaaattttggaaaaa

SEQ ID NO: 42700 - DNA, 1542 bp, Heterodera glycines
  unsure (1)..(1542): unsure at all n locations
aaaaaaatttaaaaaaatttgatcgtccataaataatttgtaatgnatcaggggctcacanaattttgcagagatacgtatcgaaccctacaaaagcttacttatttcntagatttttaaccccggtgaaattttttgcagacacccaccacttttgcacttaaaaaaatttcaaaaaatttgatcgtccataaataatttgtaattgatcagcggctcaccaaattttgcagagatacgtatcggagcactacaaatgcttactaatttttctagattttttaaacccgctgaaaaagttaagcctaaactttttcggcctgtttaaaaaggaattagaaatttttaaaatatttattcatctccctttttgataatataagagtcagagtgccttattcaacttgtaaataaattttggtgcgtttcagagcagtttctgaaaaaaatttatgaattaattttgcaaaaataaataaataatgaaccctcctccttaataattttcctgcgcccaaggtactcactcggccgcttcgcggcctcgtggctgtaaaaaaaatttggggcgatttgaaagagaatagaaagaaccaggttcgatgaagttttggtaagccaaaaaaaatgcaaacatttaaaaatctataaaaaatttaaaaatgagaattcatgcgagattttctggaaataagcttaattgggccttgttaagctgtaagacacccaccacttttgcacttaaaaaaatttcaaaaaatttgatcgtccataaataatttgtaattgatcagcggctcaccaaattttgcagagatacgtatcggagcactacaaatgcttactaattttcctagattttttaaacccggtgaaaattttttgcagacacccaccacttttgcacttaaaaaaatttcaaaaaatttgatcgtccataaataatttgtaattgatcagcggctcaccaaatttagtagcgatacatatgtagtatcctccattatttatttcaataaattttagaaaaacaaaagggtcttccacccctttggtttcttaataaaattcaaaatctttcactttttttgttgatttttcgtcattagttccatcggttaaaaaaaacaaattctgtatcaaaacaaacaacaaaaaaaaatttgaccaaaaaaaagtgaaaaaattttcaaaaaaggccactttttaaccagcgccaaattttttaaattcttaaaaaataaattaaaatgttactccgccaacgaaagaaggccaacagcattttcagggttacttctcaatttaagatgaataagtgcgcgaacggcctcctgctgacaattgaatctggtgggcggaagatcgccatttcgcatccattccgaattgtcaacactaagtaagaatgaaatacaaatacataagttagttagcattttgcactttacaatgttaaagcaaaccaaccaaatcattggctttccggtaagattgcaatttatttgcggcaattatatccaatgctannattgacctgca

SEQ ID NO: 42701 - DNA, 1436 bp, Heterodera glycines
gaatcgacttaaaatagtgataatatttgaatgaaataaaagaaattattttcttaaaaataatgtgtattttaccaatattatcgatagggcttcaattatatgaatataaaatcgcaaaatatgataatgaaaatagaaaattcatgaaacattgagataaagtcgcaaaaattgatttctgatttggaaacattttcttcaattttattaaatttagtaaaaaattatttcaaatggttcaatacggtattaaaataatttcagaaaaaatacaaatattcatgaattttttgcgaaaaaactgcctaaaacccaaaagttttggaatatttttgacataaatttaccattttttaggaaaaattctattatttctttttagcttattcgcccattttgtatgcattacggtagtatccccctgtactgtacataccaaccgtacttacactgtcaaattcgggtccgccttcgatgctgaaaatgccattggacaccgacttggcatatgttgcccactcgctgtgcccgttcagtgtttcgtgccgtataattcggtgcgtaaatccatgcagaagacaaattttgacattgaatttgaaatcttcgtttatttgccatttttccgttaattcttcccattccttttcaaattttgttctgatttcttccaattttccgtcaaaaagcttgaaaaataaaaatgtaaaaaacgaaagtttaggtaaattaaaaaaatatttttaattaatatttcaattattatttatttgcttaaaaagttagttacttccatttcttttatgtgtctaaatgcattttcgacgacgtccataaaatgccaaattacaatttggaagtcaagcactcctttttttggagagcccaaaaaactgtccaccgaataaattgagaatatttctttgagtgtactgcgcatttcatccaaaagtccaaattcttaatcaaacagggctggaaatcgtctcgaaaaataatccaaagttctacatagttacgggataaaattacacaaaaattgcaaaaatccgtaacccgtaatccgtaattactgggaaaatttccgtaatccgtaattacgcccagtcttgtaattaaatttattttttggggattgttctaatggcaaaatttggtctttggtctttcaatttcacctttatccggcaatttgttcttatccagttcccttaattgctcaatgggcgcttcttctcttgggcattcgagaatttttttctgtgaataaaataaattttcgaaaatttgattaattcattttttaaatattcaccgctaattattgtacctcattttgtgtgacagcagcaatgattaataatgcaatgaaaataaacaatggaaacagaagaagtccaacggattgcatgccaatatttcggattttatta

SEQ ID NO: 42702 - DNA, 901 bp, Heterodera glycines
gaggaggaggagggtgaagtccgactcggagacgaaggacgagcagaagaggcttatgaaatggagggggaacacctccgacaccacaacagctggctgagcagaacgcaaaaacaggttggcagagaagggacagactttcccaagaagaaacaccccacggacagatgctgaagaaactgcgcaaccggggccacgaggaccacgaaatacacgaacaaatccacgaattttacgaagtgtccccggaagaagtgaaagcaactgccagaggaattctccagagaggctgcgaatccatcttcaaagtgtgtgagggaagagagaaagacgaaaagaatgacaagagagactaattaattaataggttaagcaattaattattgacattgattaagcgtatctttggagaatacaaagcggaggaaataatccaggtaattagagatttaatttaatgagtgtcgatgacgtcaattgtttcatttgattgtttgaagatgcgcgacgaaggagcatccaatgttgaaattgaggagaaaatcacagaggcactgaaccaaattcgaagtccgcagaagcgacaggaggccggccgatttgcgatgtcatgtcgccgaatattcgcaatgattgtgagtggctaatcaccgccgaattttcatttagctaaggaacgtcgtcgacgatcggcggataacgccgaacattcgctggatcaactgttcaaatcgcatttgatttggctgaatgagcagcaacgggaggagctgaagcaaatgaaagggtccggaaagggacggacggaaatgcagcagagagtgatggaatggtccggccagttggaggggcaagagaataagaaagcgcgagaacacctgcgggacgggtgggtaaacgg

SEQ ID NO: 42703 - DNA, 1269 bp, Heterodera glycines
  unsure (1)..(1269): unsure at all n locations
tttttttatagaatactacgcccattattcatttcaagattcgggttggacatatctctgtgaattttcaagtaaacaattnaatgaatacaccattcgaaagctgcttttgagctctttcaganaattacttaacctcgcccacacactcaatgtggaccaagatatacgcttgtaattcataatggctcattntacgcctacactcggcaaattccgtgttagctagtgtgagttgagaaattaactcttgcaaatccataatcgatttattaagtcgcttcatctgtttgctggactaggattttgtgtaaaaaaaatttgtttttgctagatatttaccctatgatgtgtttatggataattcaaatccctgggcactgtaaaattcctaagaaaaatttttttttatagaatactacgccattattcatttcaagattcggttggacatatctctgtgaatttgcctacactcggcaaattccgtgttagctagtgtgagttgagaaattaactcttgcaaatccataatcgatttattaagtcgcttcatctgtttgctggactaggattttgtgtaaaaaaaatttgtttttgctagatatttaccctatgatgtgtttatggataattcaaatccctgggcactgtaaaattcctaagaaaaatttttttttatagaatactacgccattattcatttcaagattcggttggacatatctctgtgaattttcaagtaaacaattaattgaatacaccattcgaaagctgcttttgagctctttcagaaaattacttaacctcgcccacacactcaatgtggaccaagatatacgcttgtaattcataatggctcattttacgcctacactcggcaaattccgtgttagctagtgtgagttgagaaattaactcttgcaaatccataatcgatttattaagtcgcttcatctgtctgctggactaggattttgtgtaaaaaaaaatttgttttttctagatatttaccctatgatgtgtttatggataattcaaatccctgggcactgtaaaattcctaagaaaaattttttttatagaatactacgccattattcatttcaagattcagttggacatatctctgtgaattttcaagtaaacaattaattgaatacaccattcgaaagctgcatttgagctctttcagaaaattacttaatctcgcccacacactncatgtggnaccagatatacgcttgtaattcataatggctcatttta

SEQ ID NO: 42704 - DNA, 982 bp, Heterodera glycines
ttcactatttactactaaaaatggaaatttaatttttttttcccttaaatgtgagaagcatgaattacataaattttacttccttaatattattctcgtcgtctcttcttttcaaattattttgggtaataaatattatatttttgaatatttcggcacatatttcaattaataatttcaattaattttcctaattattagttcctccatttgggctgaacctgttgctgctgcactttgctcaattgcacaataaacccacccaaaatgatgacaactttgctgctgctgaactgccacgttactctctccccaatttttgctgttgcgcgttcgaacaaatttatctaactaataaacaattaatcactcacaaattgcctaattagcgatgagttagtgaacgcatgagtgaacaacaacagcttgtgcactaaatttaaagtaaaatttcattgaaatgttttttgccctccccctcggtttttttgggcgaccaatgggcggccttttgctgaatttgtgcccccccctacccaaaaaatggaggccaaaacgcagaatgcactcctataaaagggggggtcaaacatgccaaaatcacgttcatttcccaattggcccccaatcgccggacacaaaaacccacccgaaaatgttccatttggccgccatcgttgcgctagcggcgctcgcactgcccctggcatcttcagacaagttcagaccatgcctcgagggctacgcacaatacggcaaatactgctacaaggtgtgtgcatttgactgtacttgctttacccactcgcggtttccgaatcatacgtcccctcgggtgacggttttcgaaactttccatgaattatgtcctctttgacgagttgcagttccgaaattctggcgaagggttttataatggcatttcattttgccattttcaggcattcacaaacccgacaaagcctgccatggtcagacgcta

SEQ ID NO: 42705 - DNA, 1016 bp, Heterodera glycines
atgaatacacaaatacaccctaaatatgtgcgaaaactcctaacatataaggaatggatcggaatgccggtttccgacatttttgggctttgaatttcgatttccaaattttttcagccgtcggaatgccgattttcgatcgccgaatttttttgagggcaccggcacacatctctgcctgccacataataaagatgagaaattgtgcattttgctgagggaagagagattataaagaaaaagagacagaataaatagttagaagaagaagaagaaaacaagagaaatagttgttagggaaggagagaaatagtgcatttctgtctgccggtctgtcgacgcggggaagggcagacagtggacagacgcgtcaagagggaatggtgaaaacggagagagtaaatggcaaaggaaaagaaacaagagagaaagaatggaaaggaggagacaatgaaaaatttgcggtgtgactaaaagcgcctccggtgaaaattttgatataaaaaagtgaatttgtcagcagacttgtccagaaattggcaaattttagcgattctgaaactatatttaagaaaataaacgtttttgggccggcagcgctgataggcactgccgggcaaattttttgaaatcttggctacgtttttaatttttgtacaaaaaatccagatcatgatccaacatggaatccaggtccatcgatcatgaactgatcctggtagttttgatcaggatcaaacgattttttttctcacgataaattttttaatttatgaatttcatatttattcttaagctgaaaaatcggcttaaagtgaaatagttatttttatttgattacattttataattgattaaatagtgaaaaaatgggaaaataggaaataataaatgtaccgtatttgctctaattaaggcccctgggggattatttttcaacctcctcagaaagggggacataattggagacagggcctttaaaggagacggggccttaattagagcaaatacggtaa

SEQ ID NO: 42706 - DNA, 552 bp, Heterodera glycines
aagaggaggggggggggggaagagagaccccctgaaattttgaagaattccccccccccctttcccaattttccaatttcactttttaaatgttttaccgcgcacggacaaacaaatcgtcgccaaatgtgtgtttgtcgtgtgaatgagtgaattgcgcgtgggaggaaatgaatgaaatgaattttgacctgccgattttcggggggggggggcggaggaagacgaaatttggaagaaatttgaggagcaacaaaaaagaaaaatgagagagagagaggcggaggaagggcaataaaagcgacggaaaacggaagggaaaagccttgggggaaaatcctctcgaattttctgccaatttttgggcaaattccaccgaataaaattgttgcaacaaattgcgcaaaatgttgaaggcactttcaatacgggtgaaaagaaagagagcaccgcttttggtgggaaaaggggcaggggttggtctctccgcggggttgcgcttccggtggggtttgtgggttttgggcggttttttcattgtttttgggtggg

SEQ ID NO: 42707 - DNA, 1013 bp, Heterodera glycines
  unsure (1)..(1013): unsure at all n locations
cgatcagcaaattgatttggtatttctntggcttaaaaacaaatcaaaattaaagactctaattgattaaaattaaatttataagacaatactgtcgaagcctcacacacccccctcccccgcccaaccgacatctgtgaatcccggaccggaatacggtaatactatagatggtacccccccccttttcgaaaaacagtgtgcatttcgaccaatttcgaatctcagacccaaattcgaacaaaagttcgaaattaaaatttttggactttgcaattttggttcaaaatggtttaaataattttttattgaagtattaatgagttcttgtttgtttccgctatttgtgccgattttgaaccaaaaatgcgaaattcataaaaaaatgaatttcgaatttttgttcgaattcgggtctggggttgggattctaaaaccaagcttttcgaaatgcatatcaatgtccgaatgtatatagaggatgaccatctgttgataatcaaagatttttgctttttttttaaattttacagtcaggtgcaaaacggtttttttggaattggtatccgggatgcgatactataatgcagggcttccatttgttcttatttataagaaatgttctgattttgggctattattcttattttgttcttatttcttaaaattattcataaatttagaaatttatggcataaatgttcttattttccctataaattaaaaaaaaaaatttccccggcggcgcctatcggcaccgccggacgctaaaatactttattttctttaaaaattggctcaaaaatcaccaaaattggggcaatttttagacaaaatctgttaacaaatcgcattaaaaattacaaaatttttnncccggcggcgcctattggcgccaccggacgcccatgtccaacccccaaaatttttttgaaaaatgtcgncaaaaagccttttgaaatgtaaaatgggtcgccattgtctcaaatcgcaaaaatgataaattttgatga

SEQ ID NO: 42708 - DNA, 1569 bp, Heterodera glycines
  unsure (1)..(1569): unsure at all n locations
ttttaatatttaaaaattacaaaatttatgaattattaattcaagaatataattaaaaatatgaataatcatnttccaaaaattcctaaaatntaaggaacctattgaaatgaaaaaaaaaatttgtaataccgaaaaaaattgcttagccatttcggaccaaaattttttgaatctcttcaagattgtctataaaacacatcattctcgaaataaatgtttgatcagtttaattttagcatacataataatatttggaataatcttcaatggctttcgatttaaaaatttatcttcatctatttatttcatttacttttgttggactgatcactgaggtaagtcagtgaatttttttttttttgatttaaaaaatattttttagccttaattttattcatcaattttcaggcttccatcaaagttgttccgatcagttatttgatcaaatttaatggaattgatcatccacaaccacaatatttgtcatacacaaataaacaaaatgtaaatttatatacatataaaatttactttatattttaaataatcattttaaattcaggtgcctaaaaatgaaaacaacaattataaaatggacaattccgtggtaaaactctcgccgaagttgaaggatgatacatgggacaaaaaggtaaaaaaattaaaatttttaattgaattcattaatttggatataattttaggaaaacaatggaatggtggtgcaacaacaaaaaataacgaaaaattttgctccaacaaccaaattaaatgatcaacaaaaagtgctaactcaaaaagatgatcagaggccgccgactttgtggacaatgtccagtttaaaacaaaaatttttaaaaataaaccgattattttaactgcatttcaacaacagcaaaaaagtgaacaaaatccgccagtcaatccaaattatattcaacaaaatcagtaccagtccactaaactgtttgatcaaaatcaatcccaaacaacttctccaacactgatccaaccaattcagtatcaaccggcggttcaaaaacagctccaactaactcagtaccgacctaattatccacatcaatttctgccaaatcagtatcagccggattcaatctctccaaatcaatttcatccaccagcagatttgcttcaacaaaaacaggatcagcagctggctacacataatcaataccaagcggacaagtctcagccggcggcgtcgccaaaccagtttcagcaagctcagtaccagtcgtctgtgccaagccaaattttcaaggagatgcgaacaaataccccaatctgcggatcaaagcaagaaaatcattccgcaatcggttggctctccagcaggcggaggaagaaacagcaaattcacgccatggaatgtgcacagctactactacacaagctatgatgagtgtgacccgtggtgccgtgcgcattgtgccaccaaacggacgcccgaattctgcttcaaagctgggccatgcttggccaattgttaccgaattatcaccaattttttgagggcccgtcgaatgtgaaatgaataatctcata

SEQ ID NO: 42709 - DNA, 938 bp, Heterodera glycines
ttttctttcataccttcttgtagagctcgagctgctctttccaatggtcttatcccggtctcgatccgtgccgaactcacaaagttatggagtgaaatgtgaaatattgttttcaccacaaggcattttttctgaaaaccggattcaaaaatctggggtttggtataaccgttttagaaatagcgtagaaaacagcttcgatatcaagaaaccaagtcaagtccagaaaggaatattttaaaacgatttcgttttgttttggcattatgataccgaataactttcggaaattatggaaacaaaattggagaaattcgaataattttttgactgcaaatttttttccttttttgaattgggttcaaaaaaattttaagagaatttttgattattaatttgaagtcttgaatttatttgacaaatccaagacttaaaactgggagaagcaagggtctgtggctgggggcctaaaatttgggccacattggagaattaattctgatttctgaaaaagtcccagaaataactattttttctttccatacgttcttgtagagctcgagctgctctttccaatggtcttatcccggtctcgatccgtgccgaactcacaaagttatggagtgaaatgtgaaatattgttttcaccacaaggcattttttctgaaaaccggattcaaaaatctggggtttggtataaccgttttagaaatagcgtagaaaacagcttcgatatcaagaaaccaagtcaagtccagaaaggaatattttaaaacgatttcgttttgttttggcattatgataccgaataactttcggaaattatggaaacaaaattggagaaattcgaataattttttgactgcaaatttttttccttttttgaattgggttaaaaaaattttaagagatttttgattattaatttgaagtcttga

SEQ ID NO: 42710 - DNA, 1219 bp, Heterodera glycines
tttggtgttttgtgtgcaaaagcggtcaaatggcagaaataattgacggaagaaaaagcgaaaagaacggcgtgaaggaatgccgaaagaaaaaccacggaagaaatatgccgaacacagcttaaaagaaaaaaaaaatatttttgaattaaaagtttaagcagcgaatttaaaaaaatttaaaattaacaaaattattttgaaattaaattttttatcggtttcaaataaaaaaaaagtttaatttaaataatttttttaattaagtacagttgaaaaaataaaacaattactttaaatgattcgttcagatttatttattttcttcctatttttttgggcagtttttagcattagaaacttctaattttctttcaaaatttttgtcataaactaatggaaaacacatattggttattaattgcaattagcataaccaaaaaaaaaaaaaaccgatttcgttttccttaaattttgtttatttttgtttctttctgtttctgtgatgtgatcgatcctttttgtttacattttccattccgtttcattgtgcttttgacggataacagatgctaatattgctcagcgccgatcgccccgttttgtcatcccttcctttccttaatgatgctaataaatgaaactgatgatcgttgtggcaaaagccgcttcttccgatgggttaagcccgggcaaaagcatgaaacattcattcattccatggtcagaagaagcagctgtttctttctcactacgtatttcattccatttgatttttccgaacttatttgttaactcattcataatcatatttttgatgaatttcatttttattcgaaagcattcttttcatttttcatttaaaattataaatttattttaatattattttcaaattttggagtaaaaattttattagttttatattgaatattaaaccagtaataagaaataaataactttaaacttataatttccttacgcactgtaacacattgagtcaaaatgtacggtaatatgggtcccctgtcgcttcccatcacttttttatcgcttttgctgttggcggtattttgccattctgaggatcgtaccgttggtggtgaagagcctgaggaaaagctgccctacaaacagtatttcagtgaacaaaaatatgtgagtgagcagaaaacattttcaaaaaaaaatcatagctttaattgaattgctaattgct

SEQ ID NO: 42711 - DNA, 1175 bp, Heterodera glycines
gaaaaagcagcgccacaaaaaaagcgacttaaaaacaaaaaaattaaaaaacaagttttggtcattttttgaataaaatctgtaacaaatccgaagacaattttcaaaattttttcggcggcgcctaccggcaccgcccgaccccaactgtccccgaagttttaaaaaacgcaccgcaaaaaaaggtggaaaaaatggacaaataataaagtttgtttctaaaataaatatatttcatgaaaatattttttaattttcatgaaaaaattttaaagatttttgtttggatttttcatgacttggactcggtttaaaaactaggactctgaccgggctttctgtacccggcaataccctgacccggtatttgcccaaatacccaggcccgtacccctaatttaatatacgattttgaagttttttaaattaaaaaataaggctacagaaaaaaattgaaaaaccctcgcctctcgtcctctcgcctctcgccaactctcgtgtttttggggactctcgcctctcgccaaactctcgctctcgtctttttggggactctcgcctctcgccaaactctcgctctcgtctttttggggactctcgcttctcgccaaactctcgctctcgtcttttctgagacaagtcacacccctggtgcatatgctggtcattgaaaacaagtcaatcgattgcctaatttgcccgattgcccactgagaatttttcaaatgacttattttgctgctaataaacattcgattatattcaccgaccaggcgcgcacagaaaaatcccgcggtcgcggaaaaaaatgcctcgaatcgtggtcgcgtcccagccctgccgaccattgacaatgaacatttaaagatcctagtgaactattatcgtaaattcacgagggtatgaacaacggtgctgtaaacgcagtccggaaaaaatttttgatattttatatgcgaatcattacccagatttttacaaaaatgacaaatctctacagtctgagtttgccaaggacgaattttgtttttactaaaaatcggacacgggtccgtaaccccgtgttagtgccaaaaccataacacatgcccggcgtatgtgaaaatctcattaaaaaatttttaatttttttacaaaaaattcccaaaacaaatttttttctttgtgcaattttt

SEQ ID NO: 42712 - DNA, 967 bp, Heterodera glycines
  unsure (1)..(967): unsure at all n locations
tgtaacgtataaaatttctcaaaataagagatagtcccttttcttggatataagataaatttaaaaattctctgtgaacttaaatggcgattgcgcaccgcacttcctatcatgctcgagagcatttgtaacgtataaaatttctcaaaataagagatagtcatttttcttggatataagataaatttaaaaattctctgtgaaattaaatggcgattgcgcaccgcacttcctatcatgctcgagagcatttgtaacgtataaaatttctcaaaataagagatagtcatttttcttggatataagataaatttaaaaattctctgagaaattaaatggcgattgcgcaccgccctccctctcacgctcgagcgcttttgtaacgtataaaatttctcaaaataagagatagtcatttttcttggatataagataaatttaaaaattctctgtgaaattaaatggcgattgcgcaccgccctccctctcacgctcgagcgcttttgtaacgtataaaatttctcaaaataagagatagtcatttttcttggatataagataaatttaaaaattctctgtgaaattaaatggcgattgcgcacctcacttcctatcatgctcgagagcatttgtaacgtataaaatttctcaaaataagagatagtcatttttcttggatataagataaatttaaaaattctctgagaaattaaatggcgattgcgcaccgccctccctctcacgctcgagcgcttttgtaacgtataaaatttctcaaaataagagatagtcatttttcttggatataagatanatttaaaaattctctgtgnaattaaatggcgattgcgcaccgccctccctctcacgctcgagcgctnttgtaacgtataaaatttctcaaaataagagatagtcatttttcttgggatataagataaatttaaaaattctctgtgaaaataaa

SEQ ID NO: 42713 - DNA, 963 bp, Heterodera glycines
aaaattagccaaaaatcgcaaaatttggtcattataaatttgacaactttaatgatgtatcataactttttctgaaagcctttattcgatagccctatctattagtctgcaaaatttcaaaggatttggttatgtttcaaaaaagtcatgagcagaaaacctcaaaaaattgcattttgaccatatttttgaatcttgggttctcgaatgatacaaagaatatttgaactttgatgctttaagaaaaagttatgtattcattaaaattgtcaaattattttacagtcgtgtcttttttggcaaaattttgccttttattggtcaacattttaaaaattttgcccctttttcttgaaattttaattttttttttttttggaagggagaggagttcacctccctggctacgggccagaaaccaaagtattaatgctctaattgagtggttttttaatttaatgaaggttctaagtgcatataaatcagggcttccatcgaaaatttttctaaagcagaacatcaagtccaaaaaataagattttaaggtcaaaaataagaacatttcgcaaaattgcttcaaatcagttatttttacaatttattcgatcaaactattaaatacaatatttttcacctcctattattgatttaacaattttggggaggaaataagcaaagcgtatatttcagtgcattcgggatcaaaaaaaaatcagattttaacaatttttttgcggcgaatttttccaaaaaacttttggtgaatgggcaagaggagagggggtccggcggtgccggtaggcgccgccggaaaaaattttgtaatttagttttgatttattaacagattttcacaaaaaatgctaatttttgcaattaaagccaagtgacgacttttttttcgtttttaaaaacgctttttgcggcgcgtttcttccaaaaattttgggagacagggggggt

SEQ ID NO: 42714 - DNA, 981 bp, Heterodera glycines
  unsure (1)..(981): unsure at all n locations
tcatcgtcgtcgccatgcncggaaccaccgggtggtccaatctcggcaaagacccagtccagtaccgctgctggttgctgctgctgttgtcgtagttgtacctggagggggcggagaatttgaaacattgaaataacaaaattattaacttttttaataagaagatttcatggaaaaaatgtttcaacgaatttttcaaaattttattatgaattactattttttgaaaaaagtttccaaaattccttgaaattttcttattaaaaatttattaagattttttaaaaaaatttctaagaaaaaacggcattttccgaatagatattgggtccaaaaaacaaccacggcaaactggaaaaatctttaaatttttcaaaattcattcttttcattcgtaccatgccggcgccgctgttggccatggctgttgttgactattgtaggcaaactgttcatgcccagcggagccgtccacaggctgaagctgctgttgcggctgctgctgatactgttgaggaaacatttcgttgggccccgcgtcgccgtcgtttcgcatgcgactccgttgttgttgctgttgctgctgtttttgttgttgtaccaccgttctgcgcatgttcaactcctgctgcaactgtcgctcgcgcaaatgtcgttcccattccgccgcgtcggtgtgcaggaaacgcgccaggcgactgcgatgacgttgctgctgtctctgctggcgtcgcagtgccgctgacgcggcggcattgtcgctggcaccggcgccgcgcccgccgaagcggtcacggtccgtctccccctgcggatggggccagtagtaagtggtgtcatcacgctgctgttgcggcacatggcgaccgcattccgccgtacccggcatcgtggatgacagcaaagcgcctcgatcatagtgccattgttgatggggactcgtcgccatgcggacacaatcggatgacggatatgcctctg

SEQ ID NO: 42715 - DNA, 957 bp, Heterodera glycines
tgggcagagtgcggcgacacacggcgctcaaatgggtacatgaacagcacgcgctcggccgactcgtccttggacaccaaaatgacgccgagtggtgtcatggcggcggcggcagaggaggaagacggtgccatggcggaagacggagaagtggggccaaaatggcggtggtggtggaaagctaaaggaaagaagtatgggccgttcgcaatatttattcaaatatgagcagttttagccgctattttaagtcaattaaatgtttcggaaataaaagccaacccataaatttattagcgtaattgtctcgcaattaacataaattatgcatgatagttacccaaatgccgctgcgtttgttgctgatccaatggcaccaaaacggtgccgtcggcggaaagtgttggggtgacggacaacgattggtggacaaccatttcattcaagacattttgtgtaacgtaaatttcaatcattcgatttaaatgaagtagaagatataaatggcaatagatgaccattttacgagacaaataaataaataaaaacccaaactcattaattttaattgtaaatttatgcatttgtattggcattttttgttgaagaaaaatgtaaattaaagttgagtatcaatctcggttcaccacaacggtcactctttcagcacttgccatccaattccagcggaattccatgtctgcaatggcattttttgatttcgttacaaaagtttaaggaccaacccccgcaaaaacttgtacagctcggccccgtcgtagtcgtctcccaattcggcactcatacgaataaaattgccgatcaactgctcatcgctgtacacttgcaatgtcggaagggcgttgagagtctatttgggaaaatataattgtagaatattttttggtacttttttccgttttgaggccaatattttgaattttttttaatcaacgg

SEQ ID NO: 42716 - DNA, 1260 bp, Heterodera glycines
acattctgatctcatcaatgtttctctgcgctcatcgacggattgcccatgcaaatcaatcccagaaacaaggaagtgtggacgatggtcatcaacggaaatttcgactgcgcgttgaagggggggacgagcagaacaaataataaaccaccaattccggtcaccaaagtattctcgagagcaagttcagaagcacaaattgaaaatcaccaggaacatcggtaaggtgaaaagagcaaattaaataaatgagaaaagggagggaaagggactcgctaaataagcaaatcaatgccaaacaattgcttacggttacgccaattcatcataattcgactgtgttcactagtatggcatttaaccgaacaacgaccgatcttccttcgcgcaatgacaataatatggacagaacgcgattagagcgttatttctgtgtggattatgaaatggccggcatagtcgatcggctgtctgcgcgcttctggccccgaaatggatgccaaaaacactttttggatttggactttttgcacgggcactcaaacccctcgggagctgactttgtgcacttcgttaatgcttgagcatggcacatggataaaattcaatgcagagtctgtcaaaacaaaaccgaccgccaaattgctttatgggagtttaggtgttaccaaaggggagaaatagacgaattcaaagagttggcgcattggttggatacccatgttaacgagggcccaaaagctccaaaagtggtcagttggagaagctgtgggagtcggactgacacctctttaattaatcccactccctcgtcaaattgggtacccaaagatgaaatagtctggcggggtcgagacccaattccatgctaacgaagtccaggggagtcggagacgacaatttacgaaccaaaaatgacctcccctcatttatgtctcattgtcaactaagtcggaactgcaaattcttcaagaatgtttagtgtttggaatgctctattcaaataccggctgactacgacccggattcagaagtgcacaatgaaatttggacgtgccgtttcaagccgaagaacaaccatatcccgttcatcaaaaaattgattccgacagatgaattgaagtcctatttgaaacaacaccgtggaaaattcggacttttcgctcggctggaatacagaagggaattcggcggaaacggtcgaactgtgggatattgaaaaattgcgaaattattgacgggaatgaacaagaaacccga

SEQ ID NO: 42717 - DNA, 1503 bp, Heterodera glycines
  unsure (1)..(1503): unsure at all n locations
aacagatnntaacaacaaaataatttgaaaaacaaaattataagttttttgaaggaaaacaaaattcaaagattagtttcaaaaattttcagggaagaaaccaattaattagtaaaataattacctcgtttcgtttcgtaaatattttgattaataaaattaactgacctcaacctcaacgaactgtcgatgaaagaccagcaaatgcaccgctctcatcacacattcgtactcaatacaaacgacgaaagaaaatcgtccgtaattttccaaggcggcgcgaaaacgttccgaaagttcgctgcgggaaatgaggacgttttgcgacttggagaggccattggaagttgagggggactgattgtgagcagaaatcggtggggttggtacggactgagaagccaaattatgagcactcgaactgcgcgaagcggaagacatggccgagggcagcggaagaccatcacttttgacagcgattttggcactttgggcggaatgagaagagtcgaaattcaaaaaattacgccacgccttccgtttcgaagaattctttcctggaaaacaaattcacgaaacagagaaagtgaaggagtacctgtgaaaaatgacgtgctattggacagattcttggtgtcggtttcgtcttctgacggtccctgcagcgactgattgtgggagggaatgccatcggtgggcgaccgcgaggcgttttcctcgccgatggccacgtccaccgtcgtattgtccatcgttattttagccacttcgtctgagcagtatcgttggtgaccaagggaagccctaacaattccgaaatcaatgccaaaaacgcaaccgttacttcgattggtgtgcaaatgcgtccataactgttcgcactttgtaattttggtgcccatttttcggctcattttcctctcgccgattggacgccattcgctgtttgtatttgaccataaaagccgcgcagcaccatccctcataagcagctaaacattgtgacaatggagagaaaagtcattgaaacggaacccgcaagccaaagcaaatcggcggtggatttgagcaggtcgatggccgattggtaggattggacagcggcctcaaacagtccggtgagaaaagcgtagtctccggtctttttgcgaagtcttccgatgcattttttccttaaattccctctcgataatttatttttgggttctcttctaccaataaaaagaaggaaacgtggaccaaactttttgtgaagggggtcgatttgcgaaaacaaaaaatgaaaattcaaaggagttgacggaatagaatttcgcaactcaatccctatgaaaaatgtaaaaattaccgcccccttgtccaaatatgaccctcttanagaatctcagttttggtcaagcgaaggagaagggacgtgcataccctcccttgnaaaaacgttcccccccccaaccctgccgtgaaatttaaaaaactttatgaacatagaaaatttttataaaa

SEQ ID NO: 42718 - DNA, 878 bp, Heterodera glycines
catcattaatagtaattaatactaattaattacatccactctatcgctgctgttttgctgaaaaacaacagggcctaaaatttcacaatatttttaataaaaaattcaaaaatttcaataaatacccaaattttggcaactctttcagcacacaaacccaaaacacccccacatatcatcatatcacacaccacatcacatcacatcattatcactcattaatcatccgcagaagaccaacaccaacaccaaaccagcagcaaataaaattgtgtaattccaacgccgccggaggcgacgggggggggggggggtcggctggcagcaaaaaaaagtgattgaaaattgggggataaacaaaaacaaaaaaataatgacgaatgggaggaaaacgatgggctctgctgggccagcgccaggaacagcagcagcaagcagcaaatggtggtgcactttgacttgaacagcagagtgaaaaagtgaacacaaacacaacagcagaaagaaaataagcaaaaaatcaaacatcaaattttaaagggggaaataattaggtaataaaaatgtaaatatttattaattccaataattaaacacacacaacatacatatgtatggatcagggaaggggagcgataccctcaaaaagttcggaaatcggaatctccgagggctgaaattttttggcaatcgaattcaggcggctcaaaaaatttcgacccttgaaaattgaaattccgagcccaaaaaggtcggcaatcggaaatcggcatgctgtcgtcccatccctgatatgcatattaattttgacaaaataaattttactaaaaaatgtaattcttttttccggaatttcattttatttcattttatttttt

SEQ ID NO: 42719 - DNA, 688 bp, Heterodera glycines
ttttgagtgacgtcatagcaccatttcttggggccaaattctcccaaaagtcagtgctcacaaatcccaatgtgcagcgaccgatcaattcgttctgttccccccgcccctcatttgctcgcatttacatatttatttatttgtctccgtccgtccatttactaactattagcaaattttgtcgacacgttttatgcccgggaattcccgagatcaatttgtctttttaaaattctgtcaatttatcaacatttgcttatccaagatgatacagaccataatagcctttcttaaaattcaatctaaaacatcaagccaaaatgctaatcacctgcttaatttgaaaagtgcgatccgccccattccagcacaaaatttgttgggctataactttttatagacttatcgtaggaccctgaaatgattaccattctgtcgattgatatggtatgagtagagctaatatttatattttttcctgagctcctcgtagcctgaaacacacgagaaaaatatgttttttttcggttgttgttaaactaatttccgagttattggcaactattttctagttttttagttttagcacctaaaaaactaaaaaaaccaactgttttcaacttatttggcgttttgctcaaaattttttaacaaaaatgcaataaaacgaaaaatacacccctaagaa

SEQ ID NO: 42720 - DNA, 954 bp, Heterodera glycines
  unsure (1)..(954): unsure at all n locations
agaagaagaagcgggacaaagcgtcgagaaagaggcgtcttctgacaatgagtgacggacaaaagaacgacaacaaaaacagtgaccagtaaagaaatgaatgaattgggaatgatcgatcattatatatttgacacaccgtccgaaaaaacgagatgtgtaccaataaatagagagtgccagagaaaaacattatcttttttctttaattttttgtctccttttggcgtactatctaatttaggaaaaacaacatttacttcgctatgtttagcttcttttctatatgttagatccacaggaaattttgcatatcgttagagaaaaaaattctgcatcgattaatgctgaatttatttttgttaatgctctatttcaaaagttataagaaaaacaaaattttaaggcctcataacttttctctggtacaccaaatcgcttagcatttgcttagaaaaagcttctcattatcaagagctttcgaaagataccaagattatccaatttggttggcaaaaaccttcaaaaataattcccaaatatcgtgattttttaatattttggacaaaaataaatgaaaatattcatgttgcacaacggactcgaaccaccaccctttgtctctttactatcttacaaaaaccactgagccacacatgcaaatcttttctggcacaggagctcatttcccggacgctgtgttgatgaaataattttattaagaggaattgcaaaatgtgtgtacatgtaaataaatcggatgtataaaaaatggcaaaatcggttttagagattaataaggtaatactaccgatggtagggggttgcagtgaaattaaaacatccaagaaaacttattcacttctttttagacttagctcgtcaagagctttcggatgataccaaatttttcaggattcaatcgttttaaaaaaattagaagtgtncatctct

SEQ ID NO: 42721 - DNA, 1610 bp, Heterodera glycines
ttagtaggctagagtctcgctcgttatcgaataaaccagacaaatcgctccacgaactaagaacggccatgcaccaccatccaccgaatcatgaaaaagctatcaatctgtcaatccttacggtgtccgggccgggtgagtttccccgtgttgagtcaaattaagccgcaggctccactcctggtggtgcccttccgtcaattcctttaagtttcagctttgcaaccatacttcccccggaaccggaagactttcgtttccgggaagctccccaccagggcgaataaatccgccggcggatcgctagttggcatcgtttacggtcagaactagggcggtatctgatcgccttcgaacctctgactttcgttcttgattaatgaagacattcttgccaaatgctttcgctgtagtccgtcttgctacggtccaagaatttcacctctcacgtagcaatacgaatggccccgtttgtctctgttaaccattatctcggtcagcaaaaccaataaaatcggaccgaaatcctcttctattattccatgcacgaacattcaagcgaaacgcctgtttgaagcactctgatttgttcaaagtaaactcgccagcccaccgacgccgaccggtaaaggccaacgccggggagagaccggcagaaaagccaaccaaaccagtaacacacaaagtgtgcaccggacggctagcacagatccaactacgagctttttaaccgcagcaataattctatgcattttgagagctggaattaccgcggctgctggcaccagacttgccctctcatagatactcgttaaagggtttaaattgtacccattccgatgaccggcctcataagagatcggtctcgttatttctcgtcactacctcctcgcgttgagagtgggtaatttgcgcgcctgctgccatccttagacgtagtggccatttctcaggccccttctccggagtcgaacccttatcctccgttacccgtcatcaccatggtagtcagatacactaccatcgaaagttgataaggcagacacttgaaagacacgtcgccggtacaagaccgtgcgatcagcttagttgttctgagtcaacactggacgcccggagggcgcttggttttgtggcgaacaaatgcgctccgctctggggagattggagctttggtgcatgtattagctctagaattaccacagttatccaagtaagaagtcaaggtcaagtaaattatagctggtgtaatgagccgtacgcagtttccctgtctggcaggttaaacttacacatgcatggcttaatctttgaaatgaacacatcagttcaggcaggatcaaccagatagctgctagcgagcgttgccaagcgccgctattacagccgtcttgtaaagacggatagtttcagcagaaacaactccgttcagcgcaagcgtgcgcatgggcggcgaaggcgaccgagcaagtggtaatgacacagcgctggccaggcatccgagcttcccggacttgggaagaaccatctcgccgctggacacagctccgagggcagtgcacaggcactcacacgagcactccggatttcccggttaggacacttcctca

SEQ ID NO: 42722 - DNA, 958 bp, Heterodera glycines
  unsure (1)..(958): unsure at all n locations
caataaattggttgtaaaaaacttttgggtattgaattattttttgaagtgagtcaaacaccctattagtgctttgctgtgccgagaaccggcaggcaatggatggctttaaatctgcaagaaattagatttgcaataagtggttgtaaaaaacttttatgtaaggaattattttttgaagtgagtcaaacaccctattagtgctttgctgtgccgagaaccggcaggcaatggatggcttcaatctgcaagaaattagataggcaataaattgttgtaaaaaacttttgggtatggaattattttttgaagtgagtcaaacaccctattagtgctttgctgtgccgagaaccggcaggcaatggatggctttaaatctgcaagaaattagattggcaataagtggttgtaaaaaacttttgtgtaaggaattattttttgaagtgagtcaaacaccctattagtactttgctgtgccggaaccggcaggcaatggatggctttcaatctgcaagaaattagattggcaataaatggttgtaaaaaacttttgggtaaggaattattttttgaagtgagtcaaacaccctattagtgctttgctgtgccgagaaccggcaggcaatggatggctttaaatctgcaagaaattagattagcaataagtggttgtaaaaaacttttgtgtatggaattattttttgaagtgagtcaaacaccctattagtgctttgctgtgccgagaaccggcaggcaatggatggctttcaatctgcaagaaattagataggcaataaattattgtaaaaaacttttggtattgaattattttttgaagtgagtcaacaccctattagtgttttgctgtgccgagaaccggcaggcaatggatggctttaaatctgncagaaatagattggcaataaagtggtgtaaaaaacttttgtgtaaggaatta

SEQ ID NO: 42723 - DNA, 747 bp, Heterodera glycines
  unsure (1)..(747): unsure at all n locations
tctctgccctatgagagagccgtaaatcattcactcgttttggtcaatttggtatcgatttgttttgtacatgctattccattccgatgctaagaaaatttcgaccatttctgttcccggaccctccaaaaaattgagacttcaaatttcattggtgactttcaatttgtttccatgtatttacataagccgtttgaaccaaaaatgtgttatttgaaaaatcaaagtttctattttttttgttcaaattcggacctgggattgaattggcggatgaaattggtactgtattcgtgatcagcgatccctaaaacccttaaaaaaaatttccacatctttttaaatttctaaaaatttaagggtggtttaccatcggcgtcattcttgcctttgtttttctaaaaatataatttaacaaggcttaatccaattttacatattgcacatttttttttctcttctgttgtattacatattaacaattcttctacacataacccttgaaatggtggagtcaattcgggtgatcgctttgattgatatgggtaaggaagggaaagcatttttttggcttttttccaatttatgcattcaatcactgtttacgcgtcctcaatttccttttggccataatattcctgcttggtcaatcaatgtctaaaaaacaaacacaaaatttggtgtttttccggtatattcattagaagataattttttttgtcaattgcatttaacaaaganatttaa

SEQ ID NO: 42724 - DNA, 589 bp, Heterodera glycines
  unsure (1)..(589): unsure at all n locations
gggggggggggaaggcccaccacgaggccgcgaagcggccgagtgagtaccttcggtgcaggaaaattattaaggaagagagttcattatttatttgtcttttgcataattaattcataagtatttttacagaaactgctctgaaacgcaccaaattttatttacatgttagtttaggcactctgatgcttttctatcaaaaagggagatgaataaaatttttaaaaatttttaattcctttttaaacaggccaaaaagtttaggcttaactttttagtganaattcaatcactcatttttcgagtagtgatcagaagcgcaccagattttgcaggggcctaaaaaggtcaaggaaaggcgtctctgcgttgatttagcagtagtacctatgaatttaaattttctatgaatttttaaagttttttgaaatttttttaagtgcaaaagtggtggtgtctgcaaaaaattttcaccgggtttaaaaaatctaggaaaattagtaagcattagtagtgttctgatacgtattcctgcataatttggtgagcccctgatcaattacaaattatttatggacgatcaaatttt

SEQ ID NO: 42725 - DNA, 870 bp, Heterodera glycines
ggggatctctagagtagtatccctgcaaagtttggtacgcttctgctcaattagtaaaaattttcctgcaccgaaggtactcacctcggcctttttcgcggcctcgtggtgggccttcgccccccccctcccacgcccttctcccaggggtattattttgtaaagtctttttttcaaaataaacttttcaaaccccatttttcgcaccgtgaatgttatttttattgaattctgaaccggtttgagtagattagactagaaaaaattgaaaattttgaaatcatgtttcccactcccttctcccaggggtattattttgtaaagtctttttttccccaataaacttgtcaaaccccatttttcgcaccgtgaatgttatttttattgaattctgaaccgttttgagtagattagactataaaaaattgaaaattttgaaatcatgtttcccactcccttctcccaggggtattattttgtaaagtcttttttccccaataaacttgtcaaaccccatttttcgcaccgtgaatgttatttttattgaattctgaaccggtttgagtagattagactagaaaaaattgaaaattttgaaatcatgtttcccactcccttctcccaggggtattattttgtaaagtcttttttccccaataaacttgtcaaaccccatttttcgcaccgtgaatgttatttttattgaattctgagccgttttgagtagattagactagaaaaaattgaaaattttgaaatcatgtttcccactcccttctcccaggggtattattttgtaaagtctttttttccccaataaacttttcataccccatttttcgcaccgtgaatgttatttttattgaattc

SEQ ID NO: 42726 - DNA, 987 bp, Heterodera glycines
  unsure (1)..(987): unsure at all n locations
atgaaatgaattgaattcttttattgtaaatgtatattttttgatcaaaccaacgcactgaatgatatacaagactaaacttgttgccttttaaatctttaacatttattttacaaaatgttcacaaattttgttaattttaattttattttttccatttttatgtactgaactattttatttgggagaaggtaacaattctcaattttatgataacccaaatttaaaaaataaaataaaaagcatttaaaaatctaaaaaaaattgaaataaaaaaataacattgtggcttttaatatatattttataatttaaaattaatttttttttttggattaagttgttttttaaattggattttattcctaagtttgtatccgtcctcaacactttaaacttgagctaaaaattaaaaaaaagatggcaattaaacagctaataaaaaatattgacaaaaattactaaaataaattcaagtggattatttttgcttttgttaaaattattttaaatttttaatattcattattgaaaatttctacagaatttttatttttattcgtgcaaatgaatccttttttaatctgaattacaccttaatatgggcagatgcttacctcttttgcgcgactatctataaattttataatcttattaattattgaaatgggcaaaatatttatttcttttttaaaataaatattataatttaactgttctaacagctaattttaaattgtgagaatttcccttagcattcgaattaatcataaaaaaatttttaaacgttttattcgtttcgtatcaaattatgatttatcatcacacacaaaaattgacattcttaagcatgaaaattataatgtttaaattgtcatgaatagcaattattcaatccaattttaatttgctttattttattaatttctttatttattaataatattttatttaatcttttgtggagaagcaaaattgnggatcagc

SEQ ID NO: 42727 - DNA, 634 bp, Heterodera glycines
taaaaaaattcgaaaaagtgcagtaacttgcacacccgtcaaaagaattccaaggaaagtgcagacaaaaaaggaagcgaaaatcaatgaaagcgtcacaatgagtgagtgaccagcacatcgacaacaatcgttcgttctctgcgaagtttcgcccttcagacattcgcacttttttggagccgggagaacaaatcggagcccgaaatctcttccaaggcctttaaaaagggaagcaattggacaaagcacacaaaagtgagccaccacagttgctctgttctttatgttctgtcccacctgtttggctgttttgccctccttcagctgacgtgccaaatggaagattccctgcgcgtattcctcttctctgaacggtcgttggcatccatcgttttttctcttcggtttggtttcccaacttacgtcagttcccccttctttttcataaggccgagctctccgatcagttcggttcggtctcgagcttcgtcctcaattttggtccgattctcaaaaaagaatagcatttctctttgctccctaagttcggccctccttttttgaatttcgttcagtcgtgccaaatgttccgcgcgttgcgcctgtgaagggttgcatttttgtgtaggaa

SEQ ID NO: 42728 - DNA, 1460 bp, Heterodera glycines
ttaagatgttaagaaatactttaaatctgtaatacggattttgtcaaatttgttgtatatatgcatatcaaaatgatggtatatgaacgcgtatcgcggcacacccgcataattttttaaactttgttccgcgtcataaaaaaatgggaaaggtgaacgaacggtcagtcactaatcccattccaaagaatatttcaaataaacatcaaaaaataaatgaatgaatgatgtattaagagagggtaaaggaagggctgaggagggggcggagccgcgtcacctcggcgcctgccaatcttccgccacatttgaatttatttgtctaattgaatcaatagttaatgataggcatgttcaaattggttgtaatacatacgtacgggtacatggtccgcttcgaggcacccttctcccctcctccccacacccgcctcctaagagccaattgacgccgcttacgcggaagtgataagtagggatgcgatttttaggttttaactaaattttttgctcaattgatttgaagaaaggagctcaaaaaacgcatttctgcattaaaaattttcgattctgatgtcactatcggtcactagaaatcactattttggctacttcgtcactaaaatagttaaaaatcactattttggcgttttgtcactatttcaacattttttggaaaattacttaacaaaaatacaacaagaacaaatatataacagtaaacattttttaattttgacttaagatatgccaaaaactaaatcaaaatcggccaactttcgggaatggatccgacggatcggtgggaatgacttttattcaacaactggcaaaataatttattgccaattatgtgaacaacaggtaactgcggcaacatccacccaacaacaacaactaccaataaaaaattcacagatcccttgcacgcaattcgcgcatctcaaacaacaacagcgaaacggcaaaacacaaggcaaaattggaacggaacaaaggaggacaacagcagcactttttgacaacaccaaacaatgttccaaaccaattcaacctcgatttatgtgaagcttttgtctcagctaacattcctttccaaaaattggagaatgaaaaattgaaaaattttttggaaaaatattgtaaacgtgaaatgccccatcgaaccactcttcaaaaaaattacttgcggttaacttgtgaccaggtcactccaaaaacaaaccaataacaaaaattaattttagacaatggagaaaattaagaacaatattggcgactctttcgtttggattttgtggacgaaacaacagacaaaatgggaagagcggtggccaatttgctgattggaaaattggatggacaaaaatggcacaacccatatttgatttccgtcaaatgcttggagaaagtggacagcgcgggaattgctcggttcgtcaacgaaggacttggtaaaa

SEQ ID NO: 42729 - DNA, 892 bp, Heterodera glycines
atcatcaatcactcccataatttttatgagatccctttttttgcgttgtgcactaatatctgtcattagaaatgtctagaaaaaaataattaaaaaatgaggacaaaagcaaagccgaaaagtccccaaattgagtgttttaaaaaaaagtgaaactgtccatgtcagaactttttttaggaaatgagtttttgaaagtggcatggggttgcattggttgcgccaccttcactgacatcaatgctcaaattggacaaaccgccaaagccactgtggactgtaaagcgatttttggcgaaaaggatctggatttttcgaatgaatatttcaattattcaatgttggcaatggccatggcaacaacgacgaagcagacaaagcgcaaaccgaaaaagcttatcacggagaagccgagcaccacggtggcaccaaaaaccaatggggcatggtcagcagaaatgacaatgaaggcccaggagacgacgattgaaggggaaccaatcactggagatcagggttaggcatactgtatttactgtgtgttcgttaaaaagccatttgtgcatgggtatataacagtcagtatattatggtaaaagttgttcctggaaaattggacaccgaaacaataagaaattaaaaatatccttagaatttttgtgtaatgtctttataaaattaattattaaatacattgacatttaaatattcaaaaattaaattatcatgaaacccgagttaccaaagaccaaaaagtgataaaaatgaaaccaattctattatttggttcatacatataaatggctgagcatcagtaaattaattttattttctttgccaatttatttattatattttataattactttgtatcatatttataaaaattatt

SEQ ID NO: 42730 - DNA, 1200 bp, Heterodera glycines
  unsure (1)..(1200): unsure at all n locations
agggacgtttgaataagcaaggtnataatttgaaagtttattagtcttactagcctgaaaaatttcaaaaattttggttggggcgcaaaaaaacttttggcgtctcgcctttctgtactcaatttattttatttattttgacatatcgcaagctaatagagaacattttcgaatggtaacaagattatttgatcaaattctgatcacagccacccataaatgaatgtggacaattgaaacttattttgagtttacacgcatttatttacagacattattttacacgatgatggacaaatggacgtacataataattacattccttttttgatcaatgatcctatatttatcaattgttgttgtcgttgcatttggcccatcgttccttacaattagtaatttttccccacgtcgttcaactgatgcgcttgagcaatttcttggtccacatttggctgtcgtgaaacacttccatgtagcactggcacatgccacggaattcgtcctcaatttcgttgaagttggtcttccgcaatttggtcgtctcttccggcttgcacaaatttgtgtagcgtccccattcgttgaaagtgtcgccaaagccctcgaactgttcttaaatgggaatcaaaacatttcattttttgcatcttcctccattaccgatcaattcgtatgttttgtgcacttcgtggccacactggcgacatttgtacttcacctgcagcgcagtgtgtgtcaattctgtaaagattttaaaatgtaattaaaagcataaagttatgttgcaaaaaattggcaaaaaaaaagttcggaaaagccatgagaaaaaatctgtcataattgctttgaaataagtgctaacaataagcaagccaaaggccccttccctcgccaccgttttttttgggagagaccaaacgtaaaaatgccattttttaattcggttcctctaaaaagtcatgaagcatcaaaacacaatattatatatatcattgctttcgtgtaaattgtaacagctcacccgcgaaacacagagccacaagaacaaacgctatgacgatgcccaaagggatggcaatgataagcacaatgaacaaattcatgggttgactcggatcttctttggcatttttggcatcctcaaaatatgtataaaatgagaaagcgatgctccaatgagcattgagataccaacct

SEQ ID NO: 42731 - DNA, 655 bp, Heterodera glycines
cagtgcaattcaaagttcgctattgcatggtcaacgatttgacaaagtgttccaagggactgaaatttgccggtaaatctttggcccggggcgacttacacattgacttttgcccctctttatttacttattctctgccaattctctttctctctctccccatttgttcggaagcaattaattaattggtccgttaatttctgctgcctttgtttctcctaatacccattcgtttatcggtgggtaatggccattctctcttcctccttcggttggattaagtcgaattaaacttctaaagatcataagcatagatatgcgaattttatgttacttcagcagccgggttttaatgccatttcccacccattcgttccccccgggggaaactctccaaaagaaagagcgacgaatgaatgaatgaaagatgcgctcccttcccctccccccccccctccccttcagctgccatctgcttttccttctcctccttttcctagtcaatttcagcccttttgtgcctcatcatccatcccaaccataataatgctccctttccttcacttggactgatttcgtgcaaaagggcgctttgcatttgaagaggggccacaaatgggggggggggggggactgactcggaggggtacgttcc

SEQ ID NO: 42732 - DNA, 1369 bp, Heterodera glycines
  unsure (1)..(1369): unsure at all n locations
cgacatgtttgccgccatgcaaatgccatcaacggcccctaagggggnggnaaaagggngccgncaacaacaaaaacacctcgacgaaagcattagaggaagaggaggagggccctganganaangangangangaancggagcagcagcagcagcgaggggaacagaaaaggangacgaagccgcccgnanntgggcaggggccacgaaggcgacgaaaggggggccaaacaaaggaagcaaaggaggggccgggggggncatggcaaaacgnactgaganatnnaannnnaaaaaannaagaaacaggctaggtcggaggcttaggcttgcttgggaataggcttggttaggactaggcaaatttacccttctcccccctcgagaccatctctgctcatccactaccaaaacatatgacgagaaccatcccatgccgaaatcttgtattcattcctgaacataattttcaatggtgatctaaccggacttaacaaaatgttggactctcgacatccaattaatcctttggttgctcataattaaaaaaaagtgccattggtcaaatgagtgattagggtgtactactccttttcacctcttccttaagcgaccatcaacaacatgccaaagcagaagaaggctgctgctgatcggttcggtgatctcatgttcattgcttcttcttttctcattcatctcgctgttcttctttttcacgcaacactcatttcggcacacatccgcacaacagaatggcaccggcacaaccaaaacaattaaacatgatgttgatctcagcaacgaattcgacgacactgaagtgatcagaaggcttcgcggggcatattcaggtgatcaatcgcccctctttatgcatttggttgatcaatgattaaaaaaatcatttcctcggttttattttcctcaaatttattttatttaatcaaatatttctatttaaattaatgaattttttctcctaatttagcataattgatcaatgatcattttagttggttgttatttttctccatggccaacaattaaaaataattttgtcaatatttgttccagacatttttttaactcaattgatcaccaacacactatagtgaatgaatgactgatcactttttggctctctcaattttcgttccagaaattccccccccccccaaaaaaaaaactctccaaggatgtgtcaaagattgatgaattgagaatgttgcgattttccacctccgcctcgccgccccctcccctccttttgtttgttttccgcattttctccacttttccctctctctcactgttttttttgggacacaaaattggccaagtgcccattcatcattgcgaacacttt

SEQ ID NO: 42733 - DNA, 903 bp, Heterodera glycines
  unsure (1)..(903): unsure at all n locations
ttacagcttaactaggccctattaagcttatttccagaaaatctcgcatgaattctcatttttaaattttttatagatttttaaatgtttggattttttttggcttaccaaaacttcatcgaacctggttctttctattctctttcaaatcgccccaaattttttttacagcttaactaggcccaattaagcttatttccagaaaatctcgcatgaattctcatttttaaattttttatagatttttaaatgtttggatttttttggcttaacaaaacttcatcgaacctggttctttctattctctttcaaatcgccccaaattttttttacagcttaactaggccctattaagcttatttccagaaaatctcgcatgaattctcatttttaaattttttatagatttttaaatatttggattttttttggcttaccaaaacttcatcgaacctggttctttctattctctttcaaatcgccccaaattttttttacagcttaactaggccctattaagcttatttccagaaaatctcgcatgaattctcatttttaaattttttatagatttttaaatgtttggattttttttggcttaccaaaacttcatcgaacctggttctttctattctctttcaaatcgccccaaattttttttacagcttaactaggccctattaagcttatttccagaaaatctcgcatgaattctcatttttaaattttttatagatttttnaatgtttggatttttttttggcttaacaaacttcatcgaacctggttctttctattctctttcaaatcgccccaaattttttttacagcttaactaagccctattaagtttattccagaaaatctcgcatgaattctcatttttaaatttttaaaaatttt

SEQ ID NO: 42734 - DNA, 1295 bp, Heterodera glycines
  unsure (1)..(1295): unsure at all n locations
ggttttcgnaaaattttttgagcctcganaatgccatccccctgcccatggacacaaaaaatgtctatgggagcgcgtaaaacaccgactagaaagaaccccctaatttatgatcttttgatcatagaataatttgctctcggcatggtgaccacaaaagcctgatgtggtttcatggtttcattcaactctcaggttgttgacattctccatccgaatcgcgcttctgtgcccaaatccgaggtgcgtgagaggctggccaagttgtacaagacgacccaagatgttgtggttgcgtacggtttccggtgtcaatttggaggaggtcgcagcacagggtttgcaaatgtgtacgactcactcgactacgccaagcgctttgaggccaaatatcgcttgttgagggtccgttatttttccaaagccttagggcaacaaactcgccgttttccttttctgcgctagtattgttttccactttagcaaggcgttggtcagaaagtcgagaagggaggacgaaagcaacgcaaggagcgaaagaaccgccagaagaaagttcgtggtgttaagaaagtgaaggttcaagcgggcaaaaagtgagcaaacggagaaatgacaaagaaacgagggatggagacgatgtttggtgttgttgaagttgcggccgagaggcttctattgttattcttcactcgttgaaaaaatgaagaacaattcactggttttcataacgtaaatagacgacagcccaactaacactaaggattagggttcgtattaagttttaaaacggtacgtaccaaatgataatatcacgccaattacgctttaggaattactttaattacaatttggactattattttccagtatgatttggcctaatacgtatttgattgcccttaactttggctagacttcggcctttctcaataattcgcattccgtcgttttttatggcctttgccttaggaacatcccccacctccctctttgttcataagtacactcacaaaccattggctttttttattttattgttttaagaaagaaaatggagtaatcgtaatcacaccaaaataaaaacaaagaaatttgtctaaaaaacagtgttttacaagtgacgttattgtttaaaattctgaatgctctctatccttttagagcggtcaagcgaaaaattgggggaaggagaagcacttaaatgaccggcatcacttttggtagaataccagaatgtgtttggataaaaacaaacgcaattccattcataggacttcctgaggaaatgaaaa

SEQ ID NO: 42735 - DNA, 1518 bp, Heterodera glycines
atttgtgccattgtgtggcaaataaaaaatgtctgttgatcagcataataatcatctgaatgacatgggtcctccgcctgatccggtgatggaagtgccgccgccaaaagagatcaaagtgttagagagcgcggtcgacattcagcaccggcgaacagaagcaagtggttcagaacagtacaaccattaatttgagtgctaattggccttaattaacgcacaatgcctggggatttaattcgggtttcaatggcttaaaattggaatggaatgtttgtgggcataattaaccccattcattctaaaattaataatttcaggtgcttgaccattactcacagttcaaagattttgcgaaaaccaaacgggaccggctggaggaggcccgtcaatttcagtacttcaaaagggacgcggatgagttggaaatttggattttggagaagctgcagacggcagcggttagttgaaaaaaacggaaacattttaacttaaacgagatcggaattttcaaacccgggaacgaggactgatgttggatagttgacaagaaacgccgttttattgtaccatggccgcgccggaaacggggattttcaggattcaataaaatggccatcataatgtaacaaaatcgacattccaaattattccgttttggaatccccttaattaatatatatatttattagttaaatcaaacctaaagcatcattttcgaattgcttacccctttctctctcccccaacggccgaacgtttttgaaacggggaataataaagggttttattggttttttgaaaattctattggattttcaaattatataaaagaaacatttttcaggaggagtcctttcgcgatccgaccaatttacaagcgaagatccagaagcatgatgcttttgttgcagaagttcaggtcggaaactggtgaagagaatttaattaattttggattgaattttcaagaaaataaatatttaaaaggcattcctttaatgattcatactatttaaaagtcagcccaaaattgtttttttcatcttggagaatttttttattgttcgaaatttttgactataaattttcatataaatttttcgtaatttatttttaattaataaaataatatttaacattttgtgggccaataaaaatttttgaatttaaattctttaagcttttctcttttttgtttatataagaatttaacaattttttcttcgaaatttggtaaaagttcttttaaaaattgctttcttggcattttgtctaccgcctctttcaggcccactcgaacgcgatcaccaagctggacaagacgggcaatgacatgatccagcatgatcactacgaaaaggaaaccattcgcaaacgtttggaccgtcttcatgagctgtgggaccgactgttcgccatgctggagaacaagggcatcaaactgcagcagacgctgaaactgctccaatttgtgcgcaaatgtgacgagatgctctactggatcaaggataaggt

SEQ ID NO: 42736 - DNA, 922 bp, Heterodera glycines
tctcgtgcttccgagtccgaggctgctcgagaccgaagtttgaccccgagagtcataagaggaaaaataagggagggactcgaagcaaaacgagactaatcaccagagaagtgattgaacacaatatccccccacccgctcactgagaatttatgtaagtctgtccttgccatatttgcgtcccatcaagtcattaaattaaaatgcttttgcatattatttgtatatgtgaaagctccacgttggaacatactcataggaggggggggggggggggggggatttaatcaatcttcctcaattatatttggctattgcacatttttgtttcatttgttccaagcatcttcccacctttcctattagttgcttttaaattcattatttcaataattttatttttaataaaatatttttgggtcatacaaaaacgttttgggactcataaaatcttaatggggcgcacaaaatgtcactgaacgtataaatagcatggaaaatgtaattaatgccttccaacttgatagggccgaactgaccggctctgctgcaacagcccacggcatcggccgacatgcaacaacagccacagcagcacatttcctcctcgcccgaactgctgaccaccatcatcggctcgtcctccttggccacggtttggtctggcaacatttgctgttgttgccgttgctgatggtgagaagaacaatgatggcattggcactgcggctgctgctcgccaggatggcaacggtggtgcccgatttggtgttcatggccagaggatgtgtcgtcttgccgcatcctcggtagcagcaattccgcggatcgcgagcagcagccaccgccgccacagcccgtgccaccgcccgcggcgtaataggcctgggaaggcaaaacgggtcaaatggacaactgtgag

SEQ ID NO: 42737 - DNA, 1525 bp, Heterodera glycines
  unsure (1)..(1525): unsure at all n locations
tttttaccgggcagaagggcgcgtttcttcaccaaacagcgaataacgcacaatgcgtcgtgcagagagcgctcggcttcgtccaacaccaatttgctggagccgcgaaccaaaatggacacagcgcacccactctgtttaaggccggtcacctgaaaatagttacaaaaatagccaaaaaggagagtaaaactccaccgactttgaggactttcccatcagccgtctcaatttcctccaccaaatcggccgttccgagcgattccgggacaaaatggtcaacggatgccaccgggcgacacccgaggattttggcatagaattcgatgtcatcccgctcgatgtctttgatcaccataattttcatttttgcgaaaaaatgcagcgccatttcgttgatggcatcgctaaagaggataatgttaaaaatgaaaacatgtcggaaaacgagtcagcgttcatcaccgcttaccgtaaaatggacttttggattagcagcacattgcacccggcctttttgatttgcttgcacagttccaaaatgtaatttcgttcttccttcagcgcacggtccatttgagcatagtcagagatgaccacttgattttccatctgaaataccaattaagtattgggaaaaggtagccaaaatttttttttttttgaatttcgcttaattgcaagcccaaatctatgaacccccccccccccccccccaccgccccattgtctatgcatgaaatggacgtacgttgggctttggtggtgagatttggaattggatgaggccaatcttcgccttctccacccgcgcggggcctccgtggcccatcgatttctgatcgatcagcgcccccttcatgagctgcgactcctcccccgtttcgcccaactttttnncgnctttnntcnncttcngnttgncncttgngtcctccggtgnnctcntcngtttcttcnctgcctgcnccgcccttggtgccnnnngntgggnnttttgcgnnncgncctgnnnnnnggnnnntcgnnggnnncnntgggcnnncgnnngnnngtgcngnnngtgnnctgnggnccttcgngttcnnnctcgtcntggcgggcttcnccnnctcgtcgtcntcgttnntgtcnntgggtgtggccctttcctcgngnnctttttcngnnnntgtggccgcccgttggnntgngtcggnnntggtggtcggntgnnttcctttnnnnncnnnngtgctnnnntttggcgtnttngcgngcttnntcnncctttggcnngnngtttttctgcngcgtccnncnnngncccggccnncnccncnncngtggtggtnccctcgcccgcctcnntgtcctgcgccttggncngctcgnccnnctgnncngtgcnnttgntnnnngcnnncnncncnnttcttgccctttttgcggtgggntgcncnnccgncntttggttgngnnttgtcgccccntcgttggtnnttgtcncttctccgttgcccgnttggntcnttttgtccnttcc

SEQ ID NO: 42738 - DNA, 680 bp, Heterodera glycines
ttttttaggatttttcctgccaatgtttgcgttacatttgtcaaaatgtgagccgattattcaaatcaaatgaatttttgcgaattgatcagaatttactttgtgaaatatttgaacgtgatcagttgatgatcaacgatgaatatcaactttggcaagctgtaattaatttaaattggaattatcttacaaattaattaatccgtttgttttccatcattaggcactccgttgggccaatgaaaagtgccgtcaaaaagcaatcgaatgttccgctgcaaatcgtcgtgctgcgcttggcccggcactgttcaaaattcgccttcctctcatttcaatggaggattttactgaaaacatctgtagcaattattaaaactaattgaaattaatttatgtatttttgcagtttcttctagaattctgacaaacgatgaaattgtttccatttatcaattccattcccacccgaatctccgtgatgtgcctgggcttaaaccgttgaaatttccatggcatggaagaatttctgattggaacatatccaagggcaacagagggaccctggcgatggaaattgagaaaatttctgaattttcacgagagaaagtggcaagtgagcggaacagtgaaatcgaagtgctcataaagggacttccgtggaaaatatcggcacaaat

SEQ ID NO: 42739 - DNA, 686 bp, Heterodera glycines
ttgcccaaaaattgtttatctcttgtttctccggtggatttgaccgcaaagtggctacctgcttttgccgtctccagcatgctctacctcacactcacacaatatttgaaatgctagctaaaagaattcttgcccaaaaaatggctatctcttttttctcctggggatttgaccgcgaacttggtaccaacatttgccttctctagtctggctctaccaaacactcacacgatatttgaaatgctaacgaaaaaaattcttgccgaaaaaatggctatctcttttttctcttggggatttgaccgcaaacttggtaccaacatttgccttctctagtctggctctactaaacactcacacgatatttgaaatgctaacgaaaaaaattcttgccgaaaaaatggctatctcttttttctcttggggatttgaccgcaaacttggtaccaacatttgccttctctagtctggctctaccaaacactcacacgatatttgaaatgctaacgaaaaaaattcttgcccaaaaaatggctatctcttttttctcctggggaagtgacccgcaaacttggtaccaacaattgccttctctagtctgggtctaccaaaaactcacacgatatttgaaatgaaaatgaaaaaaattcttgcccaaaaatggctatctcttttttttcttgggg

SEQ ID NO: 42740 - DNA, 1008 bp, Heterodera glycines
gattgagaaagaaaaaagttatggtcgaaaaattcgttcgacgacgtttcggctgacgacgttttttcctactccgaagggaggaagaggataaggaatggctgattgggatgagaagtgccgttaaaatatggcactgatggtgatgattaggacagttgggaaaatgaggacaatgagtggcattaatgataatgatgttttctgggcaaagagcaaaacaaatgggggggggaatcaaacaaataatgatgccgagaatggaagggaaatggaggagagaatactgattaaaagatgatagaggccgatgggatctgctgtttatccgttaataaatggtcatgagaattagaattcattcaaaaccgattaattcgattgccaaatgaaagtgttcacccacatttgcgcatttcgcgtccctgccaatgtgcggcatgccaaaagtgtccgtgccggtcctgcaccggtcaatgttgtaccaaaaggtcagtcgaagttttggcaacggaaaagcgcacagcgcggaccgcgtgccggccgcatcggaaaatgccgcatacagaataccatcatcatcccgttgatcgaacagcgccgctccgcccccgagtatggcaccggcactggcgacgccgaaaagggcgttgtcgtcgggcgcgcggcactgcaactccaactcggagtaggaggtgtacctgaagagaacagcacaattcgagcgttttttcactctctaactccataaaaatatgttttggtgggcattccgctttattttggctaatttaattttttactccccgcggggcatttcccttgaataatttcccaattttccccctgcccagcccctcgggaacaccccaacccactcgtggtttatcaattgaattgacttctccaaatattcgatgggattatcccccgcttaatccccctccgctcgcctgtcatcttccagacaaactctgaccaggcgcgtggtcagaggggagcccgact

SEQ ID NO: 42741 - DNA, 711 bp, Heterodera glycines
accccccccccccctcccaccttttttatgtatgaaacgaactgctccccaaatagcgcccctcaggcataggacggcattttcatgggaacaaatcccgcatgatgcatcgtttttttgcaggctcttctacacccgaccatgttggatgaacgacttcgtcaccgtgtggaacgaatgttggaacagatggcggaccagtgattatactcactgaatttggataccatttttaaacaatttaaaattgaacacatttaatttttgcatttaaagaaaattcttcaaattatgaaaaaatacaccctttgactaagttttgctgttattgttgaggaaaatctagctttatttaattttgcaaaaatatttatttatttcataaataaaagtgatttgaatagcacaattttattggatttccaaattaaattgaacaataaatgaatgaatatgtatttgaacaatgcttatacaatattaagaaaaagagatttgatttgaattcaaaacataattgagaagtgaagtgacggcaaaacgaaaaaacaaaagtggcacataaaatgaatgaagttggatggtatttttaacaaatggggaaagttttgacaaacatggaattggaacacaatacagaggacgtatggaaaagcataatagggggaagtcccccccccccccctcccgatcacgagaaaacaaatgatg

SEQ ID NO: 42742 - DNA, 587 bp, Heterodera glycines
tacaaggtcgacttccaaggacgggtatgccgatttgcaaggacataatgggaaaaattcattaattccaaggacattaacatttttattatatgcaatgaaatggttaatatttattcaaatggcttgtatttttcgctggaatgaattttaacgaatagttttttggtgccgataggcgccgccggggaaaatttttgaaaattatagtataattcgttaacagatttgcaccaaaaaaaggcggattttgcaattttgagatatggcgatgagcatttttaacttttcacaacacttcttgcggacgttttttccgaaagactttttgggaatatgggggaggggaaatttgttaatggatttatccaatattgatcatttttaactagagtgccacgggaccgggacctggtagcggacaactgagtacaactgagtaccgaggtcccggttttgaccgggaccgggactagtcccggttttttcccggttttcccagccaaaaattcccggtttttcaacccgaaaaggtcccggtcccgggtttgcccaaaattcccggtcccgtggcactctatttttaa

SEQ ID NO: 42743 - DNA, 621 bp, Heterodera glycines
cggagacctcgggagggcgacatgtcgggggtcgggtcggggtataggtccaaaaaacgtctcgtgtcgggtcgggggctcggggtaggggagcaaccctaaagcaaatcattccaaataaaataatacaaaaattaaattccataatataatacaaatgacaatatattagtcaattttaatttttgattgaaaaatagctataaatatgtttatttctttttttcttattattcagaaaaagatggagaatccaggaaaaaatatgtattttaattaatgttcccctctctcttttcattaatcattttgtcattcatttgttgcattttgtttgatattttgaaatacaaaaatattgataaaacatggactggatttcgttttatcgcattgccattcttgtctgatgatgatgccactgcttggtaacatgtgatttcgtcagaagtgatttcgtcagcagtgatttcgtcagtacgggatttcgtcagtgataataatcattttttacgaaaaaacatttaaaattaaaattcgttcgatatttaaatgcaaaatgaaattatttgctcggttgtcaaccgatatatgggccgctcatttgcatatcataaaata

SEQ ID NO: 42744 - DNA, 930 bp, Heterodera glycines
gtggttgagtcccagtgatgaaatgctgttgggtgagtcccagtgatggaatgctggtggttgagtcccagtgattgaaatgctgttgggttgagtcccagtgattgaaatgctggtgggttgagtcccagtgattgaaatgctgttgggttgagtcccagtgattggaatgctggtgggttgagtcccagtgattgaaatgctgttgggttgagtcccagtgattgaaatgctggtgggttgagtcccagtgattgaaatgctgttgggttgagtcccagtgattgaaatgctggtgggttgagtcccagtgattgaaatgctggtgggttgagtcccagtgattgaaatgctggtgggttgagtcccagtgattggaatgctggtgggttgagtcccagtgattgaaatgctgttgggttgagtcccagtgattgaaatgctggtgggttgagtcccagtgattggaatgctggtgggttgagtcccagtgattgaaatgctggtggtttgagtcccagtgattgaaatgctggtgggttgagtcccagtgattgaaatgctggtgggttgagtcccagtgattgaaatgctgttgggttgagtcccagtgattgaaatgctggtgggttgagtcccagtgattgaaatgctggtgggttgagtcccagtgattgaaatgctggtggtttgagtcccagtgattggaatgctgttgggttgagtcccagtgattgaaatgctggtgggttgagtcccagtgattggaatgctggtgggttgagtcccagtgattgaaatgctgttgggttgagtcccagtgattggaatgctggtgggttgagtcccagtgattgaaatgctggtgggttgagtcccgagtgtttaaaaatgctgttgggttgagtccccagtgattggaatgctggt

SEQ ID NO: 42745 - DNA, 1142 bp, Heterodera glycines
  unsure (1)..(1142): unsure at all n locations
taattgattcggatgttttatcgcgggttaattagagcacngaaaactggtttgaaatcgtgaagtttatcatttctacntcacttctcaaaatgttgataaattgcaaatatattttccaaaagtctgttgacactttntgaaaataaattctatactcatgtattttccacttattagattttgcaggcttattgctgcatgttctttgacacttcttcaaaataacctatgccctttattcgttcaaaacacaatctttgttatttcgctttggattgacaagcccgatgataaatagctcgagcgcaaaacgcgtgcatgtttggaaagtatcgttcataccaataattgaggatttatttttaaatgaaattttatgataaaccttattatctcagaagctatttaattgattcgaattttttatcgcggttaattagagcaacgaaaattggtttgaatcgtgaagtttctaactcacttatcaaaattgttgataaattgcaaatatatatttccaaaagtctgtggacactttctgaaaataaattctatactcatgtattttccacttattagattttgcaggcttattgctgcatgttctttgacacttcttcaaaataacctatgccctttattcgttcaaaacagcatctttgttgtttcgctttggattgacaagcccgatgataaatagctcgagcgcaaaacgcgtgcatgtttggaaagtatcgttcataccaataattgagtgtttatttttaaatgaaattttatgataaaccttattatctcagaagctatttaattgattcggatgtttttatcgcggttaattagagcaccgaaaattggtttgaatcgtgaagtttatcatttctaactcacttctcaaaattgttgataaattgcaaatatatttttccaaaagtctgttgacactttttgaaaataaattctatactcatgtattttccacttattagattttgcaggcttattgctgcatgttctttgacacttcttcaaaaaaacctatgcccctttatttcgtcaaaacagcatcttttgtgtttcgctttggatttgacagcccgatgataaatagctcgagcgcaaaacgcgtgcatgtttgg

SEQ ID NO: 42746 - DNA, 1070 bp, Heterodera glycines
atggtagtaccacacactttgtgttccatgaacggttccatagtcgcttgttatgatagtcatagttggggggcatgccctccaatgtgatggctttgggccggaaggttaaaacctcgtgtagggggtgacctatgcgcgtttttggctctccaaaaatggcccaaatcatcgctcaggagaggggtcatgcccgatttttttgggtggccattttctttcattttcgatcaaatcttattgttttcagttttcataaaataaaataatcaaaatcaattttagaaaaaatgagtcagttttctgatgattcccaaccccccgtgcttgatggtccttattcccctgttggtgatggtgggggcgaattgatggatgatgcacctccgctggaagacgttatgaaacgcctaccaatctccgttagtctttgcgaaaatgtcttaaaattttctattttaattttgcgaggtcttttcaggtcgagccatcggacaacaatgagcgcaaagtccaaaaggagccgtcgattacccatgaattggacgctgagttattcaacggcaacggatttgcatgtctctccgcagcacaggctgaagctggacggttcaaaggtgtggttataaacacaagatttttaataaaatttaaaatttattattgaattttttgatttatgttgtgtaaaattatttcttaaattaactattgtacattttgaacaaaatattttaaatgagccgtttagcgtttcgatttattggccagtttttgatgagcatttcgttcggcgcagttttcccagaggatatattgcgcaacctcattaccatgtgccttgcctatgcggttgaaggagctgagtcaatgaagatcacggccgaccacttcattttcctcctgacgtcaaaacatcttgactacgaagtggccgtccattttaaaaagcttgacaacacggcaactgagaggattctgactcgcttcgaaatggtcgaccaaagcaacaaagcaaaagaaaggccgtcaaaagtcgaggaaccttttgtcatagacatcacggcaat

SEQ ID NO: 42747 - DNA, 1128 bp, Heterodera glycines
  unsure (1)..(1128): unsure at all n locations
aatgggccgcaaatgtcggaaaatggcccttaagaaatggnccgcaaatgtcgtggctccgttaaaagttattaaaaaacgatggcttttttaatcgaaaaaaaaatttcaaaaatgaaatatntaatttgttttggttttctatttaattttattcccaaccaggaatttcttacaataataaaaataggcggattcataccgtcaaattttaaaatgtaaaagtaaattgtttttacccttttcaaccgtcgcgttgcctccgtccgcgggcgccgcctcaaatgccgtggaacggacagtgatgaatttgacgggcgcactgcttttcacctattaaaattgtttctcaaaataattcaaaagcagcagccaatcgaaaaaatagtccgtccaaacacacccatttttggagacaaattttgtaagcggcaattttatgaaaattcaaaaaattcatgttttgcggtaaaaaaaaaaattttttttttcttggttaaattgaaaaaaatttgcgtttattcaaaatttgtcaatcaaaatgtgacaccttggcaattgcgttgcctgcgtaggtgggccgcaaaaatgtgtcatcgccaagcacggcactgatctgaaaaagttttatccgtaaatggttgcacattaaaaaaatttctcattgttggggtataggggagggaaattcaaaaaaaaaaaaatgttgtagaaatgcgaaaacagggtggaaaacaaaaaattttgcaccggaggagggccattaaacaacccagaatacaagggttcggtaccaaatagggattccgcccgacccgaacccaacgtacaacgtttttcagagccaaactttgttaggccgacccgaaacatggagttttcgacccgtgaaaatcccccctttttttggagtaacgaagatttcgaaccaagatgctgggcctggtgacaatgacacccgaattccgggctcttttccgacccccaaattttaaatgatttttttttttgcgcgcgcacattctacgcgattcgaacctcggacacgggtgacacgtcgcatagcgcggccgctcgcgngaccaccgagcgggcgaacgcgctggcacccgccagcacatgcgttgc

SEQ ID NO: 42748 - DNA, 770 bp, Heterodera glycines
atttaatggaatttttaccaagccaatgatattttaaaggactctttttaaaaaataacaggaaaaagcaagaaaatagcaaaaggcctagagaaattccacttgtaagttgtactgagtttgtggcaattcccatttaatggaatttttaccaagccaatgatattttaaaggactctttttaaaaaataacaggaaaaagcaagaaaatagcaaaaggcctagagaaattccacttgtaagttgtactgagtttgtggcaattcccatttaatggaatttttaccaagccaatgatattttaaaggactctttttaaaaaataacaggaaaaagcaagaaaatagcaaaaggcctagagaaattcctcttgtaagttgtactgagtttgtggcaattcccatttaatggaatttttaccaagccaatgatattttaaaggactctttttaaaaaataacaggaaaaagcaagaaaatagcaaaaggcctagagaaattcctcttgtaagttgtactgagtttgtggcaattcccatttaatggaatttttaccaagccaatgatattttaaaggactctttttaaaaaataacaggaaaaagcaagaaaatagcaaaaggcctagagaaattccacttgtaagttgtactgagtttgtggcaattcccatttaatggaatttttaccaagccaatgatattttaaaggactctttttaaaaaataacaggaaaagcaagaaaatagcaaaaggcctaaagaaattcct

SEQ ID NO: 42749 - DNA, 711 bp, Heterodera glycines
tgacagtctttcaatttgaattgcgaaacatttaataaggacatacatttttacaacttttataatttttttaaaggcggtgggacgatggacgtgtccattctgtggctgaacaatgccgtcttcgttactcaggcgatggcgggaaacaatcgcctcgggggacaggactttaacgagcgcatccaacggatgcttttgcaggcacttttgatcttttcaaattaaaaaaacaaaatgattgtttctttttagaaaattcgtgaaaaaacccgcaatgaactgacaaatcgagaggatgtgcaacaattgcggttggctgttgaggaggccaaattgcggctgaccgtaatgccggagactttgatcagtctcgattttcgctccattggccacttcgaatattttgtcggtcaaatggccaatttatttaaaatgatcgactgaccaatcccaattcattgcagttaacgcggcaagagtttgagcaccaaaacgtggatttgtttgccagcatcgttcagccaattcaggcggcgttggacgattgcgacattggtgcgcaggaagtcgatgaaattgtgctggtcggcggttccactcgaattccccgcatccgccaaatcgttggcactttcttcgggtttttactttctaacaataagtactttcaattccaatgttacacattttacaggaaatcgccaaatt

SEQ ID NO: 42750 - DNA, 1241 bp, Heterodera glycines
ttttggggtctctggatcacgaatctgacacaattttaatcaaatcctgtccctaaccctgaattcgaacaaaaagccgaaggttgaaaaattaaaattttcggaattttgttcgagtttgggttagggataagaattggagtgagattcgtagtcaggaccacacatgtccctggcaatttgtttaataaattcaaaaatatacattttgtaatcgtcgtttggtaaaatccaccattttagctattttttcgataaaacatggcataactttgctttaaagcaattaaattttacattcttggtaccattcgatagcccagctttttctctattagcttgcaaaatttcaataaattcaattaacttttcaaagttcttttttgccataatttaagttaaatttgataattttattttaaattttagctaaaatggcggattttacaaaacgcccaaggtgacggattttacgaagatggcctagagcaccctttgtaactagctcttaaaaaccttaaaaatctaaaatacatatttctttttttaacaattttttttatttttgctatccattcgttgtgccaatgtttccaatctgctgtccttcccatttgatagtcagccaaaatgagtgccaacatccacggacaaatgagggaggtcgaccaaaataaaatgcacctaaatacatatgagcaataataataataagatggcattttgggttgggaataagctgtgctaaaaatgccctttttattcggaagttttggaaattcacgggcacacaattggcacaattttttaatttcgatgcccccccccttcgtgaaaaagtaaacaaactttgcgttatttttctgttatgcctattttagacggcattgaattcattcaaactttcataatgaaattttttagggtatgtctttcaatttttaatctaaataatttaatttaatttaaaagaattatttttttaattttttgtgtaaattcaaaatgaaaattggtcatctattttttattttattttagctaaataaagtaactgaaaaattaaaaatttaattaatctatttgcaccaagtattcacctccccttaaacattaaaaagtttacaaaaaatttttttgaaaataaaaaaaattttccctctacatttttccaattttctacgtgaaatcggtggagcagaaaaaaaaacctgggaagaatattttgggaattttttttt

SEQ ID NO: 42751 - DNA, 863 bp, Heterodera glycines
  unsure (1)..(863): unsure at all n locations
ttaaaatntttttttcaaaaaattcactaattttttgaatcatattctgttaataaattgcattgaaagtttcaattttttccggtggcgtttatcggcacggcggacctttgaaatccataattttctttaaaaatttgctacagttttctgatcaaagtctgttaaaaaatcgcatgcaaatttttagtatcactttttaatctttggtttagatttttaaatttaacccttttaaaatatttgaaaattttctattgtacttggattttttcaaaatttccgagaaatttttgggcttcggaatgccatccctgttaggtacggaagaatgatgaattgaaattttatgcatgaattgatatgcgaataaattgacactcatccaattaattattttggttttttatgggtttttaattttctaaaactgaattactaattaagaacgagaatctcatacatatttttaaattatttttttaattatgcgtcgatttttatgagtgcacattcaaaaatttttttgactttttcataagaattttatataaatttataggcagaaattttttttttatactaggcattcgtatgcaaaaatcaacctaaaagaacagctcaaaaagagcaaataaatagccaaaacaaaaggggataaagctcaaaaagaacagcagctcaaagagcaaacaaataaatagccaaaacaaagggataaagcattcccaacaaataattaatcgtttcatttccttcctcaaatgatcacttcttcttcttctttcgcttatcattgctgggcccggcgggactcgaggacacttcttttgcatcgccacctaaattaagagcaatttgaa

SEQ ID NO: 42752 - DNA, 1079 bp, Heterodera glycines
  unsure (1)..(1079): unsure at all n locations
tttccccttttatggtccattccgtcagtgctgaaccgtctgtgtcgagtggtggtactgctggagggtttccgcttaatgtggagccgtccgtctttggcgcggcaatgcccgcaacaaattccccacagtcatcaaatctggcggaaaaagcaacggactctctgctcaacgggctgcagaacactccggctgtgacttacgaggatttaactgtcgcgactgacggattcagtcccaacaaaatcgtcggcaggggcggctacggcgtggtctatcgcggagtgtggaaacacacgccggtgaagacacattctttcgcactgttggacacgtttttttcaggtggccatcaaacgaattcaggggaagtgcggaagtgacgaaagggtatgtaaagcagaaatgcagcagttagggttttagagaaaaatagcgaatcttccaaaataaaaaaagctgtggaaaacccaattaaactgttacattggaaatcccatttattgcagcagcaaagggagcgaattcgtcagagtttacaagaattgaagactttggcaaagtttcgacatgacaacgttctctcactgtacggttattcgctggacgggcccgagccttgccttgtgtaccaattcatgtccaatggtacgcttgaggaccgtttgctatgccgggtaacttacaacggaaaccatttgtaatttttgcgtttaaaaaatcgaattgactgctgctcattgtcagcatttcaatctttcctttttcgaatgggacggagccactcggttgggccaaaaagctgtccatttgcgggggcgtttgtcgcggcctgcactttctgcacaccatcaaccaaatgccaatcattcacggcgacgttaaatccgctaacattctgctggacaagcattttgagccaaaacttggcgattttgggctcagcagatacggacaggtgatctaaaaggacagttggtccacgaaaatggccaaatcccacagagtctgcgtatcaacggnggnnnnnnnnnnnnnncgcgacaagcggccgatgatcgcttctcatgtgaagggaa

SEQ ID NO: 42753 - DNA, 1127 bp, Heterodera glycines
ccccatttttcgcaccgtgaatgttatttttattgaactttgaaccggtttgagtagattagactagaaaaaattgaaaattttgaaatcatgtttcccactcccttctcccaggggtattattttgtaaagtctttttttcaaaataaacttttcaaaccccatttttcgcaccgtgaatgttatttttattgaattctgaaccggtttgagtagattagactagaaaaaattgaaaattttgaaatcatgtttcccactcccttctcccaggggtattattttgtaaagtctttttttccccaataaacttgtcaaaccccatttttcgcaccgtgaatgttatttttattgaattctgaaccgttttgagtagattagactaaaaaaatatgagtgatcaaactttcactaaaaagttaagcctaaactttttcccaaagttaaaaagcaattaaaattttattcacctccattattgatagaaaaagcatcagagtgcctaaactaacatgtaaataaaatttggtgcgtttcagaaccctttctgaaaaaatatttatgaattaattttgcaaataaataaaaacgaaagactcagattttcgaaaaatttttttgagccagctagctcggcgctcatttcagtgtaagttagtcctttaccggggagtatccctgcaaagtttggtacgcttctgctcaattagcaaaaaatatgagtgatcgaattttcactaaaaaagttaagcctacattttttggcatatttaaaaagcaattaaaaaattttaaaatttaataattttcctgcaccgaaggtactcactcggcctcttcgcggcctcgtggtgggccttcgccccccccccctcccacgcccttcagagcacgacaaatatttcaacaaaaattttgaaaaattgactagagcaatcgaacgctaacggacgacctaatggaaaaaaatccccgaaggagagaatttaattaaatccattccttcgggggaccgtgccgggtgccgcggggtaagcagtgctggttcgtttcatcacggcaccgaaccttttggctagtcagcaatcattgcttaacttgccagatcggacgggtgcgcatgactt

SEQ ID NO: 42754 - DNA, 59 bp, Heterodera glycines
gaaaacaatgccgctaaatgtgtgggttgaaaagcaaaaatcctgtcagaaaattacaa

SEQ ID NO: 42755 - DNA, 1291 bp, Heterodera glycines
acaaaatttatgccaaaaacagcgatcagcaaagtgatcagagagttcagttggaatagtgccaaaaacaaggaatccaaggcgaacagcacattacaagtgttgtaaagctttctgaaatatattagaatattttagggatgctcaaaatctcgtagtctcgtttagaggatttatcagggttttggtcttggtctcgactctcgggggctaaccattgccaacattttgagtatttttaaacttcggaactttgccattgctcaattactcgccaatgttatcttttcaatacaattgaagcgattaatggcagatttccgcgtcattcctgctggctttttcgctaccagttctactactgtactcgcttacttcgactttacggtagtggcaaccaaaatggcattgaacagaatgccaaccgatgagagtgcacactttccacccataatcagccacatggtcaatgtgtgttggttttgatggaacagttcaatataagttaattgctggttttgtggcgattcggttgcatttaacggcattatctttggcgattcggtttcatttaacggcatcatcatcattaaaaataatatttaattttttaaagagagaaataaagaggggtgaaaatgtcgtcgaatttaaaaaatggatcgttcaccacggcaatggcctttatccgggaatgtcccctccaagggttgttttggttattaattaattattagtagagtgttcattttgcagcatatgattgctaacttggggcgtgctaataagcatgaaaaactcatttctaacttggtttgaggcttctaaggtccaactttttctgctgattttttgattaaattggtatgctgagcatgtaacttttgtgctggatttagcattttagtgcttattttgtgctataatgacaaatttgactaaaacaccgtctgccgcaatttagaaaaatttataaattttgaaaatttaattagtgatgtgcttttgcatatttaaaaaaggttaatttttcatttgttaatgaatgtcattatgttgaaatagtattccgtttttctttctttttttaatgagattttgaatgtgatgaattgcaatgttacatagtacatttctcagttcacttaaattatcaaatttgttgcctgccaattaaaaaagtctgccactcatcatctttttaatgggacgctaaggtatcccttacctaaaagaaaaattcaaggcacaaataaagggccaaattggtttcatgtatacaaaatattaa

SEQ ID NO: 42756 - DNA, 917 bp, Heterodera glycines
ctttcctcgccccctgctgccgtaaaacagtcgactctttccggctggtaaagttgaaatcggaccaatttccaaacgaccttaattaaattggcttacaattagcccattaattggtcaatttgctttggttgacctgcattttgctgtaccgccttcggttgctgctcattttggcctccactttggtcagccaaatgcaatacagcgactgcaacacgagcataagtgccaatgccatccaagtggacagtccgtagggggagaaggtgttccacatgcgactggagaagtccatgacgcgggcgtgcaccaaaaagaacagtttggtctgctcaaaactccgtttcattcccttttattcagtcaattccctacgctggtcactgggtaactgaatgagaagtatttcgcccgtttgtccgtgtattggaagaattggcacaccgtgtcgacacttccgttgtaaatcatgccgaaaacgccgtcccatgtgccatttgtctgcgattagtgcgagttatgccatgtccactaatcagcccccccccccgtcggcatttacaaattttccccaattgacgtgaccggccacatttttataatcgaccggctcaattttcaagcgcataaattcggccaaaaagccaatgacctgaaaatgtcaaaacacataagtaaattcagcatttgattatgaatggacctccgcgcaccacccggggaaagggcatgccaaagtcggacgcaaagtcggaaacttccggcaattgtcaaaagcctcgggcggagttcgggtgaaaagcacacggagttttctgctttgctgatttgaatagtcaatcatgacaaaataagaggacaaacagcttaaatgataagtgctatttgttagaaaaagcacgaaaaattggcac

SEQ ID NO: 42757 - DNA, 908 bp, Heterodera glycines
ttgttcaccaaaataatttaatttaaattaaaatttaaattaaaaatttttatttattattaataatacaaaacaaattaattaaaaaatgtaaaagtaagcaaaaaatgcacagaaaaataatgtacaccggccggattcgaacctgccacccccccccccccagaagatgactcagaatccccaatcacacagggattctgagggcttaacgatgtcaaaagtaaaatctgatcacgtattcgtgatcagcaacctcaaatagccctaatgacatgtttttggaagatttttgtcgaaaaaattttttcactcaaaaatcctggtcacccccctttggtcccgaatcccaaaatcacttttatttttatatctttttttaaaaatgtgataaaaatgtaaaataaaatttatattatagaggaaaaaattgcggatttttgtagtattttatatttccagaatatctttttagaaccgagttctaaatttttttctgaaaattcgaatttttccagaaattctggaataacttttttccttttttagatagaaattcgaaataaagtccataaaattctcctgatttttctctatttttaagcctttattcctgtaaaattgatcaacccttcgatttgttatgaatttttaaatattaggccaaaatcccgagggccaaaaaattgccaaaaaataaaaaatttttaaaaaattccaaaaattctgaaacttaaaatagacatcatattcgtactcagcaccttattttaccccagaaaaatatttttcacccccattttcgtccgaaaaaaaatttccgaaaatttctagggggcctagctcgaaaatttttgaaaatttacatcatgtagtacaccgttcgatagagcttaaaagctctacaa

SEQ ID NO: 42758 - DNA, 922 bp, Heterodera glycines
atttgttctccaaatcgtttcttccaaattcttatgctatttctatcaattttcaatatttttgcaatttccgtgtcactcatttttggattttcactttttatttcccaataaattttcattttttcaattttttgttcatctgttattcttttacagcgaattccgagttgtttcttccaattttcaattgttctatagctaactctgatttccttacgaatttcttcataattttgttgccattctttggatgaatattgccttttttgcttatattcatttatcatttcaataaaattctgtacaatttctaatttttcttcatcagtttttgatttgtaacatttttgttggttaagtcctaattctctaatccatttgtaaatatatttgcgatttgtccctaatttcttcactatttttgaatttattttattccattcttttgttgaatattttcttcctttttgctttattttttcttttattttataatattttgcaattatttctctttttttgagttcatttcgtttttcttcttctttttcttgccatttttctccaaatatttcgccaaatgacttttgttgcaattttttcttttctgatccaattttgacaattaaaaataatataattaataatagtagcggaaataatttcattttgtcgtctcgaaatgattttattttatttttcttcaattaaatgacaattcattttttgaggcatttaaatgatttttttctgattaaaaaactgaataaatcattattttacttaataaaataaggaaatcctgtttaatttcaaagaaataataataataattttatcttaatgacaaaaaaattgccaattggtaaattaatgaaagaataaaattttattactttctactggcgctcattcgaaa

SEQ ID NO: 42759 - DNA, 985 bp, Heterodera glycines
cccccccccccctatcccaatcttctcgcatggcttttgcttttgaccccccccccattcccccgcagtgctctggccgcatccccaagctctaccctgtcgcatttggcacataagaagcggctaagaaggggggggggaagagcatttttccgccttcctttatctattagcagcacaccccgtccgttctatcgttgaagggcggcgtggtaagcatttttttccgcttcaggcaaaatccttaatggatggtttttttttgttgctcgaggcgatttcataaaactatgcttttcgcgtcaccgccatttcttgcctattcccagcagtttctttctcaaagaagcgccattcatttttcgttttcgcagatgcatagtttgaagagtatgagatggggcaggggatggaagcggaacccatctggtgctgattttctctcttttctgtccaaactcaattaaagccccttttttgaggtttgtagctcatttgtcagtggccaaagttgcaccgccgcattcatggagaaaattaggattttttataaattgattatgtttagcgttggtctaataaagattagatagactttgatcttatttttacaataagatatgcttgcaagtgtctgtcacaaggccaaatgcgttggttcgaaaatgaacaataaacgaattgccaaaaatgccattaggcataggcatcattggacaaaaaaagatgctttataagcattcgaatagataaatttggacagaggcttgaaagaaaaagaatgacagtgaatgggcaaaggttaaaattaaaaaaaacaatggggaaaacagttatttaatgaaaaaaaaattctactgtccataagattaaaaaaaataataatttaaaacataaaattaataatgaataaaataattaatgaataatgagtaaagcaaagaggaaggtgaaaaaaagaccgcaagcgaggtgaaaataggca

SEQ ID NO: 42760 - DNA, 945 bp, Heterodera glycines
ggctgtcaaaaattttaaaagacagcctgagtgatcttttcttaatataattgtcagcactaataaatctaccaattcatgctaaagaaatgccaaaataataatgaaaataaaattttcacattctaaaataaatctctcaagagcctttttagaggcaaagcagtctaaattttcaatgagttcaattatagaacaaaaaattataaaaaattttgaatggctgtcaaaaattttaaaagacagcctgagtgattcctacttaatataattgtcagcactaataaatctaccaatccatgctaaagaaatgccaaaataataatgtaaataaaattttcacattctaaaataaatctctcaagagcctttttagaggcaaagcagtctaaattttcaatgagttcaattatagaacaaaaaattataaaaaaattttgaatggctgtcaaaaattttaaaagacagcctgagtgatttctacttaatataattgtcagcactaataaatctaccaattcatgctaaagaaatgccaaaataataatgaaaataaaattttcacattttaaaataaatctctcaatagcctttttagaggcaaagcagtctaaattttcaatgagttcaattatagaacaaaaaattataaaaaatttttgaatggctgtcaaaaactttaaaagacagcctgagtgatttctacttaatataattgtcagcactaataaatctaccaattcatgctaaagaaatgccgaaataataatgaaaataaaattttcacattctaaaataaatctctcaatagcttttttagaggcaaagcagtctaaattttcaatgagttcaattatagaacaaaaaattataaaaaatttttgaatgtctgtcaaaactttaaagacagcctgagtgattctacttaatataattgtcagcact

SEQ ID NO: 42761 - DNA, 1161 bp, Heterodera glycines
  unsure (1)..(1161): unsure at all n locations
accaattaacgcttttttctccncatggcacagcatccaatttatttatgggccgatgacgtgccttctgaacaaggaaaaatcggtgagtaaatgacacttngataatatcgcaaaatcttctaataaactgttgtgtccccgggtttaaggctttcagccatttcaaattaccgttttaggagagaggaatttattataaggaaaagcattgacaattaattatgaattgaaaaccgggaatatgtttgggtcaacaacaacctcagagcattttgggtgggtcagtgcaattggttatttgggaaaggattgccaaaggcaagaaatggcacagactgactcaccgcagacatctcgcagcccccgagggggaaattgagtggacttatatactggcacaatgggtatggactttggataggatgaggggtatgacggcataaacacaggaataagagagaaagggatggcatatgcaacagaggtgaatgggatagaaacggcacgataaatgagagggacaggattggcttgagattggatgaacagacggacaagtttatgacgggattgggtcgaggaatagggcaatttacattatgcacaaaatatggaaatttgaatgctgcggatacagcataaatggggcaaaattcgccaatatcatttgttttttcagtttcgatcgattagctgtccatttcgattccattcaatgccagcggtgacatcaaaataaattttaaataattaatttattactttactacatataatactttgattgtttttacttaatttattttatgacctctctgctgctttttgtacacagggctcacaacaaattttaaaaaaaattataataacaaaaggatggccaaatccaaatcgagtatcatgctaataaattttgttcaaaaatagacaatttacgaatttttcaattaaatttttaaaattcattactaaattaaagacattttgtgagcctttttttacattttttcatatatatgtattttgcatatcaaataaatttcattatttctttttttgtttatttcaccttattcaggacaagcatcaaattgaataaaaattgagttctaaaagtataaaatcaagttaaaatagagaaaaaaagaaaattaaaaa

SEQ ID NO: 42762 - DNA, 931 bp, Heterodera glycines
ttaatgtcaaaatgcccgacactagcgcatttctttagacaacgaaaattaattcctgaggaatttcccaatgccatgcgcagctttgttagaccgatgccgaaatggcaatataattggaaaaggacagacaacaatgcttttctttatatcagctgatggtttacaaaaatcgaaatacttcctgagtactttccaagaaccatgagaataaatatcgcactagcgccaaaatcgaacaaaaacgctaatcatcagaatcatcttaattttccccagtgatttgtgagtgataagaaaatagaagaaattcagggattaattcctgaggaatttccaaggaccacgtgcatcattgctacaacggtgccttaatggctttttaatgtcaaaatgcccgacactagcgcatttctttagacaacgaaaattaattcctgaggaatttcccaaagccatgcgcagctttgttagaccgatgccgaaatggcaatataattggaaaaggacagacaacaatgcttttctttatatcagctgatggtttacaaaaatcgaaatacttccttagtactttccaagaaccatgagaataaatatcgcactagcgccaaaatcgaacaagaacgctaatcatcagaatcatcttaattttcccccagtgatttgtgagtgataagaaaatagaagaaattcagggattaattcctgaggaatttccaaggaccacgtccatcattgctacaacggtgccttaatggcattttaatgtcaaaatgcccgacactagcgcatttctttagacaacgaaaattaattcctgaggaatttcccaaagccatgcgagctttgttagaccgatgccgaaatggccaatataattggaaaaggacagacaacaatgcttttcttatatcagctgatgttttat

SEQ ID NO: 42763 - DNA, 1091 bp, Heterodera glycines
atgccggccaagacgaccatgtccattggcaccattgtggacggactgatggaggcggccattgtcgggcacaaacgctacactggcgaagtgatgaacggtgggcaaattggggggggggaattgttattttccaaaatcataagtataatgacaaggataattcctcgggtacctttatttccaccccgagtcgttttcctctccaatttttttttaattttcaaacacaaatgttcaaaaaaaaataaaaatctatagctatttttatgatgaattgctatactagcaattagtttttccaaaaattttttcaaaaacttgaaattttcttttaaataaattttttgttttaattagattttttaaaaaaattttttttggggggggggatgcgtacggctggaggccgagaaattcaagcgagtgcatgttcacatttcgtacacgtatctgaaaaatggtcgatgaaggttatctggcaactggacactctgatcattgatgtattcagatcagcgggactgatcgaattctttcattaaaaacatgaacaccctgataagctcggaattagatcagcgagacttatcgattttcacatgtttatcttggcattcaatttggggattgcttcatgtcagataacaattaattaattgccgggtcccgctctgatcagacatttattagtacctaccgtcatcagcgggtacaatcggccgttacagcgtgctgtaacgtacagtagcgtctcattgaccgtagacggatagtcggggaagtgtacgaccggcggggacagagcggtgatcactaaaaattggccactggaccgcttctccagcgccagctgcgtgtccaagtcgacgtcctacaataatttttggccattttaatggagcacggctttctcagtgtcgtactcatttcgggacaataccatttccgtaatgcacagttacggtaacgcacagcaaggcgaagggtatggaatttttcatgggcctaatctcatcaccagggctgtcaaaaatatgcgcataaatatgcaaataaagtcgtgaaatatgcaccaaatatgaacaaaa

SEQ ID NO: 42764 - DNA, 1028 bp, Heterodera glycines
gatgtccggggctgcacgcgcgctacactgcaaaaatcagcgtgcttgtccttccccgaaaggggttggtaaaccggtgaaaatttgccgtgattgggatcggacattgcaattattgtccgtgaacgaggaattccttgtaggggcgagtcatcaactcgctctgaatacgtccctgccctttgtacacaccgcccgtcgctgcccgggactgagccatttcgagaaattcggggacggttagtgttccggcttcggtcggtatgcagactggaaccgatttaatcgcagtggcttgaaccgggcaaaagtcgtaacaaggtagctgtaggtgaacctgctgctggatcattacccaagtgattcctattcaccacctacctgctgtcctgttgggctagcgttggcacaaccaaatgcccccgtccgctgatgggcacaggtcgttcgagatgacttgtggacgctgcccaacattacggggcagctgcctcacgagccatgcttttggggtgcttccatacgttggagctgtggtataccgctcagtgctgcacatgtgaaagcctgtgtatggctgctgcgtggcaatgtgtcggtggcgggccgcctcgcttggttggttcgctgcgccaatgtgggatgcacgctcgtggggcgacctaacggctgtgctggcgtctgtgcgtcgttgagcggttgttgtggcaggcacataacacactgactggggatggtggtttcgttcccggtcttacgtgccgtaactagcggtgtgtttgtgcttgctgctacgtccgtggccgtgatgagacgacgcggtagggcccgtgcttggcctagcacgaggcttaagactcaatgagtgtcagctcgggcaccgccagctttttctttttttttcattatttttttttacacttctgttgaagaatgaattctagtcttatcggtggatcactcggctcgtggatcgatgaagaacgcaaacgactgcgataattagtgcgaactgcagaaaccttgaa

SEQ ID NO: 42765 - DNA, 1077 bp, Heterodera glycines
  unsure (1)..(1077): unsure at all n locations
agtttttctttttctcattttttatacttggaaatngggttnntagtgcgaaattaaaagagcgatttntcgtaataaatttatattttgaccgcttttaaaattttntcgttnttgtcgatattctataagttattttttataaattcgcaacttaccaacataatatagatagaaatctattaattaataaggggttttattttctataattaaatttacatattcattcaacaactgtttggcatataccccacccccgcatatgccaaacagttgtttgtcatacgtcaaagcccccatttatgaataaaattatagaaaagatattatgtggtgccaacaaaatgtatggcatttgacacatatcattttcccctttttctctgccataatcttcatttaacatactgtctattctacattgtcttcgtatcttttccgctatcctttatacaaatactattttcatacctaccccatattctcatatgactttccatattagaacagattgtgaatatgaaaaaattattattatttattgttaggggaatagtgactgagaacccattactaatgaaattttcatttttccattatttatcaaaaagtagcctcgggttcccagtcaatttttttgtataaagattaaaaaattttttatagaaaatggtaaatatttcaataaatattggttctatttttttctttgcttttgccacaagcttatgtggaggcaagccaaatgatgacaaaaatgctgcctacagctcaagtgtgccaagcgaaacggaaaatcccaaaaacgaagagtcgaaaaagaatttggtgataattacggacatgggggcggatgatcaatttacactggagatgatcagcgcaaccgaattggccggtaaagtgttggcaattgggacgacggagaaaggaagaaaagcggcattgtcacaatcactgggatttgagaaagtgccagtgtatgtgagaagcagtggcgaggaattcgagaaaatgctttttatgaatcccaaagcagagtaggttcagtttgcaagttgaaacgtatgtcgg

SEQ ID NO: 42766 - DNA, 1334 bp, Heterodera glycines
tttgcatccaaaattttttttttttacattttttaagcttttttatttaagcaaataaatttcggggttaaatgtattttttaaatcagatttatggtagattgaacaaacctataaattggtttaaagccgtattgagtgcaaaaatggtcgattttttcgatttaaaaaattataacttggcttaagaacatttgaatgcagttttttgcatcttgtagagaattgagtatagaatctcatattttgttcccatttttccaaaaaaaaatttaaaaatttagaaatgacatatttttaactgaatttttccaaaaaatgttgaaatatgtaggtcaactgtgatttcgaagcggtgaaatagaattgtagaataaaaatttagggaacaattattttatcttaagactattcgtaaacattttctttttaaaatgtagaaaattttgaataaattaagtattattgatttccttgaaagcccataatttatgaattaactgaaaatctctcttttttaaaccaatttagctaatttcttggtcaaatacgttaataaatcgcaaatatttaaaagtgcacaagcctcgcctatcatcaaaaattaaaggaaacctgttaaaacaaaggaaaaaagttaaatagaacaaaataaccgacactttgttggaaaatgtaaattgatatgcaaaatatttaaaaaaaggtttgaaaaaattaattaattgcttagaaacacctaaaaatatctaattaataataataatgtatttttaaattaatttaatctttttttgaaaatttaaaaaaacatcggtcacttgaaataataaattctaaaattttgtccaggaaaatccaggttttccgtgttttgcctggacctggatttttttttcacattggacctggacctggatttcctggacaaaaatccaggaaaatccaggtcaggaaaaatccaggttgccgaaaaatgacctggacctggacctggatccaggaaaaatccaggcctggatccaggtccaggccgatctctagtgaaaatagttcagggcaatgccgaaggactttcccacggcgcccttctcaaattcagttttggatattttataaatattaaagcttaatttatcacaatcatgattaattatgatacaaatgaatcgaacattttattcttcaataaaataaagaaatcaaaatagtaaggaatttatatcaaaaaatattttttattcagaaagtagtaataatagagaccgaatttatggatttttcataattgataaattttagaatagatgttttatatttcggctattgatatt

SEQ ID NO: 42767 - DNA, 1040 bp, Heterodera glycines
aatgtggcgatagagtacatggggttgttattaccatggtaattgcgtagtgaggggccgagttaagctttaaaatttctcaggttgccccaaatgctatccaaacgaacgtcagcgccatttggctggtggaaggactgctgaagagctgtatgagcagacacagcggcgtttatgggagttggagcacacgcatgggcttgaactccatgttatatggggttgtgagttgaagaaaaatttgcgcacaaatccgatgcttcggcaactatacaatgatgcgtttgtccctcgcccgctggatccacgtgaagatgccctacgtggaggtcgcacagagccatttacactgcagcacgtttgcacccaaaacgaggaaatcattctcatcgacattgtaagtggatggtacattatgctttttaagatgtattacgttttgaggtgagcctttacccctatgtgatgaaagcatttgagtttccggttggaaatccacatgtaataacgcgagaggttctcttatgtcctccaacggcccaaaccctggcaaaattcaaattgcaacacttttcgcggacttttgtttgtttgtgttttaccaccaaatccggatgttcgccctctacgaattcctctgcttccgtaccggaccaatgatggacgactgacttttcctctctgtgcacgatgcgctgattttcgccaacagcgcccatgcacacacacggaccgtttacgctcatggaactcagcgtatgctgtttttttctttaaagtctatgtcaaaaaattcaggtatactcatgtcgaattgaacaaagcactcgaacttggatacacagtcacggatctatttgaagtaatctaatcaaatgaagatatatttcatcaaaaaaaaaaaggtttggcattatgatgcttgggatggtgaaatgtttcgtggatacatgaaaacatttgtcggtatgaaagttcaagcgagtgggtggcctgcggactgtgaaaatgagcaacaacgggctgagtacattgttgat

SEQ ID NO: 42768 - DNA, 1339 bp, Heterodera glycines
cagtcgttcaacttcctcaattttggcctttgtcagtttgtcaaaaacttcctcgtccaattcgtctaaatggtcggctattttccctgcctgaatattaaaattttgtaatggtccataggagtaaaaaccctcgaaaaacgtacttttatgtcgtgttcattcatttccctcaaacgttgctgaaatttcggctgactttcaaggatttggacgaccaattccaaatattttgagtagtgaaagtcgtatagattctaaaatttaacataatccatcaaacaaatacaaataaattggttactttgtccggttcttcttcttccacccgattttcgttatcattcgctttattctcatgttgaaattccgtcttctgtcttttagctggcggaggagggcaagaaaccaaggaaaaagaaaacaaataaaatgggaggaagaaaaggagggattttagaagcaccattttatccgcaaaatgggagaaaaggaaaatttaatgctgatgctgcaaaatcaccaaaaataaaacggtactaatgtcgtttacagaccataaaaaaatagttttaataaatcatacatttaaacatttctagggggttttcggggtcgctgatcacgaatctgacagtctgtaaacaacataagtaccaataaaacaataattttcatttctaaaaaaaaatatttttttttaattttcaagcaaatattaaaattaaattacctatgtattaaactactaaaaactaaacctgattccgtacccttaaaaattccgtacagggtccggtccgacgccgggcactagcactttacttggatttttagcaaattttaaaaatttgtctatttttcatttttcgaaaagcccggatttctatccgacaataagccctagcaccataaaatactaattttccaaaaagaatcgcaattatactgtccattatacataatttctttttaggcgtttattggactttcttttatcattatggacatggacaaaatactcagtgatatgcgacagcacatatcgaatttgcaagacaaacttcacgtggcaaattctgccgttagcaaaggacaaattgtcaatgagaaaatcacactaatgaaggaggtacattttcatttttgacaacccttcaattagctccaaattgccctggtcatccatactaatcattcccagactaattaagttaatcattttataattattttcagtatcaagacaaaatcgcatcattgaactcgtgctggagagccaagaatagaaacgcattagtgcacaattttgcacaggaaagtcgccaaatcattgcac

SEQ ID NO: 42769 - DNA, 1208 bp, Heterodera glycines
tattttatgtggcatcattcttcgtcacttcacatcattgccccattattttccaaagatgctaattgcttcttaaatgcgcaatttgtaataaatcggaaataattagctgaataattacacattagcactgtctttacgtgaataaattgaatgccttttgtttcattcttaaaatgactgctctttttgctaaggcacaaatttttgtttgactaatatattctattgaaattccaattctttttcttttcataggtataaaaatgattcatttttactaattgattctttttatatacttattcactcattcgaattaatataattttaccaaaattcaatgaaaaagtacaaatttgcaaacctaaaactttcttaaaaatatcgactcgaaaataaaaagatttgaaatgtacaaaatttaaaaaaagtagttttcaaataatgcacttttgttattagaaacattgccacatcactgagattcgctaggaaacctaattatcatttattatcatttcaattaacatgcataaatttaagacgagctttttcctcgtcagaaatcattctaataaaaattcttcaaattcgaaaattgttaatcgtatttttgaaaaatgtttatatttataaaagcacgaataatctgaatttagcagacattcttaattaagtcagctgtcacaaacagcatttgtttgtttgtttttgctgcattttttacacatatattttttagttggacgcctgaaattagcattttgccataaaatccaatttaaaaaattgtttaatggagactgataaagacacacatatgcatttttatattataatgaatataatattcactaaataattttatttaaggaaatttctttataatttttaatttgaattaataattctatttattaaataaattaaatataaattttaaaaataaattttcataaataaatttaacagttaaataaaatgaaaaattttagttgaaataatgataataaaataatttttatgaataaataaatattttttattttttaaataattgaataataaaaaaatttaaaaaaaaattatcgttttcaaaaaacaatttgctctttcttttgcagcttcctctcttacgccattactttttgccagttcatttacatttgtagagtggcatttgctaattgccccattcattcgcc

SEQ ID NO: 42770 - DNA, 1230 bp, Heterodera glycines
atccgatcaagggctaagtctcaacagatcgcagtgtaaaagctgctctactgctaacaaccccctgaccagtagtcaagtcgtatacaagtgattttgcgccccgacgttccaccatggcacacgagtgctacggctttggcaatgtgcgagcaattaagcacgcacatcgggccagatgctggggcatttgtgctgcaccgcaagcggcgcataagtagtgcctcccgacaccggggagcaagaatattgctatcttgcctaggcgggattctgacttagaggcgttcagtcataatccctcagatggtagcttcgcaccattggtctatcgaccaagcacatgaaccaaatgtctgaacctgcggttcctctcgtactaagcaggattactatcatagcaacaggtctttagtagggtaaaactaacctgtctcacgacggtctaaacccagctcacgttccctattggtgggtgaacaatccaacgcttggcgaattctgcttcgcaatgataggaagagccgacatcgaaggatcaaaaagcgacgtcgctatggacgcttggccgccacaagccagttatccctgtggtaacttttctgacacctcttgctggaaactttacacattcaaaaggatcgataagccacgctttcgcggtccgtattcgtactgaaaatcaggatcaagtaagcatttgcctttttgctctacgagaggtttccgtcctctctgagctcgccttactgacacctgcgttacgctttgacagatgtaccgccccagtcaaactccccgcctgacactgtcatcggagcgtgtcgccgggccaccgcgtgtgccgacttatgacccaaatgggcaccctttcgggcgcactcccgttttaccgattaggtatagaatccatgaaagcacatgatatttcactggggccttgtcgttcccacttatgctacacctctcatgattcttcgcaaagtcggactatagccgagctcaataggttcttctttccccgctagatttgccaaggccgttcccttggctgaggtttactctagatagtatataggtgccgtggaaatctcgatgattcattcgtgcgcgtcggtagtgagacgacgaagtatttggctaccttaagagagtcagaggtactcccgccgtttacccgcgcttaatcaagtgtccttggcttactcttccgagcactgctcagaaatc

SEQ ID NO: 42771 - DNA, 1071 bp, Heterodera glycines
tacagcaacggcggcacttgcatccgatgcagctgccttgggctctctaaacctatttttattttttttctatctcttctctgaatggagttataacaatttttcacaacagttttgcatttaacagacacattctaaaatttctaattagtatagtagtccaagcctattattatttttttgacttgtctctgaatggggttatcccagttttagtatcctttttgaaaaacaaaaattttaataactgatacggtagcccaacatccattgccccaatgtacccttcggtttgtcaacgggagctaacaattgatgagtttgtttggtttcttttttaagcaattttccgtcattgctcaccaactgttaggcgtacagcaacggcggcacttgcatccgatgcagctgttcacgggctctctaaccctatttttattttttttctatctcttctctgaaaggagttataacaatttttcacaacagttttgcatttaacagacacattctaaaaattctaattagtatggtagtccaagcctattattattttttttgactagtctctgaatggggttatcccagttttagtatcctttttgaaaaacaaaaattttaataactgatacggtagcccaacatccattgccccaatgtacccttcggtttgccaacgggagctaacaattgatgagtttgtttggtttcttttttaagcaattttccgtcattgctcaccaactgttaggcgtacagcaacggcggcacttgcatccgatgcagctgttcacgggctctctaaccctatttttatttttttctatctcttctctgaaaggagttataacaatttttcacaacagttttgcatttaacagacacattctaaaatttctaattagtatggtagtccaagcctattattattttttttgactagtctctgaatggggttatcccagttttagtatcctttttgaaaaacaaaaattttaataactgatacggtagcccacatccattgccccatgtacccttcggtttgttcacgggagctaacaattgatg

SEQ ID NO: 42772 - DNA, 1073 bp, Heterodera glycines
acattgtaatgcatttaaaaaaattagaacatttagatttattaatttcttttctggataggaactcgagaaccaccgacacccaaaaaacgaaagaatctcgggcaagtcataattcttatttgattacatgtcaaatagcgcttttatgagtttgctacccagcctaaaaaatttcaaatatctttaaatctcaagtttgcatgagtttaattttaattttgaatttataaaagtttaaacaattatttttaaagcttttgttgtcttaccaattccctcccataaaacgagctttttgtttggcgatttttaagatttggttggattttcgcttaaaaagctcgccattcgcataacttttaatccccgctttttcctttcattctttcctctctcttttgttccttctcttccccttttccttttcttctttcactttccaccgattattttttgtctctatttcctttttctttattcaaataaaataaaacccaaaagagggataaaagccgcttatataataatttgcatataaaatttaggtgcattcctaaaaagtgcaaaaattggcgattcctaaaaaagtgcaaccaaaaaactgatttttcctatgattttttattttaattataaatatgttaaaatttaattaaattaatgcttaattacacattcttctaaaagacttttagatctcgaataaaaataataaagtttacctaatattaaataaaagcattagccagattactttgaatttttaaaatactttaagtcaattccaaatggactaaaattaaaaaataaatcaaattaaagaaaatatggaaatatttatatggaatgtatccgcttcaactcaagctaaattgcttgggcctaggcctcttttaggctttattttcgaaaatttatagatgccattgaaactttaaaatatttaaaaaattcaaagtaatctggttaatgattttatttaatattaagaaattttaattattttttattcaaaatccaacaaaatttaagatgtatttaagcatcaatttaattaaattttaacatat

SEQ ID NO: 42773 - DNA, 806 bp, Heterodera glycines
ggagagactatggatttttgggagactgacgacggaaaatgggggagggggggggaggggagggcaccgccgccagcacccattggttgtgtttggttggtgtgttgttgggcgaggcggacgacggacggtcgttggtcattttcacagtgtgtgcactgctgctcattgtgttgtcctccccctcgtggacaggtcgagactctcgagtcgtatttcgcgagaaaatctcttctttctgacggcctcgactcttgggcttatgttcgagttgtccaacgtgcccgcgctccttgatctgattgaattagacttctcgagaattgtcctggtaaaacctcggctctctagagaaaaatctcgaaattatgcgctcggtctcgttcgaatctcatcattatatgaaatctcgaccttaccgttcccgtgttatttgatgaagcaaattctagagaaatcaggtagttaaaccccattttatatattttcttatagttattacattttaaatgtcgttttttgctgttcagtgttcctattttaggctttataaaattggagagtgttttccttttttccgccagtatttgtcagtcacaagtcactgtgacttcttctgcgtcggatcatttgagtcgctctatcctgcattttcttcaacgattttcgcgctttcttgcccctttatacactaataatattggccatttcaacattggcttttttaaaaacgaaaccaaaaataagcgattaaatcttgggacttgcgatgagtagggctaatcatcacacaaaataataattaa

SEQ ID NO: 42774 - DNA, 1351 bp, Heterodera glycines
  unsure (1)..(1351): unsure at all n locations
aattaataataataatgtgttttaaacttatttaatcttttttgaaaacttgaaaaaacatcggtcacttaaaaaaataaattctaaaattttgtccaggaaaatccaggttttttcctgtcttgcctggacctggatttttttcacacttgacctgcacctggatttcctggacaaaaatcccagganaatccaggtccaggaaaaatggcgggaggcggagtgatgtttgctgcgttagttcgcttcatgtcgaataagtagaaaagaataattgtttttttgcgatcttaattggactactacgtgtcgaaatgatttcctgcgatttatttataaaacatattttcaaagaaaaacaaacaaacttatcaaaaatagatataaaagcttattaacaattttataaaattaagatatcaagaaaatagtaactatcataataaatgataaacaaattaaaaaaagagagatgtacaaacaataatattaaataagccatgtgggtggagcagaaagcagactaaattctaatgcacttacaaaggaaggtccccaggtgtccgtgggatttccaaatgaaacttggttaggtgggtagagcacccatggtttcttaagaaaaatatttttattttctgcgaaatgaatctgagtgccgagttatgacgtgccaaagtttttaattttttctaattaaagaaaaggaacaattattttgttcactcaaaagcatctgatggtgcagaggtagtgtgttaggaaaatttttttgtgtcccaggttcgaatgcgttctaatacattttacaatttttacttttgcttttttatcgtaaagtcatttataaaaagaatttttaatgaaataaaatctttatttttaattttatttaattaaaaaaattcattaaaaataatggtgcaataaatatcctttcagttaaaaacaaattaattttgtctaaaactttatgagtaatttatttgtcaaaatggataaaaaaaataagattttaaatcaaaaaaatttttttgtgataatgataattgactttggcataaaaagcaaaaataaaaattaaaaaatgaaaaatgaaaatgcatgtgcgagatccgaacctgggtccagaaaacactgaatagcgcactaccgctgcaccactgaacactgcagaggtgtcaaacaattttttaatttgtttattcattaaaaaactttggcacgtcataactcggcattcgtgctcatttcgcagaaaataaaaacatttttcttaagaacccagggatgctctatccacccaccaatttcattgggaaatcccacggacacctggggaccttccttt

SEQ ID NO: 42775 - DNA, 1083 bp, Heterodera glycines
aaaaatgattttcggggccgtttggaggtatatggggggtatggacgggtcaaaaaaaatggctatctctttttttggcaatctggtaatagaatctcttggaaacaatgacagtggctgtcatcagtgttatgctctaaaaatgatttcgggccgtttgagtatatgtgaggtatggacggtccaaaaaaatggctatctctttttttggcaatctggtaatagaaatctctttggaaacaatgacagtggctgtcatcagttgttatgctctaaaaatgattttcgggccgtttgagtatatgtgaggtatggacggtccaaaaaaatggctatctctttttttggcaatctggtaatagaaatctctttggaaacaatgacagtggctgtcatcagttgttatgctctaaaaatgattttcgggccgtttgagtatatgtgaggtatggaaggtccaaaaaaatggctatctctttttttggcaatctggtaatagaaatctctttggaaacaatgacagtggctgtcatcagttgttatgctctaaaaatgattttcgggccgtttgagtatatgtgaggtatggaaggtccaaaaaaatggctatctctttttttggcaatctggtaatagaaatctctttggaaacaatgacagtgcctgtcatcagttgttatgctctaaaaatgattttcgggccgtttgagtatatgtgaggtatggacggtccaaaaaaatggctatctctttttttggcaatctggtaatagaaatctctttggaaacaatgacagtggctgtcatcagttgttatgctctaaaaatgattttcgggccgtttgagtatatgtgaggtatggacggtccaaaaaaatggctatctctttttttggcaatctggtaatagaaatctctttggaaacaatgacagtggctgtcatcagttgttatgctctaaaaatgattttcgggccgtttgagtatatgtgaggtatggacggtccaaaaaaatggctatctctttttttggcaatctgataagagaaatctctttggaaacaatgacagtggctgtcatca

SEQ ID NO: 42776 - DNA, 671 bp, Heterodera glycines
taggcacaaaaataggcaaataaattcttattaaacgctttttcggtagcaaaccacgtaaaaacttaatcaaacaacttaattttacttatacttcaattgttttaaagtttttcgaataaagacaatttttaaacaaaaatttttatcaagaaaaaataataaattttggggatacatttttgtgaaaaaatttttcaattcttagaaaggcgacaaaaatggcgaaatatgcataaaaataggcattcaggcattaagcacaaaatgtccaaaataggcaaagtactaggaattcaaaatgcttatcttttgcatagaaatatctccttttaaaatccttaaagatagcaaaattgttcgatttagtgcagggatgtgatcaaaaaattttcaaaataagaacattaaggccaaaaaataagattttagtgtcaaaaataagaacattttgcaaaattgcttcaaatcgttatttttacaatttttcgatcaaaaatgtatcaaatagtatatttttgtctcccattaacgcgattttaacaattttgggggaggaaattagcaaatcataaaattttagtgcattcgggataaaaaaaatcagatttttaacaattttttgcggcgcatttttccaaaaacttttgggaggagagaggggggggggg

SEQ ID NO: 42777 - DNA, 503 bp, Heterodera glycines
  unsure (1)..(503): unsure at all n locations
cgatactaattgttctggaatttgtttctcggcgcgctctcatagatctatatttggaaaattggntatctctttttctgctcaacagtaataggaattccaaccgcattctcagaataattacgccgatactaattgttctggaatttgtttctcggcgcgtttgtttgggaaaaatttggaaaattggctatctctttttctgctcaacagtaataggaattccaaccgcattctcagaataattacgccgataattgttctggaatttgtttctcggcgcgtttgtttgggaaaaatttggaaaattggctatctctttttctgctcaacagtaataggaattccaaccgcattctcagaataattacgccgatactaattgttctggaatttgtttctcggcgcgtttgtttgggaaaaatttggaaaattggctatctctttttctgctcaacagtaataggaattccaaccgcattctcagaataattacgccgata

SEQ ID NO: 42778 - DNA, 1240 bp, Heterodera glycines
  unsure (1)..(1240): unsure at all n locations
tagagaaaataatttgaagagagagtgctantgggaagagaattcccttcccttcttcgctgaatcttttggtaagagacgcagattcctcactatgttctctgttctctctctgtcataaatctcttcccataacactcttttttaattaatttttctttattcttcttcatcaaaaatgttttgtctgaccagtactgaaagttcagcactctctcattttgccttatctctcacccaaatgttatttctcgataaaagtcattttttaaaaattgctttaaattttcaaaaaatgatacaaattttaaaaattacgttgatatttaagttgatggcgtaatgtttgttgatttaaataaatatcaacattgaggttgattctccgcaaaaaaaatatttctaagtgaaaaatgttgatttgccattctctagtcctctactcattttttgtcggtccgtattctttcacttaaaaattcttaattgtttctctttttcgattttttcattaagtttttgaaattttttaattttttatcatttatttagctaaatttattctgccattatttaagtttgaagtgttatgattgtccatgtagctgatttgtttgtgacctagtcgccaaaaataggttgaataatttttggaatattttctttttctaatttttatttttaataattatttacttgtggttgttataggagaataatataaatttatttttatggtgtttttgaaaccgttttgtgtaattttttactacattagtataaataattagtttatttatttatttagttaattttgtggtttcaaaacaacaattaaacctttttgttatgaaactatttttatagcatttcaatattgtttaagctgaattttagtgaattatatttattaaatttatttattgtctaaaatgtttatttattgaaataaagtgttatcaaatcacttcaattttatttattgaataattatttcattcacttttttctcttaattcaggatccttacagaaggtattttttttaattacataaataaattgttcttaataaatccaaaccaataaatgttctgatacttggaaatatttcgacaaaatcttcaaatgataaagcataatttcttcttcattgccgtccaccaaagacttcgaattttgcgccaaattttcccaattcttaaaatttttggcgcggaaacgcaaaaagtaaaagtttt

SEQ ID NO: 42779 - DNA, 1037 bp, Heterodera glycines
agtttcatcgaacctagcgcactaaaatcgataaaatctctccacaattttgcaggccttctccattgtaaaggactatcttaacctgaaaaaatgccaacgcttgttgtttttaaaattttcgaaattctgactttttcattaattatttattattttgcaaaattaattcataaatattttttagaacgtgctctgaaacgcaccaaatgttaattaaaagttaaataaggctctctgaagctttttctatcaaaagggagatgaataaaatttttaaaaatttttaattcctttttaaacaggccaaaaagtttaggcttatattttaaaaagtttcatcgaacctagcgcactaaaatcgataaaatctctccaaattttgcaggccttctccattgtaaaggactaacttctgaaaaaatgccaacgcttgttgtttttaaaatttttcgaaattctgactttttcattaattatttattattttgcaaaattaattcataaatattttttagaacgtgttctgaaacgcaccaaatgttaattaaaagttaaataaggctctctgatgctttttctatcaaagggagatgaataaaatttttaaaaatttttaattcctttttaaacaggccaaaaagtaaaaagtttcatcgaacctagcgcactaaaatcgatataatctctccaaattttgcaggccttctccattgtaaaggactaacttaacctgaaaaaatgccaacgcttgttgtttttaaaatttttcgaaattctgactttttcattaattatttattttttgcaaaattaattcataagtattttttagaacgtgctctgaaacgcaccaaatgttaattaaaagttaaataaggctctctgatgctttttctatcaaagggagatgaataaaatttttaaaaatttttaattcctttttaaacaggccaaaaagtaaaaagtttcatcgaacctagcgcactaaaatcgatataatctctcccaaattttgcaggccttctcccattgta

SEQ ID NO: 42780 - DNA, 1019 bp, Heterodera glycines
aaaccgaaaccgaaaaaaagctaaaaactcaaaaatttctcggtcggttttttcggtcaaaaaccgaaaaaaagctgacctgtccgatctctagtttttatggcatatttgagggatttttaatgcatatttggcattttttagtgaataaacttcaaaccctaattataatacataaagcaaatcgccagctctgtggtcgaaagtcgatttggcgtaaagattgaaaaagccattttcccattagccaaactcaaatttcagtgtttatccactggggatggaaagggataagccggcagtattttttagtcaatttttaaacaaatcatttctggcgactttttgccttcattttgcccgcctttggcggagacaatggcctgaattaagggcaattaaaattgattattatagcaaaaactaatgccacacacccaaattcataagggcagcggacggtcgggcaatggaaatccctcagatttgccgtgaacaaaaaatttcggtttaggcattccgatgtccttgcaaattgtgattgttctccacaatgtcagttcgcttttgccatcgaaatgtttgtccactaaaatgtcgaaacgaggcgaaagaagtgccaatttgaggccgagttaaggacggtcaaaattgggcaaaatatccatccaaatatccgtacaaatccaactgaaaattcgggaaaattaatatattaaaaatttgagatttcaaatttaccgtcggatcatttttacggctattagcacaatttgccgtttccaaatgattacacaaagagcagaataattgcggcgaaacgaaaattgaaaaacccaaaatttttaaagtcataaaaaccgaaataaaaatttaaatattttacgaaaaatttgaattgtcagcaggagcacttactaaatgaatgaataaaaatgaatcattttcatataaaatacccttttcctcctccttcatttcattaattccgttataattttcccccggttattttattg

SEQ ID NO: 42781 - DNA, 797 bp, Heterodera glycines
cagatcgtccgaatagcccgcgtttctgtccaccgtcggcgccggctcttggatgacctgcttaagctgttcgaacggcgtcttccatttgccgtaggggtgccgtccgttcgcaatttccacctgaaaaaattgttatggaattaaaaaatccaattaaatttcaaaattcaaattaccaaagtgatgcctaaactccacacgtccgcttgcactccataagcttcttttgactcgccctcaattcgttcgggtggcctaaaaaataattctgttaatttaaagatataaattaatcgtaactcatcctatctatatattttgcaaaaaaaaaaatggtcatatttcttcacttcgaatacccattcccccaaaagtgtcacccacatgtacggcttgcatcccgcattaattgttttggcgacggaattggtcaaatggcccgaaattccgaagtcacatattttcacctctccgtttcggttcagcaaaatgtttgatggctttacgtctgacaatgagattaatatacatatatatatatatatatatatatatatatatatatatatatatatataaagggacaaaggctgattatgattgattgtctgagtgctcacctctgtgaatgaggttcatcttttccttcataaagtttaggccttcaacaaccttaaaagaatttatttgcctaatttttttggatataaaaaatctaatatttttctcactgaatacgccacgcgcgcaacaaatttctcggggacttgacgacccatgtcgacacaaagtct

SEQ ID NO: 42782 - DNA, 1019 bp, Heterodera glycines
tttacccaaatccgtgcgggtgttttttcaccccgcgccgcgcagcgccgcgggaaggtcatcaatcatccacctgtcaccaaagtgacaggtgaaggaaattcaatttaacttttgcaaattttaatcttttgtttcaaaactttttagcgttttattttctcaatcctgaaaaaattttttatgatgatttttctgatcctgaaattaaaaattctttttgaaaattagccaaaatcgtgaggggttttcatttcctctccgccccgccggtgcgccgcgatgccggcgccgcgcgaagtaatcgataacaaaataaatacccaacagaactacaaattgggggaccgtcccaataaatgaaaaattttttatcgtctccctaacttcttttgagccattttcagatagggaagaatataatgatacatttcctctatttcagaattgtttttagttcccgtaattacgactttaccggtccagaaaattaacgctgtcatgcttttaccccgcttgaaatttaaaccgcaaaatatttccggttcataaaatgcacgacgattttttcgaaactcgttcagttcagtttcacgttcgaatttataggtcgaaacaatattttcaaccgtgtgtccggtgtaagaagcccccggacaccccgaacccttaattatttctataaatttttttatagcattttcacagtctatcagacttttcgtccccagacatatcattttcccggattcccataataatgccgtggctttgatggggcttatacatttgataaccgcggcattgaattttctagggttatacttaaattcgcattcagtgatcgtcagagagtttagtttaattccggtaccgagattagcgagagcaattatatttacgattatcggtttttgcattttgatacaatgtaccaatcaaatggtcctttcactcctagaatataccccttctataaatagcaaccaaaaataaaattaaattgaaaaaatgaactg

SEQ ID NO: 42783 - DNA, 1353 bp, Heterodera glycines
gtaagaaatgaaaatattcgtattactttcctcccttaaagctttataatgaaagcgtcgttgtctatttaggatttgccgtcgcaattctgtaattccactttggaatccaaaggaatttgattcgcttttacaaaatagacagtgccgaaatttgtagatcggctaaaccttaactgaaacataccatagcagtgagacgccatgctgatttgttgtaatcataataaaaaggcccctattgttcaattctgcctttcctataagcacaatgtgtttgatgggctctacaaaatattgcttgtgcaaagcaattattttcttggaggctgtaattttctgtagtcatttgatatgcatctgctatttttctagtcacaaacaccaatatttttcggcccgaattttataggcgtgaaaagtactgattttcaacttctttctattcggatacacccaaaatttgaaaagcatctgtaattcagcctcttttaaatcttaattttctgaaacccgaatttagaaatatgaatgtatttctgcgacgccttctatacttaattcatccataatgggccaaaaatcataggttaagaccaaaagagggattttagtttcagccggaatttctataaaaatgttcgtgtgtaacctatctttgtctattcggataagtaagaaattgaaatattcgtattacttttcctcccttaaagctttataatgaaagcgtctttgtctatttaggatttgccgtcgcaattctgtaattccactttggaatccaaaggaatttgattcgcttttacaaaatagacagtgccgaaatttgtagatcggctaaaccttaactgaaacataccatatcagcgagacgccatgctgatttgttgtaatcataataaaaaggcccctattgttcaattctgcctttcctataagcacaatgtgtttgatgggctctacaaaatattgcttgtgcaaagcaattattttcttggaggctgtaattttctgtagtcatttgatatgcatctgctatttttctagtcacaaacaccaatatttttcggcccgaattttataggcgtgaaaagtactgatttccaacttctttctattcggatacacccaaaatttgaaaagcatctgtaatttagcctcttttaaatcttaattttctgaaacccgaatttagaaaatatgaatgtatttctgcgacgccttctatacttaattcatccataatgggccaaaaatcataggttaagaccaaaagagggattttagtttcagccggaatttctataaaaatgttcgtgtgtaaccaacctatctttgtctattcggata

SEQ ID NO: 42784 - DNA, 1240 bp, Heterodera glycines
ccaatcagcagagttgcgagccctaactataaataaatgcgcatatatttttttaaataagcaatagcacaatattaaggcacaaaaaaattatgttcatttataccatcgacgcagagcaatgtaaaaaatttataaaaatggataaataaaaaataataaagtatcaatttttgagaaaaaaattttcattcttagggttgtattttctgaaatttttttgggtaatttctcaggggtgtattttcatttcgaaaatcattcatttcgaaaatccagaaaataaacgtcaataggtttttcgtgcttatttgaaaataacgttatttcgagcgaattttttaaagaaaattaatgagttttaaatggggtcatccagcttttttgttgttgcttttcgcacaatgttggcagtgtgttttgttcaaagaaaatttcagggtgccggtaggcgccgccggagaaatttttgaaagttttgctccatttcttagcaaattttgctcgaaatgaccaaatttctatatgaacaatatgaattctgaattttcgatttatccagtttcacggaaaacccgtgaattgaccctgtgatcgtgaccgaaaaaaacccgtgaaattcacgggaaacaaagtttgtagaaaaggagcccgtgcattggcactggcactgaaattatttgaatcggaagtgaggtggcttattatctacttgcgcaggaagtaatttaatcaacaacatccggcctcttattggctggcaatataaaatcacataatggacattttacttcttcaaaaaaatttcctatcaattttgagtctcatttaaaaaaattaaggtccctcgggatttgcttgaaaatttgcaattagggttaacttttgacggcgcacccgggaaaaattcggtttccgctccggtggccaactaagcgccatggactgattttcatacatgatagcggtttctctattaaatctttttttaaaaatttcgaaaaaacgtggactactttcaaacaaacattttaatatcatttggagacatgcactaagcttccgtttgaggcggcgaagcggctgatgagctctataaaaattagagacgcggatgcaaaaaacgtcgaaaagcccttaataattttttagcaaccaaatagcttcaataccaaatgccatctagcttttatattatgtataatcttcaaacttaattttattagcataatttccatga

SEQ ID NO: 42785 - DNA, 591 bp, Heterodera glycines
  unsure (1)..(591): unsure at all n locations
agtgattagaagaggttcaacagtgattagaagtggtacaacagcgattagaagaggtacacaggaaatagaagaggtacaacagcgtttagaagagtgattagaagaggttcaacagtgatagaagtggtacaacagcgattagaagaggtacaacaggaaatagaagaggtacaacagcgtttagaagagtgattagaagaggttcaacagtgatagaagtggtacaacagcgattagaagaggtacaacaggaaatagaagaggtacaacagtgattagaagaggtccaacagtgattagtagaggtgcaacagtgattagaagaggtccaacagtgattaaaagaggtacaacaggaaatagaagaggtacaacagcgtttagaagagtgattagaagaggttcaacagtgattagaagtggtacaacagcgattagaagaggtacaacaggaaatagaagaggtacaacagcgtttagaagagtgattagaagaggttcaacagtgaaaaaagtggtncnncagcgnttngnngnggtncnncaccatagaggagaggtactacagtgattaaaagaggtacaaaa

SEQ ID NO: 42786 - DNA, 1144 bp, Heterodera glycines
  unsure (1)..(1144): unsure at all n locations
atggaaacggcgggtgggggggggacgagctgctctcgggctcatagcaggggacgacgtagtgcacctgaaaatntagtccatcaaaaacccataattgataccacaaaataaaacattccaactgctgattgtgagtggtccttccggcgccccctccccttcttaaaacccttctccaatttttttggcattatttttagctgctccttttcacttaagcctgcaaagttcgattgactcgtttcgtttcagtctcggcaagtcaaaactcgcggtggcggcgactcagtttcgtattggcgttgtcaacagcgaattgacccactaagttcaaattgttctggtttgattcgacttgaaggcaaaaatttgacggtatgaactgtttccttttttgagtgaatttacaaatttagttcatcaaaggtcacaaacatccgcccgattacgcagttaataattcattgatgggttgtaaaaacaaacacatttttttggttaaggcaactcgcgaaattttagcaaatgtgcgcgaagaatacacgcggctgtatttggtcgcaagtcgaaagggtcggacgaggcattccgagcagggaaccgtttcctcggcctcgaattcagcgccagtggtacttcgtcctttcactgacagaggcgctttaagaagagtcacaagtcaaacggaaaggagagcaaacgatctgacggatgagtcggcgacgatggaaacggaagaactgatcaaatcaatcacggccaggaaagaactgttgaccgtcaaagtcagcccttccacgtgacacaagcaaatgtattgtaacataccaaccaatagcgctgccgacaattttctcgtcggctatttacatttttgcaatccataaaaaaatgattcagtcgtcgacacaatcgaattttgtccaaacttaaatcaatattttttctgttgttatataatgtgtaaccaatattttatgattggatcaaaatccctgtgagagcagaatttggtaattcggctaatgaagtttcgcattccctatgaatcgacttaaaaattttaaaaataggtaggtagctctaatttttttagttaaaagttggttttataaatttattcattttcttataatatgta

SEQ ID NO: 42787 - DNA, 1261 bp, Heterodera glycines
ttatttttacatgctttcggatgtgaactgtctgacttttcgctgtctccactcctacacaaacacaaaaacaaaacgaaaacaatattcataaaacaaatattgctaataatttcgcaacttttaaaaaaatcattgttttgtttttcatttttttgacctgcaccaccggggaaaaaaactcaaaaaaatagagggaaaaattggcatagatccataaatttggcaaatacctttttaaacaatatggaagtttcagcaaatttttggcaaacgatttttcaaaatttgaaaaggctttcaaaaaatatgtatcaaaaattatggtaaaactaaaattcgtttttttttaatttttatttttatcccttttataaatgcgcctcatttcagagctaattaccgaatacaaaaattttgatcaaatttccgagtgcaattttttttatataaaatgccatcgtcaatggatcggatgaaacatttgttgagcacgggtgagcattcggatgtgcactttttggtgggggacggagacgcaaaagaggcgagtttaattaaaaataaaaatttaattttatttttcaattgcaatttcattaattatccacgttttttaaaggttttgccagcacatcagcttattttgaagagcgcttccgatgtttttgaggcaatgttccgttttgacgccaaaaaagaaagaccggaaaatggtaaaaaaaataataattttaagggaaaataccaattatgctatttgttcttcattttgtctctgctaatttccctaattaatttttcaattagtttctggtaattgtcctgatgttgtggagatacccgacattgaagcagaagcgttcaaagtgatgttgagcttcatttacacggatgatttaagtgatttgaatggagacaatgcaatggcagtgctttacgccggtggatttatttttaaatttaatttattaattattttttaattagccaaaaagtacaatatccctgatttggtcgatcggtctttgcaaattcccatctccgaattgcgcaatgttttctttgcgtatgcccaagctctccttttcgacttggaggtgagaaaaacaaatttatttttaataatgcttttgttcgaattcgggttcgttgagttcgaaactcgtcgaaattgtgtgagattcatgatccaagtgtaagcaatttttaaggatttttccatcaaatgtttgcgttacatttgtcaaaatgcgggcca

SEQ ID NO: 42788 - DNA, 943 bp, Heterodera glycines
tggttacgggcctgaagcccggggaagtcatttactaattaatgccctcgtgagattggttattggtcttaatttctcaattttgttgcgaaattgtaaaaatattaaagcaaatttcgctaaaatttgataaatgttgcccatattcatttaaattaattttttaaccaaccaaaaacccccaaattggcactttaaaacatttgtttaaattggaaacacaaaaaatgccgtgttaggcaaattcgctgtgttgttgtcaaaaacattttttacccgtccgtagttggcgaaatgcgcgcagaaaaagccgctttatgcccgcgtcgccccaattcaaatgcacccattttgagcaggccagcgcaaaaatgatgtcaaactcctcgtgtacctggaaaattgggaggaaattaaaacgaaaaaaatttagatccatgccaaaccgtttccaatgccgcgtcggatggcaggacgtaattttcacaaaggaacaaaacattgtccgggaaatggggcccgtcagaggtggacggggcggaaatgggcccaaaattggcgccaaatgaagcggggaatttgccagacatctgcggaggagggagaaagattgattggcacatcgattgcaataaaatttttaaatttttcattttttgaaaaaaaacctaaattttatcactttttctatcaataaatgggtgtgagtactgaaagtgcccagttttccgacctttgtgtccttgtcgcaaaagtggcgaatgtttttgcgcgcagcgcccaccaaatgactgtcgatgtccacgccgagcacacgccgtggttggaaggcacgggccagctgaatgttaatttggaatttgcggcaattaggatgaaaaaaatatgttcgaatctcgggtggggcgccgctctgtccaagcgaaagcagtgtgtcgaatag

SEQ ID NO: 42789 - DNA, 1260 bp, Heterodera glycines
  unsure (1)..(1260): unsure at all n locations
ggaaaaaacaatttctggaagaaattaggacgggtgagaaatccgggaataaattcttccgggggattccgggaagaaacgcaccggaagaaggaaaagccaaaattgccaccggaagaaacccagccgaagaaggaaaaggcaattttggaaaaaatacgctcggtggcaaagccggaaaagatacattgaaagatggcacaggcgattccagaagagatacggtcggtgtcgagtccgccagaaatgcagccggagagggaaaagtcaaaattgtcagtgggagaaacgcagccgaagagggaaaagacaattctgaaagaaatacaactgaagaaggaaaagacaaaattggcactggaagaaatacaactgaagaaggaaaagacaaaattggcattgggaaaaacacagccgaactgggaaaagaccaaattggcaacggaagaaacacagccgaagaaggaaaaggcaattctggaagaaatacaaccgaagaaggaaaagacaaaattggcactgagaagaaatacaattgaagaagaaaaagacaaaattggcaccagaagaaatacagccgaagaaagaaaagaaaaaattgcaaccggaagaaacacattcggtgaagcaaaaggcaattctggaagaaatacagccgaagaaggaaaagacaaaattgtcagtggaagaaacacagccgaagaaggaaaagacaattctgaaaagaatacagccgtagaaggaaaagacaaaattggcactggaagaaatacaactgaagaaggaaaagacaaaattggcattgggaaaaacacaaccgaagaaggaaaaaacaattctggaagaaatacgatcggtgagaaatccggaataaattcaacaggcgattccggaagaaacacagccgaagaaggaaaagacaaaattggcaacggaagaaacacagccgaagaaggaaaaggcaattctggaaaaaatacgctcggtggcaaaaccggaagaaatacaatagaagatggcacaggcgaatccggaagaaatacggtcggtgtcgagtccgcaagaaatgcagccggagagggaanagacaanattgtcagtgggagaaacacagccgaagaaggaaaagacaattctgaaaagaatacagccgtagaagggaaagaacaaattggcattgngaaaacacagccgaaccgggaaaagaccaaattggcactgngaaaacacagccgaaccgggaaagaccaaaatggcact

SEQ ID NO: 42790 - DNA, 1493 bp, Heterodera glycines
  unsure (1)..(1493): unsure at all n locations
ctcatttagagtctgattntggcgcaattaatttttcaaattaattaaattaaatctattaaagcgtttgaaaattggagaaaatgttttttgaaccatttacaattttatttgagcaccaaattaaatattattatttttcaattgtccagaatccgaactttttttcacgccccgcggttaccttggtttacagctttttaagaattgagattaattataaaaagcttgtttgaaaattgtatattcatttttttgaaaatttcaaaatttccgaaaattgatttaaaatttagtaaaataaccattaattatttcataaacttggtaaaatgtaaaaaaagaataacaattattattattgtataaaatttaccatggtctgcaagtaatccttggattaatagtaaagaacaaataattaaatgaattttcattgcacaaatatattatatctttttataaaattataataaaaacgaaaaaatatatggaaaaaattataatagcattttaaaaatatctattcaatcgatttatcgatcaatttcaatgctaattttttattattttttttttatatttgaaatatataattaaataagctttaaacatggaaaaattgctcggaatccttcaatttaatttgattatagagtgtcgcaaaaaatattataatataatttttcaagaaagacctgttaaattctttttccgttaatcgaagaattttttgctcgaattttggtaagggggttggaggacgggggatgtttttttgtcaaaaattggcaaagttttgagttttcttcaaatcacaaattttttcagctcaatttgaaaattttacgaattctatgcctgctaggtcttttcataaaaactgccaaattgtgtgaatgatttttagaaaatttttttggatttccgactggaattaaaactgaatatgctgggggcaagagggtacccaatggaagtgctaggtcaatttcttaaattccgcctctgtgggcgtttcttaaatccgccaaggggtagaaaaaaaaattttaaatattataatttataacttggctcagtttcaactaaattaatatttcatggtatccttaagtaattcaggtgttttcaatgagaatattaaattagaaatttttttaaagtaaaaaaagggttataaaatttcaataactcttaagtccgaattttttcccatgagttagttgaaaatcaatggtttttcttaaaattataaaatttaatagatagacaagcgtttcaaattctaaaaagaaaaattaatttaattgcatcagaaaaaattataaagcattaaatatgctatgttttttccatcataattttaatttattacatagttttgtgccagcgggtaaggcatgtaaaatgccaaagtcggacagttgggcagtccttgaattttgttagtggaaaatgttcgaaaaaagccaaaagaagacagtttttaa

SEQ ID NO: 42791 - DNA, 914 bp, Heterodera glycines
  unsure (1)..(914): unsure at all n locations
gggggaancgtaagcgccaccgtgcaaaattttgtcaaattatgccaaaaagcaaacaaattaacaaataaataacttgttcaactgtgtgttgctaggccagtgcctacgcttctgaggacggtgtgctgaccgagcaaatgattgacacgaacacggcggaagtgttgcgacagcatcgacgcaaaatggaatggttggcggcggagcgagcgtcgtcgtcggcaatggcattggcatccgtcacggatgacggcgagtcggcaaaacagaagcggtcaaagggggcggctgctaccaagaaaatggggacagatggcggcaacggacagtgaatcattcattcattcattttggtgatcacttacacccatttttgaactgattgattggctcattgattctcgactcttggccaaaaaccaaatgtgccgtttgtttgtttgtttcttttttatgttttattgttgttgtttgctgaatttatcattattttttccatttttgaagaaaatttatagtttggccacgtttaaaacactatgttggattttctcttaatgatagacatgtcaattcaatttaaattaaaaaaaaaagatgaatcgaaaataataggtaataaaattgaaattccgtcacccctgtaaacacattaacccataaaacttaggcgaccgtcgctgtgacttgtctccaaataaaaattcaaattaagacacctgcattttaaattgggcattatttatatactagagaatggaattttgttagttccgggcccgggcctagacaattgaccggtacggtctgtccggtccaaaaaagcccgtgttttactgggcggcccgataaagcccgccggacacgtctggtctgtaatttatacactgcaaaacgcaaccgtttcgcta

SEQ ID NO: 42792 - DNA, 926 bp, Heterodera glycines
ttgctgtctcagaagaatagatattctcagagaatggctatcactttttttctacaccgttgtacatgtggggtttcctcaaaaacgcattactatctgcggttgagccctacaaaaggtcggtttgaaaattgctttctcagaagaatagatattctcagaaaaatggctatctctttttttctacaccgttgtacatgtgggttttccccaaaaacgcattactatctgcggttgagccctacaaaaggtcggtttgaaaattgctgtctcagaagaatagatattctcagaaaatggctatctctttttttctacaccgttgtacatgtgggttttccccaaaaacgcattactatctgcggttgagccctacaaaaggtcggtttgaaaattgctgtctcagaagaatagatattctcagaaaaatggctatctctttttttctacaccgttgtacatgtggggtttccccaaaaacgcattactatctgcggttgagccctacaaaaggtcgggttgaaaattgctgtctcagaagaatagatattctcagaaaaatggctatctctttttttctacaccgttgtacatgtggggtttccccaaaaacgcattactatctgcggttgagccctacaaaatgtcggtttgaaaattgctgtctcagaagaatagatattctcagaaaatggctatctctttttttctacaccgttgtacatgtgggttttccccaaaaacgcattactatctgcggttgagccctacaaaaggtcggtttgaaaattgctgtctcagaagaatagatattctcagaaaaatggctatctctttttttctacaccgttgtacatgtgggttttccccaaaaaacgcattactatctgcggttgagccctacaaaaggtcggttgaaaattgct

SEQ ID NO: 42793 - DNA, 1175 bp, Heterodera glycines
aggttagtaaaaattaaaaatttagtgggaaattatagggataaaacccaaaaaatcactcaaattttatagctttaccgtgatttgttgctacggtatgtgtgctgctgttttgcaggcttcgcagtacggtaatcaggagatttaaattaatttaccattcctaaaatagagcccccggtggctctattttcaatccctctaaaagggggggggctttattttagggggtgcgtgcattattttagtaaatatggtataattttttttcattttagccgacgagaaaagtgccgtcaaagagcggatcaattggccaaagcgcgcgaaagggtccgagctgcctccaaatcgttcatttccgtatcaacagctgtcagcccaacagcaattatgctcaaagaggtgccgcccaaaaaaaaacaactttttaatcggcattttctaagccgtctaattaaggaaaatttatttttcaatcctaaaaaattatttctacgagaatcaaaatttactaatttgtaagacgacaaataaaagctgaactcaaggccgagaactaagcccgagactgggcacgagacatcagggacataatttcgctaaattttcccaaaaatccacaaaatctgtttaaaaatcgagggaaaagctacaaaattttcccgaagccggatcctaaatccaattttcttaaaaaattgctcaaattcgtaaatttagttattttttagacaaaatctgttaatcagaccagagatcgggttcaattgtcgagataaagtcgggcaaattattcattctcgggattgagaggggatttgcataagtgttgaatgaacgcagtaaaatgccgggaattgatttttcatcactaattgcggcattccatataaattcggcacaaattccgcaaaatttgatttgcagataggactttccgagctgaggcaaggcaatgcgatggaaaggtggcatcattaccaccagcagagaacctcaaagtccgaaccaatcggtggccaaaaaaggggcgaaacggagacaaaaatatttttatttgacagatgggccaagggggaggaggaagaggagcaaaacaacgaaagataatgatgaatgaagccaaaagtgccattgtattaaatgaaatttgcaaaaaaaaaatatcgact

SEQ ID NO: 42794 - DNA, 1059 bp, Heterodera glycines
  unsure (1)..(1059): unsure at all n locations
atgtgaacactaaaaatggggaggggggaattaattggacatttcactaattaattaattaattaattaattaatgggcaaggggccccggggaattgaaattgaaagaaaaaaaagccaagtcagctttatgtattggcttgattggtctctgaagaattgatgatggaaatgacctgttccatttggccggggaatgtttcgaagtgattgaccgaaggatgggcggacattgcaaaaaggcggacactgtcctaaacaaagagacaacaaagctgtgagtgtaattagtgagtaattaatgcaataaatcaaagtttgcaaattgcctcaggggttttgcgtaacgcgtgcccaagcaaaggcgaatggtcgacgaatgagtgggccttaaaagttgggaatttgcgaaacacttcgtttttggttgatttattttgagacctaaaatactggaacagcagcacatttatgccatcagagagattgaaacgcggactctccaaaatggcaaaatcgcccgggccgagcactcaaaaattatttttaaatcatttcgctttttcgaattccggcatttacctgtgctaacgaattgcccatttgtcgaagctttaaaatgtaaatttaattaattatttctgcatttgctttttacccggcctcaaatcggtgtgacgattcagcggaaaccctaagcaattgcttaccataatcacaaactgaaatcccatttcaaaatgtcctaccgtatcctttcgttcgcaaagtccacggcacttttgtgaggccgtggttcaaataatggcacgcattctctgtagaaaaattacaatttaagtaaaatcatcaaattttaacattttgtcatttaattttacactttcctaaatncatcattttagaattgaanttcaattttacncgttaagtcgcaattgagcaatttgcaaaagttttgttccccgcgtgnncaatgggtggtaccgtatttttgcgtggtagtgtacggtattgtgaatgaactgtaagcacttgncaatttcccattgctcattt

SEQ ID NO: 42795 - DNA, 1204 bp, Heterodera glycines
  unsure (1)..(1204): unsure at all n locations
attttgaattttttttttaaatcaacaaatgttgcgttgttcccattgcatcaattacnatacaagaaaatttataactttttttaaatattcaatatttcttaaaatttttccagaataaaggattaaattcttgaaatgtttctttagaaaattttaatgttttctgaggattttaaaaacgcgccagcatgctttactccttcattcttccttccactttttcttaactaagatgagcgcagttggcctcgaaatcggctaaagcgcgcaacaaacaaaaaaaccaatagtaacacaacacggcacgcatcgccaaatgcttggctcctatttgtgcgagtgcctctggcgcaaagatgtttaaaaccgtggcgcaaatccatttgacgaaatcttagctcaaattgtggcttgtatgcccccgatataattttgccgcgacatttttgtaattatgcgcgctcgctttgttggtttatgttcaacattttctgtttttcggccggcgctcattaaattttcttctcactatagcttcgtatttaaatttgtttctcaccttgcacacattggccacctgtcgttcatccagtgtactctccatattttccttgataaattcactacccccaaaatcaatcactttcaacatttctatttcaatacctcctccttcctttttcttcacaaaaagcatattgtccgatttcaggtccaagtgaataatggctaaaatattttataatgtataatgcatatttttaaatttgtttgcataaattaaatttaaaaatttaacagagattctagagtgtctgagaatgggcaatgtaaaattggtgaagtaaaaaatattaaatcaggcatcaagaaaaagacaggtcaccatgaaaaaacgagaaatggctcaagaattgttcgggttataggttttgtaaaaaaaacacgtaaaaatctgtcaaaggccgcacacggacggctttagatgtagaaatcgcaacattatttgtctttccaaatctctccaaaaataaagacggtctttttattagggaatatttcaattatatcatcaaccaggacccgatgggccctgtgaaagcgccgggtgcgctttcaacactgggccagcaaggcaacagttgaatcctgcattttgtcgcgcttaaggtactcacttgaccgcttcgcggcctcgtac

SEQ ID NO: 42796 - DNA, 1091 bp, Heterodera glycines
cgacaatcacagagatatttttacatatgtcgttgaagactcatgaagatcaaagtcgccagattttagtcaaaataaagcagaaagcacaaaccaaaactatgtaattattttacacttttaaaataaaatcattttgaattggcaaaaattttaaaaaattccgaaaattttcgattgaaaatcggaattccaaccccaagtcaacatataattttaattttagtttttttactaaaattaaacgctaggaccaactttcgctaaatcaagtagggtttggacgccccccccccccccccccccccctcccgacgtcggggttggaaaagtcggggttggaagcgtcggggtcggggttgaccaaatcgttcggggtcggcgtctgggtttttcaatttttgccttatgccatatagtcaaaaaactttatattatttttgcttaaaagtatttattattcataattagggttggtatattttatgtgcatattttacgattttatgtgtatataattacctgccctagtgataatcaatactaacaattctcccgaaagacataggtatttcttctgtgggaggcctgaaacgtacgaagaacatgtttttagctttgtttgaagcttctaggagtatttccatatgcatattttgcatatttgtgcatatttcggcattttatgcatattttatgtgcatatttgggcattttttcaacatcctctattaaaacggccccctctattaaagcggccatttgggctctaatgaccgaaaatttttcaaaaatatcagatttttgggtatattttctggtaaaaaagtaactttttaaaaaattggaactttatgccaaaaatagtcagaaaatagaaaattctccattttttgctcaattttcttaaaataaattaattttactttattttgtatttttggttctaagttgattattcatactatatttagctattttcgggatttttatgcttaaatttaacaaacttgaagaaatttgaaaatttgccctcaatttggaatatgagcatatttttcactttatgcgcatattttgcgattttatgt

SEQ ID NO: 42797 - DNA, 1514 bp, Heterodera glycines
  unsure (1)..(1514): unsure at all n locations
tgaagccagggttgcttgactctgaacccaggcgttgaatgtttgagctccaagtgggccatttttggtaagcagaactggcgatgtgggatgaaccaaacgtggagttaaggtgccaaagtgcccgctcattagaccccataaaaggtgttggttgatatagacagcaggacggtggccatggaagtcggaatccgctaaggagtgtgtaacaactcacctgccgaatcaactagccctgaaaatggatggcgctggagcgggccacctatactccaccgtcattggcttgtacacgtgcttgtcgcgtagtctggccatgacgtgtaggagggtcgtggtggttgcgttgaaggctttgggcgtgggcccggccggagcttccaccagtgcagatcttggtggtagtagcaaatattcaagtgagatccttgaagactgaagtggagaagggttccacgtgaacagcagttgaatgtgggtcagccgatcctaaggcaccggctaacgccgtaacacactacggatgacaacttttctgtgcttgcgcagttggtccatccggttgccgaaagggaagtgggttaacattcccacgccaggctagggaaatgacggttcgcaagagctgttttgcgcggtaacgcaaatgaactcgcagacgtcgtgtggagtccgagccagagttctcttttctggtttagggtgtgcgtgcctggaagtggctcagcctgagatagggatgttgcgcccgtaaagcaccgcggttcctgtggtgtctcgtgcgctccacacggcccttgaaaatgcgagggaagctatttgaatctcctgcctgatcgtaccgatatccgcagcaggtctccaaggtgaacagcctctagtcgatagaataatgtaggtaagggaagtcggcaaattagattcgtaacttcgggaaaagaattggctctaaaggtcgggtcagccgggctgttgcgtgaaacaggcggcttttgcccgtggctgcttgctgttccttcggggatggtgcgtggactagtggtgagagctgcttgtggagcgcttcagctgcgtgtatgctcgtcagggtatgcacttcggttggcgctgaacgaccagtttagaaaaaaaacgaactcggggaatccgactgtctaattaaaacagaggagacggatggtccttgtggacgttgaccgtgtctgatttctgcccagtgctctgaatgttaagccaaggaaacttgaataagcgcgggtaaacggcgggagtaactatgactctcttaaggtagccaaatgcctcgtcggctaactaccgacgcgcacgaatggatcaacgagattcccactgtccgtatctactatctagcgaaaccacagccaagggaacgggcttggcaaatttagcggggaaagaagacccttaaaggttactctannctnactttataaaaaatcatnactcagagtggagaagtgggagccgcaaggcgccaatgaaataccact

SEQ ID NO: 42798 - DNA, 945 bp, Heterodera glycines
gatgacgttaaaatttacatttcgcatgataatgacacgaaaagggatttactctctttagcgttggctaacttagcaaatggtctaaagataatggcatagccattgcgcatgagaaatgcgcagcattatatttaggaaaaaataattctagacatgagtataaaattggcgagaaagtaattttaagcgtagattgtgtccgtgatctgggagttttggttgatcaaaagctctcatttaacaatcatatttcaaaaattttaaaggcggcttatttcaaggcatatcaaattttaaaaatattaaaaacaaggaatatcaataccttaatcctagcatataaaagctatataagacctcacctcgaatacgcatccgaaatttggaatatctcctcaaaagaacagagtaaaagaatagaaaaggttcaaaaatatttcacaagaatcgtatacaaaaaatgtggcctcaaggcaataccatatgaaaaaagacttgagatttgcaaattggagaaattaagtactcgaaggtcgctcactgatatgaatatgactttcaaaataattagaggcttaactcatttagacccaaaaaaatatttcgaattttcaacaagatcgcaacgaaaaacatttaggattcaaaataaaagattcagtaataaatctcggaataacttttttattcgtacaattaatccatggaattgcttacccaaaacagctatggaaatcggaactttagctaaatttaaaaattttgtgaaagaattttattcagaaaataagtcctgagtggtaattaatccctttttattttttattttatgtatttttactgtattgaccatatcatatttttctaattgttattcattactttgttttccgctataagtgcaactatgttgccttggggtttgttcaaataaataaaata

SEQ ID NO: 42799 - DNA, 1027 bp, Heterodera glycines
ataaaacaaaatttttatttattagtaattggatttatttggtattattttaatgttttgttatataataagaatattcaaatttaaacttacttttatacgtgaaatatacattattttttaaatattgaaatttggtcatgtatcatgatcaaaatagttttaggatttggtgtatttgctctgaatgttgttccgcttgaatatattaaagcataaataatcaaaatatgtttttttaattatttaaaaaattagagctcatttttgacaaataatgctaacaaaggataatgatgtccttaattgtatcgtttatacgtgcaaattaaaatcctattaatttttttgcaattttctacttcattaactgaggtatttatcttctttaattcaatgaaattttgtattttgaactgaaaaactaattgcaatacttgcaaggtgtttatgctattatttcttattcccattgtataatttatcatagaaatataggttttcttgaaatgagaataatataataaatttataccaccattgtttttcaatgatacatttaaaaaacaattatcttgtcagaattaagtaatttttagccaaacaaaactgcgttttgagcgcttggatggtagaaaaagagttcatatctatggtcagataactggatttactaatttagcttaacgtaatgattgatatttttaaaaaatctaattttatgtcttacctaattctgtttttaatcctgattttttcaaagcttataaattatgggattttgtatatcatatattttgttttcttcttactaaaatttatatcttatgggattttattgttcaaaaactgtttgtatgttgtatatttttatgttttttcgactaagtttatcattatattttatttgtttcgatgaatagacgtaatgaaaaatccattttcttgaattttcaatagatttaatctattattatttttactttcatataaactggaaatatttattttctctcctctgcttttt

SEQ ID NO: 42800 - DNA, 1212 bp, Heterodera glycines
  unsure (1)..(1212): unsure at all n locations
tactanttcttcaacatggctttaaaaatttttctatagacaattttaaattaatattagagaaattcaggcaaatgcattaacaaattgacaggtgcattcttttcaaaggggaaaataggcgaatcgccactttggcattaaaggaaattaaattcgcaaaaatatggcaaaagcatcaaaatgtaattagtgaatttaattttacaagaatatttacgagttgaaactcattattgttgtaattaaatagctgttttttgaaatttgtataataattggcaaatccgtttgggtgaatatcatgcaggaatttggatttttttcttttgatatttagctaaaatcatcattaatttgatggttatagtaaatatttttaaatgtgccttatgagaatctttcttagacgaatgacctagaataatcacagttttcttcagcacctaaatgatttttgaaaattcattgtttctttttgcttcttggggtttgtatcttttattttgctttcattatttaaatttttcttaaattttctttctattgaggcgattcccgtatttatagacggtatcagccttataattagtatgatgaatattaaactttttaaaaagtttgtataaaaatgcgaatttccaattttttttttgcggttctcaaacgatcactttttttgctttgcatttaattgtattatcaatagcttattcctatcaaaatcaccgagttttaatatttttattttaatatttaaaaaaataatttatttttatggaattgccctttttgtattgtctttttgtacacattgaaaaattaaactaccgttcacgccgtagaagcacaaattttcattcaatttccaatttttgtgtaatttatgtgaccattaagacaaagtatgtaaaaaggatcattaattagtttataaaatctgctaatttaccttaaataggtcattccgtgacacagtttattaccttttggcactttgctcttttttcgaattgattcatcaacctggctattttctttttgtttattacacggctttttctggacaaaatttcattgagtatcgtttggccgtaaagatcactttcatttcttggtttggaatcggtaaaaatatcatgatgaaatgtaaaaaatgaaactttatttaggaagtaaatttacgtttaaggcacaataaatttaaaattt

SEQ ID NO: 42801 - DNA, 1158 bp, Heterodera glycines
tcccagttttaagtcttggatttgtcaaataaattcaagacttcaaattaataatcaaaaattctcttaaaatttttttgaacccaattcaaaaaaggaaaaaaatttgcagtcaaaaaattattcgaatttctccaattttgtttccataatttccgaaagttattcggtatcataatgccaaaacaaaacgaaatcgttttaaaatattcctttctggacttgacttggtttcttgatatcgaagctgttttctacgctatttctaaaacggttataccaaaccccagatttttgaatccggttttcagaaaaaatgccttgtggtgaaaacaatatttcacatttcactccataactttgtgagttcggcacggatcgagaccgggataagaccattggaaagagcagctcgagctctacaagaaggtatggaaagaaaaaatagttatttctgggactttttcagaaatcagaattaattctccaatgtggcccaaattttaggcccccagccacagccccttgcttctcccagttttaagtcttggatttgtcaaataaattcaagacttcaaattaataatcaaaaattctcttaaaatttttttgaacccaattcaaaaaaggaaaaaaatttgcagtcaaaaaattattcgaatttctccaattttgtttccataatttccgaaagttattcggtatcataatgccaaaacaaaacgaaatcgttttaaaatattgctttctggacttgacttggtttagagatatagcaactgtgagtatacagtagttctaacacgtttattgcaatccctcggattttcagaactggttttcagaaaaaatgcgttgtggcggaggcgatatttcacaagtgactaaatatatcggtgagttcgaggaggatcgacacccatccttacccccccccccccccctccccacgatagttaaaatggaaaaacattggcagaacattttacagtgtcattcctaaacgtaacataaaataaatgtgcatgtttttttcttgtcgttcgctgttcgctcgacacgcagttatttcacgtcccaggcgtagtgtttgttgtgagcggtagtagggtagtagtcggactgacggttggttggaaacgagcgggatattcctgg

SEQ ID NO: 42802 - DNA, 1118 bp, Heterodera glycines
  unsure (1)..(1118): unsure at all n locations
cctagaaatgtgttataagaattttcagaaatttaaatcaataatttncgggaccaaaatgatctaggcgattgcccaaatttgataaagttatttttattttatatatattttttaatatggccccaatttgccgtgaaaatttgcgttcgaccaatttttttttctcccttttttccgaattgtttgatcagcagatttgcacagatccttctctatcccctgctcaaacatttttccccgatgtagagaccggcggacgggctcgggcaaaattttgaaagaaaaaaaaattacagggtccgactcgcactttttaggcatggatccggccggcatttcctaaaattccaggcctccaatttcacccatttgtatttgcagatatggtctcggatgacacgcaccggatgggcgacattccggccgcttggctgcccggcgtgtcggggtgagttgaacaacgaacggcgtgtctaactaatcatttttggcgtttcaattactttcatttaatttttttttaaattgcaaattaaaaaatttcatggatcgattttgaaaaaaattttcaaaaaaaaaattctaaaaaatcgctcgaaaatttttgaaaaattccctaatttgatttttattttatttttattttgaggggtaggggaaacatagaacccataaaaatgaatttcatattcattcgttcagaaaaacatgaaattttacaaattttcccccctccattttcttgaggcgtcgtttgcgccagtatttggtgtacgagaagccggagctgtggattcaaatcccgttgaattacaccaaccgatcgttgcgcgacacattcgccagcaaaccgccgtgggaattgtggtgaaacaacaacaattaagtggtgttgacaatagggataaagaggatggaggggaaacaacaaaaaactctttttcttccttttttttgtgcaaacaaaacacaatgccaacgggacgccgcgccaaaatttgttattcaaaccccaaggatatttttggttggtcccggttttggttgtaagctttttttgcacctattaatttgatctcgcccagcttcctntggtgatcttctgttcgataaaa

SEQ ID NO: 42803 - DNA, 1374 bp, Heterodera glycines
caggtcataattataaattgcagaggatgaagtgggacaaaagatggcactgctcagggaacgcgtgcgttccaacggatggtccgtttgcgtgagcggagacgactgatgttggaagggcaacacgccgttggagaagtgcaaggaagcggacggttggaggtgtcgacaattactggaagggaggggcgataaatttgcggaagggacaaaatgaaatgagtggcgaccctcggggggggggggggggggggcttccatctgtgccgccgaccaaccaactcacaaatgtaaggcgggcattgactctttcctaagctgcgtcgcttctgctgccaatggccatgtgacttcgtgcctttgttgtctgtgggggtattggtgccattgggctgaccattgtgccgctttctgcggatgttggtcaattgtggatgagtaaatgttgtgggagtggcttctttggcaaaactccggcccgaaattgttgtttgtattgttggcgtaatcggccattgcattgggtgaagcaataaattgggctgatgggatggggagggggaaagggttggagttgggctgggggtgggcgaagtgttggcgcgcagcggcggcgggggaaatgtgctgctgctggtgatgtaagctgaagaaagggccgacagaagggcacaggaagctgaaggagggggggggggaaattactgaatgtccacgcagagaaagaggtgggatgttaatggtcattttggcatattcgaaagtcagttccgggactaagagaggctggcaacaaaattggcacatttgctggtggatgccaactgctgaggaaggggcgcgggagggggagaggggaaaggggcgaggaagaagagtgacgacgacgttcggccgagccgggccgccctcccccctattctgctgctgatggtgacacacctttttacgcactccccctccaatcttagcgtattatcaatagttgaagaatggggtgggatgggccaaacaatgttttaatggagagcaagaaaaaagagagagagagaaggcgaaagagagagagagagaagagtggggaaagaaagatgtgagagagagaaagagagaggagatgggaaaagaataagataagagagatgggagggcggagaaaaggagaagggaacttttgagtggccacggattcagcaccaccatcaaatagatcaattcgaacagagatcaagctgagcggaagaattaaaaggaaggggagtggtgcagcagagaacagcgacacaatgatcaatcagttcggcagaggatcgtcccgaagagagagagagggggggaaagagagaatggaggggagcggtacgaacacagacc

SEQ ID NO: 42804 - DNA, 1790 bp, Heterodera glycines
  unsure (1)..(1790): unsure at all n locations
tttctaaattaattatgcttttcctcatttttatttacgttgctgtgaaaagagatgaatatatgcttaagcggatattatatatttcggcgaaaataatttcgaactaaattgaatgaggaaatttcaatcaaaactctagtaaatttttgttaaatatggataaatttatgggttaaaatgcaaaaatatcgcaaaaaaatgcaggatttgtgcggattaatccgcgctatttaatttctcacacaaagtgcactgacagttgtgctgtatttaatccatggaaatcctgcgcggaatccggttcttctactggtgcaattttaaataaaacgaatcaattgaatgaaaatgaaatgtaaaaaaaatataaaatttaaataatataagaacttattttaaaaaatatattttcagtttttaaattttaaaaaatatttaaatgttcatattatttatctcaagaagatttttaaaaaaatttttaattcaatataaaattcttaaattgaattacttaggatttcatctatttctttcaaaatttttaaatataaaatgaccaaatgaactaaaaacatagattttattaagaaaattttaaatacaaaatgaattaattgaactgatcggtaatccgttgatcaaaatctgatcactcagatctttcagcatgtaattttgatcgctgcgcaactgctggcactgcttggacaaatgatggcgatggcaatgccacctttctgatcgagtttctgtgttgttgtgccgatgaatcaattgttggcagccgagttcgtgccgttgtcatgccaccgttgcatggtgaacagaaacggtgccgaagttgattgaactgctccgaaaaggctgcacgaaactgaaacaataaaattccctaaaatttttaatttgaaaaatatattttgaatttattcagcatattaattcaataataataacaaaaaacttcttctttttttttagttttgttcctctgttaaatcagaaaacagacgaaaaattaaatcaagaaagagattcattcctgctattgttatcttcagcaaattttcaaaatcatcaattaaatattattttgaaaatctttttttttacaagttttaattattcatttatataggggggatatttggaattgaaacatgttaatagaataattaaaatttaaatataacaaacctgctcgttcaacagcgcataaagcaccggattccatatggttgaacttcaataaaaaaaaatcacaaattaattttatattatttatttaaaatacgattattattatttttttaaatatttaaagattatattttattttacctcatcgatatgcagtgagtgatgatgccaaacaaatattcttggctgagcacaaaaatgggcaaccactggttatcccgaagaaaattgaacagcacagtgggtgcccaacaacagaaaaacaatgcaaccattgcttaataagggcaaaaattatttaattatatttacaaaatattttttaaactttgcgagttaaatttacttatttttttgtgatttttgcctactttaaatgatgaaaattagtgaattaattaaagtaaaaattattcattggattatcaaaatttaatggttagggttcaaaaaatatggtataaaattacaaaaatggccataaaatatagactaaaaacgagaattattgaaacaannataaacatttaaaaataattaaattaaaaataaatattcttngagataattttgtaaaaaaaaaa

SEQ ID NO: 42805 - DNA, 1309 bp, Heterodera glycines
  unsure (1)..(1309): unsure at all n locations
acaaaggctcaaacactccgcaagcagcgaacattgcgtctatataaacgatgcttattctgcaaagatcggcagattttaattaccctggaacggggaagaaatggggaaaaagtcaaaatcctaatatgggcaacgataattggaacccagtgtaatagaatattatcacaacacacacattggttgaattcccagtaatgaacttttgcctccttcacgagttgctccttctaaaaactggcattttgataccgtatttttctttgcaatattttttgtggccaaataacgagcaaagggaacgttcatatgtaaatttcatctgacatgtatttttgatttaaatttttatttaaaattccttaacaaaaatgcaataaaaatgaaaatacatcccccaagaattgatctaaaaattcttaaaaataaatccataaaaatttctttgtagaaattaaaaatttgtactcgtcgcctaattctaaaaggcgtagaaaaaaacctggtcaaatgactacgaagttagtggtagatccgtagaagaagaaaatgaccacgaaattccgtttttaccaccaacttttgtccgattatttaacaaaattcatgcgttaaattcatataaaaattttgtttttgtttttcttcctttttgggataatgtgggatatttggcacccttatagggataaaataaattacagtttggtttattttaaataatttttaaaaaagtttattttaaagaatttttttttaaatgtttaaattggtccaaaaacttactgataagtattttaaaaatccttttaaaatcccttttagcaaaagaagaagaagtcaaaattcatgagagacacatcattttggtatacgaaaaaacaaagaattaactaaaaacgcgcgcataaaataatttttccaatgattaattgtggcaaacttttgagtcaattcaccatttttaagaattctttaaaataaactaacagtaaattaaaaattttgtaaaagaaaagttattttaaggagatgaatttttgaatttaaacatcataaatcttttggtggctctaggaaaatgcgtaagtgtaaattttaatgtcataaaaacaagttcccttggtttttgtggtcactgatcacgaacccagtgtccatttcggccaattccaaaccccggcccgaattcgaancaaagtttgattgtggccaaaaaaaagcaggaaattatgagaanataacacacaantttaatatgatataaaatattttaaaatatatttagcgataattaatgttttga

SEQ ID NO: 42806 - DNA, 1236 bp, Heterodera glycines
aaaatgggttccggactttttggctttttgaaataatttgtgaaaaatatacgaaaattattttagctttaattacgctgtacaatgcttttaagccccgccgtgaggcgggacagttccaaaattttgtaccacattttactgtggaaagtccaagtaccttattggacaactacgtgtcaatgagcacagtcgcctttggccagttgtggaacggaaaaatgggaatatcagatgggggcgctcttttctaaaaattcctcttttcgtctaaccatccctcccttttgtgcactatttcgtttcaaaattgaatcattttttttggctttttgaaataaattgtgaaaaatatacgaaaattattttagcttttaattatgcagtacaatgcttttaagccccgccgtgaggcgggacagttacaaaattttgtaccacattttactgtggaaagtccaagtaccttattggacaactacgtgtcaatgagcacagtcgcctttggccagttgtggaacggaaaaatgggaatatcagatggggtgcgctcttttctaaaaattcctcttttcgtctaaccatccctcccttttgtgcactatttcgtttcaaaattgaataattttttttggctttttgaaataaattgtgaaaaatatacgaaaattattttagcttttaattatgcagtacaatgcttttaagccccgccgtgaggcgggacagttccaaaattttgtaccacattttactgtggaaagtccaagtaccttattggacaactacgtgtcaatgagcacagtcgcctttggccagttgtggaacgaaaaaatgggaatatcagatggggtgcgctcttttctaaaaattcctcttttcgtctaaccatccctcccttttgtgcactatttcgtttcaaaattgaatcattttttttggctttttgaaataaattgtgaaaaatatacgaaaattattttcggttttaattatgctgtacaatgcttttaagccccgccgtgcggcggctccccttttgtgcactattttaccttttaatgttgattgcggacttatcgtattttagaaataaattgcgaagaatatacgagaattattttagcttttaattacaatgaacaatgtttttaatgcccggcgcgaggtgcgacagttccgcaatttcgcatcacatttcactgtggaaagacctagtaccttattgcagaacta

SEQ ID NO: 42807 - DNA, 907 bp, Heterodera glycines
cggggaatagccccaaaagtgtcggggatcggggtcagggaccggggagctcggggtcggggcttaaccctaatttagaacatcaaaatgatcacaacaaaaaatagtcatttttcaattaaaaatactcttttcccaccaatttccatcaccaatttttcacttaaaccctcattcttaccagtgtacttttattcccgtttttgagaaaaaatttacgggaacgggaaaacgaaaaagaacggggcgggattcccgaacgcgattcccgccttttttcccgttcccgtaaaaatcccgtcaggtaaaaaagacgggaaacgggaacggggtcccagtgttttcccgcgggaatcccgttcccgccgggctctaatcgaaattaatgcgcagaaaaaaggcatatgcttcaaaagtcggtctattgatcagaggcactaacataaacagacagtcagaaaagaagaaatacataatatacaattaatttctagagatatcattatttccatttaaatttgagtgtttaaattttttggctaataaaatcatgttatttattgtgttggattcataatggccagcaatttgcttaattaccgtatttcttgtaatataatcccccccccctgaattaatacccctcacctgaatcattatctcatttcaaatttgagtgtttaaattttttggctaataaaatcatgttatttattgtgttggattcataatggccagcaatttgcttaattaccgtatttcttgtaatataatcccccccctgaattaatacccctcacctgaatcattatctcatttcaaatttgagtgtttaaattttttggctaataaaatcatgttatttattgtgttggattcataatggccagcaatttgcttaataccg

SEQ ID NO: 42808 - DNA, 1424 bp, Heterodera glycines
atcattattggcaatttatgttatctgattcaaaaatcagatcgttaccatcaggattttttcgcatttctactaaaatctgtgatatttgttcccgaaaagaaacattagaaataacgaaaactaattaagcttctgtaaaacacaagaaaagaacaattataatagatacattgtcagatggccacttaaacaagaaaaaccggaaattccaacaaattttggtttatgttttggtcgattaaaaggagaacttaaacaattactaaacgagattttacaaaaccaataaaaatggatgttaatgaaattgtaccatttaaatccaaatatttaactcattatttagcatatcacccagtcattaaagaaacttcaaaaacgacactagacttagaagataaaaaaggaaaatttgaaaaattgtgtaaagaattaacagaaaatgcatatgtagacaactttgtaatgatatgtgaataaaatttaaacattcttggagtaaagaaattttcaaacttgcttcaatgaatttacgagaatttatttctaatcatgaaaattctaagaattaaattcagaaaattgagagctctgaaaatgccaaaaataagcaagattctttaataaaatggaacatagaaaatgatgatctaacaatatcaataaaaatcccaacgattaccaatggaacaattaaaagaaatgtaattcattttgcaaataattttatccaatgggatgggtttcacccgtaattttgccacataaaaatgctttcaaaacttatggaaatctaagaaagattgggatgaccaaacttagtaatgaagaaataaaacattggaagaaataacttatgaagaagaaatctatttaaagcatttcccatttagaaatctatggttcaaacagttgaactacacattttttctgacgcatcaggttcagcctatgcatatacagtctatttgaaattaattgagtcaaaacaaatatgtgtaatttttgctaaaacaagattagcacttgtaaaagaattaaagattatagttcatggacgaaattaattaattatattaaaattttactaaaatttatttcgtatattaattgattataattagcaaatgattctatgagaaattatttaagctaaatataagtaattgataaatgcagaaaaagaaattatatataatggtattaaacagttatttacacgcttctcaagacgtacaaaaacccccggcccaccacaatatactgctcattgcacaaaaaaattaaataattaaatggcacccaattctatcaataattcatttttttgatttaaataaggaatgcaataaccttttatgataatggaaataactcgtgtaggaaaataataaaagtcacatagtcattttaatcatgca

SEQ ID NO: 42809 - DNA, 823 bp, Heterodera glycines
tcagaaagggttctgaaacgcaccaaattttatttacaccgccgtgtaggcactctgatgctttttctatcaaattgggagatgaataaaatttttaaaaatttttaattcctttttaaacaggccaaaaagtttaggcttaactttttagtgaaaattcaatcactcatttttcgagtagtgatcagaagcgcaccagattttgcaggggcctaaaaaggtcaaggaaaggcgtctctgcgttgatttagcagtagtacctatgaatttaaattttctatgaatttttaaagttttttgaaatttttttaagtgcaaaatggtggtgtctgcaaaaaattttcaccgggtttaaaaaatctaggaaaattagtaagcatttgtagtgttccgatacgtatccctgcaaaatttggtgagcccctgatcaattacaaattatttatggacgatcaaatttttagaaatttttatttatttttgcataattaattcataaatatttttttcagaaaatgctctgaaacgcaccaaattttatttacatgctagtttaggcactctgatgctttttctatcaaaaagggagatgaataaatttttaaaaatttttaattcctttttaaacaggccaaaaagtttaggcttaacttttttttcagaaacttatcagaagcgccccaaactttgcagggatactgaaaggaaaagaattaacctgttttatcacattagcttgtcatcagtttttataaaaaattttcaaaattctgagtctcctattattttatttttttttcaaattctgaagggcggggggggg

SEQ ID NO: 42810 - DNA, 830 bp, Heterodera glycines
  unsure (1)..(830): unsure at all n locations
aaaaggcaggcacactaaccacttgaccactgggccgcctgccatcatgcattttaatgccctcttcccttcttttcttttattgcaaaaagctcgaccaaaagtgcataatttatttttctttataaaatatttagattttattttatttttatgttatttttgtatttatttaatattcaagttattttaaatttaattaaaaaaattatcattttataattaaaaaattattattttattataaataaatttattaattaaaaaacaaaaaaataaatctaaaaagaaaaaaagatgaattatttaaactaaacattgaatagaaaacaaacatcagcaatgggactcgaaccatccgccatcacagaaacaaagtcaggcacactaaccacttaaccactgggtcgcttgcctccatcccttttagttcccttttccttttccttcttttttggaagaaaacccgaccaaaagtgcttgtaatccctttttagggcacttcccggacccggacccaaacaaccctggtatcattcgaaagccaagagtttgtatatcatgcgaaattgtttcgatttttgatttgaccacttttaaggcatgcaaaaagcgttcaaaaataggacaaccaaaaaagtgcaaattttgactcgtttttcgaacacagttcgaacagttctaaaccgatcgaaaccgcactatttttcccttatagcccttgaaaaactgcgtcgattgaccccactcccgacccgtaacactcgctagaaagtcttanattagtttttaagcttggatcatggngtataatttcttatatancgaaa

SEQ ID NO: 42811 - DNA, 878 bp, Heterodera glycines
ttgaattgtatcttcccagcaaaatgatcactgtcgtcactttgtcctgggtttcttttattatgtcctttaaattgcatcttcacagcaaaatgatcactatcgtcactttgtcctggtcttcttttattatgtccattgaattgtatcttcccagcaaaatgatcactttcgtcactttgtcctggtcttcttttattatgtccattgaattgtatcttcccagcaaaatgatcactttcgtcactttgtcctgggtttcttttattatgtcctttaaattgtatcttcccagcaaaatgatcactttcgtcactttgtcctggtcttcttttattatgtcctttgaattgtatcttcccagcaaaatgatcactttcgtcactttgtcctggtcttcttttattatgtccattgaattgtatcttcccagcaaaatgatcactttcgtcactttgtcctggtcttcttttattatgtcctttgattgtatcttcccagcaaaatgatcactttcgtcactttgtcctggttttcttttattttgtcctttgaattgtatcttcccagcaaaatgatcactttcgtcactttgtcctggttttcttttattatgtcctttgaattgtatcttcccagcaaaatgatcactttcgtcactttgtcctggttttcttttattttgtcctttgaattgtatcttcccagcaaaatgatcactttcgtcactttgtcctggttttcttttattttgtcctttgaattgtaccttcccagcaaaatgatcactttcgccactttgtcctgggcttcttttattatgtccattgagattgtatactctcccaacaaaatgatcactttcgtcactttgtcct

SEQ ID NO: 42812 - DNA, 1059 bp, Heterodera glycines
  unsure (1)..(1059): unsure at all n locations
agggctaaaaaattgccaaaanataaagaattttaaaaaatttccaaaaattatgaaacttaaaatagacattatattcgtactcagcaccttattttaccccagaaaaaaatttttcaccacccttttcaagcctaaaaaaattttcgaaaatttctagggggcctagctcgaaaatttttgaaattttccagtcatgaagcacaccattcgatagcatttaaaattctctacaaaaatgttctaagacaatttttcgctaaaaccaacccctgacgagttatgggcccaggactcaaatgtcccgctgaggctaaaatttttttctatttccgggaaaaaatcgaaattttccgaaaaaaataccagtcgatagagctcgaaaaactatgttttggaagtggtctccgtttctctgggaaaattcgttaaaaattcttaaaattcaaaaacccgaaaaccgttttttaggcctagctcgaaaaattttgaaaattttcgaaatttttaaatttcagaaaatcgagcttccaaaactctacaataagtctgctgggcacttttctctcagatcaaacgccgacgcagtattagcctggtactgaagtgtactttttgagcacgcttcagttgccattttctgcaggccagggggtggctctattaaaaaaataaaaaataccagcatgtagaggaccctttggcggggtgccctcgcagcgggcattttttgatcagagttttagaaaaaaagttatgggccttcaaacgcaagcaaaagtgagaaattagccgccgggactcagttggccaccggaccggaaaacccttatttttcccagatgcgcctcaaaaagttgtaagacccttccactactttcagggcgctcccggccttcggccgggagattttgttttttgaaacgaaatgcaacttttctctatggtaatataaactagcgggtgcgtgaaccgtcggatctgggcttgagataaagcgcttcgcgctttgggagcttcgcaacctagacaagctatgggttgtgaagatatttggaa

SEQ ID NO: 42813 - DNA, 1337 bp, Heterodera glycines
  unsure (1)..(1337): unsure at all n locations
ttttgatagaaaaagcatcagagtgcctaaactaccatgtaaataaattgggtgcgttcagaacccttttctgaaaaaatatttaagnaattaatttgcaaaaaaataaataaaaacgaaagactcagattttcgaaaatttttttgagccagctagctcggcgctcatttcagtgtaagttagtcctttaccggggagtatccctgcaaagtttggtacgcttctgctcaattagcaaaaaatatgagtgatcgaattttcactaaaaaagttaagcctacattttttggcatatttaaaaagcaattaaaaaatttttaaaatgagaattcatgcgagattttctggaaataagcttaatagggcctagttaagctgtaaaaaaaatttggggcgatttgaatgagaatagaaatagccaggttcgatgaagttttggtaagccaaaaaaaaatccaaacatttaaaaatctataaaaaatttaaaaattagaattcatgcgagattttttggaaataagcttaatagggcctagttaagctgtaaaaaaaatttggggcgatttaaaagagaatagaaagaaccaggttcgatgaagttttggtaagccaaaaaaaatccaaacatttaaaaatctataaaaaatttaaaaatgagaattcatgcgagattttctggaaataagcttaatatcgcctagttaagctgtaaaaaaaatttggggcgatttgaaagagaatagaaagaaccaggttcgatgaagttttggtaagccaaaaaaaatccaaacatttaaaaatctataaaaaatttaaaaatgagaattcatgcgagattttctggaaataagcttaattgggcctagttaagctgtaaaaaaaatttggagcgatttgaaagagaatagaaagagccaggttcgatgaagttttggtaagccaaaaaaatatccaaatatttaaaaatctataaaaaatttaaaaatgagaattcatgcgagattttctggaaataagcttaattgggccttgttaagctgtaagacacccaccacttttgcacttaaaaaaatttcaaaaaatttgatcgtccataataatttgtaattgatcagcggctcaccaaattttgcagagatacgtatcggagcactacaaatgcttactaattttcctagattttttaaacccggtgaaaattttttgcagacacccaccacttttgcacttaaaaaatttcaaaaaatttgatcgtccataaataatttgtaattgatcaggngctcaccaaattttgcagagatacgtatcggaacactacaaaagcttactaatt

SEQ ID NO: 42814 - DNA, 544 bp, Heterodera glycines
aggaatggatttaattaaattctctccttcggggatttttttccattaggtcgtccgttagcgttcgattgctctagtcaatttttcaaaattttcgttgaaatatttcgtcgtgctccgaagggcgtgggaggggggggggggcgaaggcccaccacgaggccgcgaagaggccgagtgagtaccttcggtgcaggaaaattattaaattttaaaattttttaattgctttttaaatatgccaaaaaatgtaggcttaacttttttagtgaaaattcgatcactcatattttttgctaattgagcagaagcgtaccaaactttgcagggatactccccggtaaaggactaacttacactgaaatgagcgccgagctagctggctcaaaaaaattttcgaaaatctgagtctttcgtttttatttattttttgcaaaattaattcttaaatattttttcagaaagggttctgaaacgcaccaaattttatttacatgtgaccttaggcactctgatgctttttctatcaaaaagggagatgaat

SEQ ID NO: 42815 - DNA, 1093 bp, Heterodera glycines
  unsure (1)..(1093): unsure at all n locations
aagagatagccatttttctgagaattaattcacattttccgcagctcntacggtaatggaaaaaatttgaagaggctctccggaacggattagcatcggggttacgagatagaaaattgtcctaaaaagagatagccatttttctgagaattaattcacaatttccgcagctcttacggtaatggaaaaaattttgaagaggctctccggaacggattagcatcggggttacgagatagaaaattgtcctaaaaagagatagccatttttctgagaattaattcacaatttccgcagctcttacggtaatggaaaaaattttgaagaggctctccggaacggattagcatcggggttacgagatagaaaattgtcctaaaaagagatagccatttttctgagaattaattcacaatttccgcagctcttagggtaatggaaaaaattttgaagaggctctccggaacggattagcatcggggttacgagatagaaaattgtcctaaaaagagatagccatttttctgagaattaattcacaatttcctcagctcttacggtaatggaaaaaattttgaagaggctctccggaacggattagcatcggggttacgagatagaaaattgtcctaaaaagagatagccatttttctgagaattaattcacaatttccgcagctcttacggtaatggaaaaaattttgaagaggctctccggaacggattagcatcggggttacgagatagaaaattgtcctaaaaagagatagccatttttctgagaattaattcacaatttccgcagctcttagggtaatggaaaaaattttgaagaggctctccggaacggattagcatcggggttacgagatagaaaattgtcctaaaaagagatagccatttttctgagaattaattcacaatttccgcagctcttacggtaatggaaaaaattttgaagaggctctccggaacggattagcatcggggttacgagatagaaaattgtcctaaaaagagatagccatttttctgagaattatttcacattccgcagctcttacggtaatgaanaaaattttgaagaggctct

SEQ ID NO: 42816 - DNA, 150 bp, Heterodera glycines
cgtgcagattttaccgttgtcgttgaggtgtttgcccgcctctttcaggaagaagaacgcggttttggcgttgaccgccgtcatctcgtcgtactcggcttcgctgatgtcgaccatcggttttttcagcactttgccaacggtattgat

SEQ ID NO: 42817 - DNA, 1569 bp, Heterodera glycines
atatttgtctctcatcagtatcataaggtataacaaaacaatgttttatcggctaatttgtaccgattggcgaactattgttatgtcatagtgaattttattgtttattaattatttaaaaaacaaacaaaaaatatttaccatctatacgcctatgtcctatgtacatagggttgagcggtaccggtaccggtaccggtactggccggcaattaccggtttttttggtaccggtaccggcacagataccgcctatttcgacaatgaaattacggttagaggttagttattttccgatatcgttggaaaataattgaattgtgaattaaataattgtgtcccagattttagtatataacagtagaacaatgacactttaatacataaatttttaaataatgcttcgtttcaataatgatgaaatactcattttaattttaggataagattttcctttggatgtttcttgatcgatcagccgtcaacatttaccaaataaaatatgaaaattctaatgcaaaaccaccactacaatttagaagaaccgccaaaattggtatcgcttcactaagcaatggacagaggagaacaacatgtagataatatgaattgcacatcattggatttaagaccaacaaaatcaattgatcatatatatttgccccaataatattaattgttaattaccaaaaatggaaaaataggacataagaagtcacaagggagacgggctaatccacaggcaatcttcagaggaataggatttaatccgttcattaaatttaaaacattttcatcctaagacaattattatgagcatttattatttttaagaccacaagttttttcattttcttaaatgttcgcttaatatttcggattttttgcaacattttagtcaatgtttcagcattttttcgtaaatatttatttaaatattttgggatttttaataaatatttgtctgagccctactcatctccctctgcaacacatttagcaaaaatttaaacgcacatttcagaagtttattgtgtccgttgttgtcgctcgcggcatcgtccattcgtgcacgacttgttcaagaaggcggaaagtaaagcatattcagtcatcccaatcatcccaatctcttcaatttgcctcaaaaaatgatcgcgccaaaacgtacatattaaaatattttttcatttagatgaaaaattgttaaaaaattgtaacaaaattttcaaactttgccgaaggagcctgtcggcagcgtcggagccaaaatcccctaatctttaaaatttcaaaccaatatcccggccatgcatgtagtcaccgtcaaacccaaaaattcctaaattttattaaaaaaattggctcaaaattgcaaaatatgcctattttacggacaaaatcttttatcaaataacactcaaattttcaaaatttacggcggcgcctattcgcaccgcggccccttccataataagtttagaaaagtaatacgccaaaaaattgaaattttgttaacagatcacatcatagttaaaaattttagtacaacattcaaataaaaaataa

SEQ ID NO: 42818 - DNA, 1462 bp, Heterodera glycines
  unsure (1)..(1462): unsure at all n locations
taaatttntctgagaaagtaaatacttcaataggaaaaaaacttaaaaaacgttttttggaatttgtcttgttgacaaattcatccaaaagataaattttcggataatttaaaaaaaattactggcggggatttctaaaaaggttgccccccccctgcaattatttattcagcggtttcaaaataaatgaattattttttaataaatttttgaaaaaatcgctcaaaaatattcaaaaaaaatttttcaaaaaatttattgcgaaaaattcctctttttttgaaaaactgtttggccagacttgttcaatgcgtttccgcatttgttccgcattgagttgctgtttgctgcgcagattaatgctgatttttgatgatgtcgaaaatggtgttgtagttgctgttgttgtggatgacactgtgccaagcccgacacggtcccctttgaattgtgtggcgatctgtcaggcaaaaaaaaattctaataaaataatgaaaaatattagactttttcgcgaaaaataattaaaaacataaaaataagtaaacccttttggtttacaaaaaaatttctgtttaaaaagtcatgaagaagttgtcgggaattctcgaggtctctcttctgaccacaagtctgacatccatttggacaaactccgagtccctaacgcgaataattaaattttttaatttggctttttgttcgaatttagattagcgatccggaaaagacagaaacgtgatcagagacccagaaaagcgctggtggaaacaaaagatttctcgacttttagttgaccgaaaaaaaactttcaaccctccggtgcttggatgccctggctgtgcttgccgagcccttggccttccgcccagcccatgcccttgagcagcttgaagcctttgttctccgcattgattggcactgttgcagccgccgccgcggaggtaatgccaacgccgtttttcagctgctgttggaattgaacagagtccggagagtagcctaaaggaagacagctgtagaaattataattttttaaaataggattttttttgcaaagacctcaaaagaatttggagtgaatccagtaaaatagcacaactcagacaggcagaccagcaggtcgtccccccccccgccaattttttgaaaaaaatttcaaagtaaaatttttaaaaacagattcttagaaacttttttacaatacaaatttcctagcattttttcgaaaattttatgataaattattgtttttttcaaaaaaaaatttttttttgaattttccttaaaattttttctaacattttttgaaaaatttatggttttgattttttttttaaatttcagggggtatgacggtagtcaaaaaacgtcgttgggttgaaatgtgccacttcaataactcncccgtgccattatccattatggcaaaaaatcattttcaagtctcgccgaaatgagg

SEQ ID NO: 42819 - DNA, 1542 bp, Heterodera glycines
  unsure (1)..(1542): unsure at all n locations
ctttgtttacctcaaacggccgcttcgcgcccgttttntagcttgttaggctgcttcgcagcctcagtcggggcgcttcgcgccccgttttttccaaatttgttggccttgtacgggcgcttagcgcccgttattttttaacttgttacctcaaacgggcgcttcgcggccgcttttttttttaatgtaggtgcttcgcagcctcacattcgggcgctcgcgnccccttttttttccaagtgttgccttataggaattataagaggtacaataaatggtagaagaggtaaaatagtgattagaagaggtacaaccagtgatcagaagaggtacaactgtgattaaaaaaggtacaaaagtgattagaagaggtaccatcaatgattagaagaggtagaagggtaattagaagaggtacaaaagtgattagaagaggtacatcagtgattagaagaggtagaagggtaattagaagaggtacggtacaaaagtgattagaagaggtacatcagtttaaattttatttttttacaaattcaatgtaaattgaaacatgatattctttaattttttattcaaaatttaaaaattatttttaataaaattttctccaaaaaataatttaattcaaatgaaaaatttttatttgttattaataaaattaaaaatattttaaatgaataaaaattgaaaacagaaaataaatggtagaaaattaatgtacaccgtccggatccgaacctgccccccccctcaaaatgatgcctcagaatcccaatcacacagggattctgaggtcttaaccatgtctaaagtaaaatctgattacgatattcgtgatcagcggcccaaataacccctaaaatcatattttggaagatttttggtgaaaaaaattttccactcaaaaatcctggtcacacccctgtggtcccgaatctcaaaatcacttttatttttataaaaattctttaaaaagtgataaaaatgtaaaataaaatttatattatagagaaaaaaattgcggatttttgtagtattttacttttcccgaatagcttttcagaaggcagctacgaatttttttctgaaaaatcgaaaatttccagaaattctggaataactttttttgtttttgtggtataaatttcaattaaatctcataaaattctcccgattttttgctattttttatgctttaaatgagctgaattggaccattttgaggcgagttatgaatttttaaaatttaggttgaattttcaagggccaaaaattattgaattttcaaaatttttttaccaccctccaaaaaatccaaaacgcaatataaagtgcatattcgtgttcagcccctcaaattaccccagaaaagtattttttggcaattttaggagcaaaaaaatttctcacgaaatgcaaatccatggggtcccccctttggttttgcgtttcaaaatcacaattaaagttataactttttttaaactcatggtaaaaataccgcagggaggacattagatagagctcgaaattctctac

SEQ ID NO: 42820 - DNA, 1109 bp, Heterodera glycines
taatctgtataagtttacagtaggaaattgtaatttagggggttattggcgatttcaaatcgatccttccggaacactgatgctgtttatatttagagcgtaacgagctcgaaaacgtcagaattcaaaaagtggggtcgcgaaaatagtaaatctcgaggttattcggcgcttatcaacctcgatccgtccgcaacacttaaacagtttatatttaaagcctaattagcagaatcgtgaaattctctcatttgttactttatgatcatttttgtctaattcgcaaaattacagctcattcttcgcgaaatataaactgaatcagtgtttgcggaatgaccgagctgataatcgccaataatcttcgattacaattttcttggtcacctttttggaattccaccatttcaactccttatcctctaaatataaactgaatcagtgtttgcggaggaccgagctgataagtcccaataatctccaatttacaattttcatgatcacttttgtgatattctcaatatttcaatttcttatatccaaatgtaatctgtataagtttacagtaggaaattgtaatttgggggttattggcgatttcaaatcgatccttccggaacactgatgctgtttatatttagagcgtaatgagctgaaaatgtcagaattcaaaaagtggggtcgcgaaaatagtaaatctgaggttattggcgcttatcaacctgatccgtctgcaacacttaaacagtttatatttaaagcctaattagcagaatgtgaaattctctcatttgttactttatgatcatttttgtctaattcgcaaaattacagctcattcttcgcgaaatataaactgaatcagtgtttgcggaatgaccgagctgataatcgccaataatcttcgattacaattttcttggtcacctttttggaattccaccatttcaactccttatcctctaaatataaactgaatcagtgtttgcggaggaccgagctgataagtcccaataatctcaaatttacaattttcatgatcacttttgtgatattctcaatatttcaatttcttatatccaaatgtaaatatctgtataagtttacag

SEQ ID NO: 42821 - DNA, 937 bp, Heterodera glycines
cctttatacatcccattatgagcgctaaaattattagacttcacgaggatcgcatgtgatctaggcctagcaaaaaatggtgtaagtaaaaatcgtaattacgctcaaaaagcttctcaaacaattttagcgcttccaattccttctacaatcgcctttatacatcccattatgagcgctaaaattatcagagtgccgaaaatcgcatgtgatctaagcctagaaaaaaatggtctaagtaaaaatcgtaattacgctcaaaaagcttctcaaacaattttagcgcttccaattccttctacaatcgcctttatacatcccattatagcgctaaaattatcagagtgccgaaaatcgcatgtaatctaagcctagaaaaaaatggtttaagtaaaaatcgtaattacgctcaaaaagcttctcaaacaattttagcgcttccaattccttctacaatcgcctttatacatcccattatgagcgctaaaattatcagagtgccgaaaatcgcatgtgatctaagcctagaaaaaaatggtctaagtaaaaatcgtaattacgctcaaaaagcttctcaaacaattttagcgcttccaattccttctacaatcgcctttatacatcccattatgagcgctaaaattatcagagtgccgaaaatcgcatgtgatctaagcctagaaaaaaatggtctaagtaaaaatcgtaattacgctcaaaaagcttctcaaacaattttagcgcttccaattccttctacaatcgcctttatacatcccattatgagcgctaaaattatcagagtgccgaaaatcgcatgtgatctaagcctagaaaaaatggtgaaagaaaaaatcgaattaccctcaaaaagcttctcaaacaattttagcgcttccaattccttctacaaacgcctttatacatcccattatga

SEQ ID NO: 42822 - DNA, 1534 bp, Heterodera glycines
  unsure (1)..(1534): unsure at all n locations
caggccccctacagtctaggaaaaaaatatggatttccatataattccccgccctagttataacatgaaattgcaaaaaagtcaaaatttttgagttttttaaaataactttatatgctaattttttttctatttttttgtaaggctaatagagcatctgaggagttttcgaatgataccgagattgtttaatttggcccacacaaaaaaaaagctataatcaaaactcgggctggcgccaaaacgacctgctggtcccttaaatttagcccccaatttctttcactatttttcattcagactttcaaaattttaaagagcattttatcagctgtacatatatatttttacgcaacgacatttcatgtaaataatacatacgatcacataacaatgacaggaacataattaaagggaccgaaatagtgggaataataagacagcaatcacatgataaacagaggttatcgaaaggtcacatttcatctgaacacagcgaacgctttcaaaggccaaataaggcgagaatgtcggcgcgtccgccctcaacggcaatgtcgacagcgcttttgccttaaatggggggggggggagataagttagttgaagcatcacaattaacgcctttgcggtttacccaccgtcaattcccatatggtctgcgttcgcgccgattgccagcaaatgacgagtaatttcaatgttcttttctttcgcagcccacataagggcattgtatccgtccatgtcagcgtggtcaatgccggcgccgtgttcgatgagaaaaacggctgaaattggggaaaaattgagtcggcttttgtaccaattgctcttactaatgtccaagcgtccgcggatgcatgcgcctatcaaagcagtgatgccgtcgatcgcttgctgattgacgtcagctgcccactcgtccaccagtaaacggcacacctccaaatgaccattagcggcggcgttcaaaagagcaaatcgggtccctgaaattgaaaaagacacattaattagggcaataattattgagaaacgggcaaaaacccaccgctgttatccatctggtcaatgtttgcaccgtgagaaagtaagaagcgcaaaatttctgtctaaagaaatgaaaatgttttcaaattttgctgcctttctcacgtttccggaacgagaagtgttcattgtcggcgttgctccttcgctgtccccgagattaacgttgacgccattctccacgagaagggtgactgaaatggcaaaaaattttgatgagaaattagtccggacaattgcttcaccgatttctgtgctgcctttgtcacaagcgagcagaagcgtcaaggaggcgtcacttcccaagtccacgttggcaccatgagcgatcaacacacggcacatctccaactgcagcatattgacagcaatccacagggacgtaacggctgaaaatggggcaaaaggtgaattagccaacagcacaatcggtccgaaaaacacatttctcacccatgttcacatggntcacttgacgaac

SEQ ID NO: 42823 - DNA, 832 bp, Heterodera glycines
ggggagcgccccgaaaacaaaaaaatagattttttcaagtgaccgtgtggggtgctcacacaattatggggagcaaaaatccaacgcagaattaaagtacaggctatagggaagatactcccgaaggattcggtctcccccataaatctgggcgcatcggttcggggggaatgccccgaaaacaaaaaatcgattttttcaagtgtccgtttggggtactcaaacaattatggggagcaaaaatccaacgcagaattaaagtacaggctatagggaagctattcccgaaggattcggtctccccataaatctgggcgcatcggttcggggggactgccccgaaaacaaaaaaatcgattttttcaagtgtccgtttggggtactcaaacaattatggggagcaaaaatccaaagcagaattaaagtacaggctatagggaagctattcccgaaggattcggcctccccataaatctgggcgcatcggttcggggggactgccccgaaaacaaaaaaatcgattttttcaagtgtccgtttggggtactcaaacaattatggggagcaaaaatccaacgcagaattaaagtacaggctatagggaagctattcccgaaggattcggtctccccataaatctgggcgcatcggttcggggggactgccccgaaaacaaaaaaatcgattttttcaagtgtccgtttggggtactcaaacaattatggggagcataaaatccaacgcagaattaaagtacaggcaatagggaagctattcccgaaggattcggtctccccacaaagaagggcgcatcggatcggggggtctgccc

SEQ ID NO: 42824 - DNA, 1043 bp, Heterodera glycines
ctttacaaaattgtacccctggggggaaggggagcggacaacaatatttcaaaattttcaattttttctagtctaatctactcaaaacggttcagaattcgataaaaataacattcacggtgcgaaaaatggggtttgaaaagtttattggggaaaaaaagactacaaaataatacccctgggagaagggagtgggaaacatgatttcaaaattttcaattttttctagtctaatctactcaaaccggttcagaattcaataaaaataacattcacggtgcgaaaaatggggtatgaaaagtttattggggaaaaaaagactttacaaaataatacccctgggagaagggagtgggaaacatgatttcaaaattttcaattttttctagtctaatctactcaaaacggctcagaattcaataaaaataacattcacggtgcgaaaaatggggtttgacaagtttattggggaaaaaagactttacaaaataatacccctgggagaagggagtgggaaacatgatttcaaaattttcaattttttctagtctaatctactcaaaccggttcagaattcaataaaaataacattcacggtgcgaaaaatggggtttgacaagtttattggggaaaaaagactttacaaaataatacccctgggagaagggagtgggaaacatgatttcaaaattttcaattttttatagtctaatctactcaaaacggttcagaattcaataaaaataacattcacggtgcgaaaaatggggtttgacaagtttattggggaaaaaaagactttacaaaataatacccctgggagaagggagtgggaaacatgatttcaaaattttcaattttttctagtctaatctactcaaaccggttcaggaattcaataaaaataacattcacggtgcgaaaaatggcggtttgagaagtttattgcaggaaaaaagactttacaaaataatacccctggagagaagggagtgggaaacatgatttcaaaattttcaattttttctagtctatctactcaa

SEQ ID NO: 42825 - DNA, 1178 bp, Heterodera glycines
  unsure (1)..(1178): unsure at all n locations
gggggggggggggggggggggggtttttttttttttttcccccccccccccccccccctccctttttttttttttttttttgggggggggggggggggggggggggggggggggggggaaaaaaaaacaacccaaacccttcttctctttttttttttttttttttttttttttgggggggggggggggggggggggggggggggggggggggggggggggcggggcccgccccccccccccccccccccccccccccccccccccccccttctttttttttgtgtggtggggggggggtgggggggggggggggcgcgacacaaacaacaaaaaaaaaaaaaaaaatacaaaaaagaagaaaaaaagagaaaaaaaaaaaaaaaaaaaaaaataatttttctttttttttttctttttcttttttctttttttttttctttcttnccctcctaaaaaaaaaaaccacacacccccacacacaaccccccccctgttttttttttttttttttgtttttttcgcccacccccccccccccccccccccccccccccttttttttttttttttttttataaaaaaaaaccccccccgcnccncccaaatataaatttttttttttatatatatagggggcggggcgggcgccccccaacaacaaatttttattttccccaccccgaggggcccccaatattaggggggggggggggaaaattttggggggggggggggggggggggnnncccccccccttggggacaagcgggggggggaaacccctctaaaaaaaccaaaaggggttttttgggggggcccccctggtaatttgttttttccccccccnnnnnnnnnnnncncgttaaaattaaaaaaaaaaaaatagttcccctccccccccaagtactagtcgaaattaaaagcctatctgtgcgatatatctttatatcactgtctctcgctgtcgcaatgttgtcgtctttctttctttctttctcgccttcagcgtctctattataccttctgttcgtctctctctttttctatgtcttttctctctctcctctccatggtttcctttgctgttctttctcattttcgttggaagcattttctttttatgcatccacagacatcttcttccatctctctgtaggggtatatataacatccaca

SEQ ID NO: 42826 - DNA, 1513 bp, Heterodera glycines
  unsure (1)..(1513): unsure at all n locations
ttaaaaagtgataaattttgaattttatcaaaaaccatagggaggacccttttgtttaaaaagtgataaattttgaattttataaaaaaccaaaggggggacccttttgttttgcaaaatttttagaaaaaaaattcatgaatatacttttactcgccataattgtgctgttaatgtttaatattcattattatttataaaaaattttaaaaaattcgaccaaaaaaaagtgcaaaaaaattggttctgttccgctttatgcgtcccatgaacttttatgcgtcccgtgaccttttatgcgtcccaaagaattttatgcgtaaaaatttattaaataagaaaatgataataaagaaaagtacacagaaaatgctgagaaggaagacatttaaaaacactaaaaagagaagcaaacggctaacaaataagagcattaaactgggtattctctacgcatttcctccaaaatgttttggaatattttgatgtttgaatgataacgacgaaatgcgtactgatacaaatatgttggcaataagtcaggcgtagtcccatgcaaatgttttaggctttgttttaaagccctccaagtcgcttcaattccctgggtgtgtatttgagggttgtttgggtccacaaaatacatttggtggtttacccattgatggttatactgttgctgcatgttatttattccaccgtaagctgcccaaccgtccgaaactatcgtactgccagcctcaatattatcagcaataatcggaagaagcgttgctgcagtccggtcagcgacaggaaaaaaccttacacgattggttccacgttcaatcattccaaatacccactcataagggcgatttaacatcctccctcgattgtatttggccctatacattttggtctcatctatttctataacggtgcccatccctcctagcttcccttcctcttgtttcctaattgcccagtcctggcataaatctctaaaaaagttataaaaatcaacgatcgtgtctttgcgagttactccggtttctctcattactgcatccatagtgcttgttggatgaacagaccagtagtagcaaagtttcatgacttggtgtagagacagatgcacctggctgaaaaatgaaccaattctgatggaaaatcgacttgagctttcgctgccaggaattgcttttcgacaatgactgcatcgccacttaaaatcaatgttataagaatattttacatttttttcactataaagccttcagggctttgtgcatattttacaagtgaagcaacgtgctgctgacattctggacaagttaacgcattagcaataagtccataacgagcaagccatttgatggtttgctcgtatcctcaaaaaatcaaatacataatacttaatatgtgcataccggctggcccatcttctccaaganaatccctgacaagtatctncaaatttatattctccaatgcgaccaattccccgggaggcataacaggaccatcattt

SEQ ID NO: 42827 - DNA, 1385 bp, Heterodera glycines
  unsure (1)..(1385): unsure at all n locations
atgattatcatttttatgtgctttttgtaatntattaaaaatntaaatcatttattttgactttatagcaattatttttaattctttatagtaattaattgttttattgtagattacaaaatgtcgaaagaattcatgatttgaatttattttttattttataaatatgtattaattaaatttcatttattcagttcagttcatctcttttatttaattaattgtaaaataattttatttaatatattttatctctttttactctttaatctcatggtgcaaagtggtttttcctgtcaatgttgaggttcgcttttcgaaattatttgattcgcttattattaattaaataatgatatgcttaaacttatgagtacaaattaaattgcctttattatttttattaagattagttcatttctcagtaattaaaaaagagttaaatttgttttaatgatgacatttttgaaaagtcaaatttcttttaatttctttttctttatctttctatttttattattttataggttgccttgctataaatcttgtgtttccccaccaaataattggccaataacaaaatactaaattaataaattttcgcaaaataaaagtaattttttaaattttttttattgtaaaatttttggtgtcttaaggtgcttaatacatgatttattctaatttaaattttattactattttgtattttttactaatttatttttttattttgtttatactttttggtatttttattttaaatttcaaattcgtattctcacgacgtagtcaaagaattgaatatggtcatttcaaagtattttaatgatttattattattcatttaatttttgtttattctcatttttaaatgcccatatttattagcttgcaaagcgtctaatgattatttattttctttataacgtatatttgtttaggaaaagcttttacaaattcgaatcggggttcggaataggtcaaaacggacgatttttacgctaaaaactcctaaaaatataaatttaaaggggtaaatctgaaggtaattaaagcaaattttgttgtgcagtggatggttgggcaatggaaaaggtgctgctacatttgcgcccctacatttgcgcccctacatttgcgcccctacgtttgcgccccatacatttgcgccccttacatttgcgccccgattgtgaacaaaaaaaatttattcatgaaattgcctttcccaagggctaacgggagtgattttatcaaaaaatcatcttgcacatccaaacaactcttgttttccttctcctttgaccgcataaagcatcaaaaggccaagatccgcctttgaatttttcaatttctggtcgccattgtttttgctttattaa

SEQ ID NO: 42828 - DNA, 856 bp, Heterodera glycines
ataacgccaaattagcgtaattggcgtaaattattgcgcgcttaattcaaaaattaccactggaaaaatcccttttttgtattttttattttgatccacccatacctcgcttccttccccaactaaagtgaacaaatttggtatctaaaataagaatttgaaaaggggaatctttttctaagcgaatgctaagcgatttaagtcatatgaaaaaagttgtgagagtttcaaattttttatcacgttataactcaagtcctaaactgctgatttcaaccaaaatgcgaaaactaatccattttctattgattctaagtgttcaaagtgattttgtagcctataaaccaaaattgttagaattagcgaatttgatgtttttcatgtgttagagacgatgaaaattagtacgccaaaattagaggaaaagaaaatgcaaaattttcatcatcccttaactttaaaataggatagaaattcattaaaaccttatagaacattcgattcaaaatttttttgtctatcgatttgcaaaatttaaagaaaatctgtaaggcgaaaaaaaagttctatagagcgaagtgaatgttgtttttttacatcattaaaatgaagagatagtacgccaaagaaagagtaaagaaaaagagaaacgacgagatagtactaggcttttctctgcacagtggagttgacccatagtgaatactgtgctttgtccccccacccttttcgaaaatattttttttgtttccaaaagtcatgaaacatgtttccaagggtttttggggttgctgatcacgaatccggcattcttttcgaacaattccgaccccgggcctgaattcgaacaaaaagt

SEQ ID NO: 42829 - DNA, 1305 bp, Heterodera glycines
agcaacatattaattttaaattccaacgccaaattacaacgataattttctctgtcttcaatttcttcatttcctttcgccaggggcggagcaaaagcagtcaaaatagctaaatttcaaaatccattgtgtaaacgatggaaaaaatgctaatttatcgtttcaaatacacccctaagaatcgggcgaaaaattttaaaaaatacacccctaagaattgacttttcggatcggtacccccccccccccaagcccaaatcctggatacgtccctgggtgctgccggaaaaaaaaattgaaaattgggagtttttggtagcattttttacataaaatatttaagaaatctgaacaattttcgtcgctaccccaaaatcagaacatttcttataaataacgcactcttgctggcgctaacgaaatcagatgattaaagtgaaaaaaggaagatttacgagcatttaaaaataaaaattgagtttttcgttaaaaaattttcgtagatcactacccgatcggggtccccgacccccgacaattgagctcccccccgacccgacccccgacaagccgcccccacaggaccccgttcctcttaaactcgcccccccagggcccgggagatagaccatgataacaacagcaagacaagtcaaagaagcaacagctgatccacaataatattaaaaagaggaccgacaacacacacccgaacgaggcatgactatggaaaaagaacccctaattgataaaaaaagatcatgagcacccaaaccaatgaaacataaacgagtctcatgcgcgacaaaagaaacggacaaggcataagaggcccaggactcacgcgattagaatcgccaaccatccactcacaaagaaaaaaaaaaggcagaaaagattgaggattaggcgtaacgctcagacttagaacctctcaaaaatcggcggatacgatggaaaatgacccaaaaaatgagaaaataccatcatggcgagcttgacattaaaagtcataaaactaagaaaagttaataactattaacaaagacgagctgaaaaagtgatacttacttgaaaactagaaaaatagaagaattgaaacctgatgatcttactattcagactatttaggcaattcataccgcagtctaaacgaaaggccacacgagaactagagggccggatgggactaacaccctgaatacccggcttattcgggccccgaaaaatcaagagacccgcctaaaccaatccaaacttataaatccgaaagctcgaacagacagagctgatgatggggctccc

SEQ ID NO: 42830 - DNA, 686 bp, Heterodera glycines
aagagacctacaaacagattacatttaataattagaattgcaaaaaataatcagtgttaaggccttcagaaatccgacataaaaataaaattatttttattttactttgcttttttaactttaattaattaattttttaagtattgtgtttctatgggaatggtgcatattttatttgaaatttagaagagtcgttccactctcccatctttcaaaaaattttcaagaattttcttttaatttttcctgaaattattcgcagctttttaatatttgctgaaaatattcaatttttgctatggaaaattcattttccacaattttcggcaatcagaattacacaaaataatgaactcaactaccaaatttggcattaatattttgtcaaattctgaagtcaaaacatcatttcaaatagatatgaacactaaaaatcaaaattagttaaaattaaatttaaaattattttattttatttttacataattttcagatgctggcaatttgtccactttcgcttctcctttttctgctactgatcttccgctgtttccatgcatttctatgggtgattcgggcgatttgattaaagcaaatttcggaccgaacttcaaattcgacctcaacaaatgccgcaaacaatcgcaataatttcatatatttttgtaatttttcacattttattt

SEQ ID NO: 42831 - DNA, 870 bp, Heterodera glycines
  unsure (1)..(870): unsure at all n locations
atttttcgcaaatttaaaaagcaattaaaaatttttagattttttattcatctccctttttgatagtgaaagcatcagagagccttatttaacttttaattaacatttggtgcgtttcagagcacgttctaaaaaatatttatgaattaattttgcaaaataataaataattaatgaaaaagtcagaatttcgaaaaattttaaaaacaacaagcgttggcattttttcaggttaagttagtcctttacaatggagaaggcctgcaaaatttggagagattatatcgattttagtgcgctaggttcgatgaaactttttaaaatataagcctaaactttttggcctgtttaaaaaggaattaaaaatttttaaaatatttattcatctcccttttgatagaaaaagcatcagagagccttatttaacttttaattaacatttggtgcgtttcagagcacgttctaaaaaatatttatgaattaattttgcaaaataataaataagtaatgaaaaagtcagaatttcgaaaaattttaaaaacaacaagcgttggcattttttcaggttaagttagtcctttacaatggagaaggcctgcaaaatttggagagattatatcgattttagtgcgctaggttcgatgaaactttttaaaatataagcctaaactttttggcctgtttaaaaaggaattaaaaatttttaaaatatttattcatctcccttttgatagaaaaagcatcagagagccttatttaacttttaattaacatttggtgcgtttcagagcactttctgaaaaaatacttatgaattaattttgcaaaaaataaataagtaatgaaaaagtcagaatttcgaanaatttt

SEQ ID NO: 42832 - DNA, 990 bp, Heterodera glycines
aaattttaaaaattttttaattgctttttaaatatgccaaaaaattttaggcttaactttttagtgaaagtttgatcactcatattttttgctaattgagcagaagcataccaaacttttgcagggatactccccgggtaaaggactaacttaccactgaaatgagcgccgagctagcttgctctaaaaaatttttcgaaaatctgagtctttcgtttttatttattttttgcaaaattaattcttaaatattttttcagaaagggttctgaaacgcaccaaattttatttacatgttagtttaggcactctgatgctttttctatcaaaaagggagatgaataaaatttttaaaaatttttaattcctttttaaacaggccaaaaagtttaggcttaacttttttttcagaaactgatcagaagcgcaccaaactttgcagggatactgaaaggaagagaaataacctattttaaatattatctagtcagttcatttaaataatttttatccaaaaaatttttttttgggttttcggggcagtccccctgaaccgatgcgcccagatttatggggagaccgaatccttccggaatagcttcactatagcctgtactttaattctgcgttggatttttgctccccataattgtttgagtaccccaaacggacacttgaaaaaatcgatttatttttgttttcggggcagtccccccgaaccgatgcgcccagatttatggcgagaccgaatccttcgggaatagcttccctatagcctgagcccccccccccccccctcccttcttcccttactctttttccctctttttctttcccttttgctcctcccccattttacttttcttttccttctcattttctctttccctactctttttatctcttttctctcctttccctccgtcacttgccaagttgttctgataggaggtcaccgcgatgaattccgtttcggcaaagctcgtcgtt

SEQ ID NO: 42833 - DNA, 1127 bp, Heterodera glycines
ccgattttctaaaagccgaattgtttggcggatgtgtttctgtcaccgctccgcgactgatcacaaacgaacgcgacgatttgctaatgagccaagcggtgctaaagtgtcgggcacacccgctccgattgaacgcggacgcgcatatcaccacttcccttcggtggtggatgttgacattggcactcgcccgacgcgcactcaaatcgccgtttgatgatcagcggattcaaaccaatgcgagccgaagtgtccgcacaaaatccgtcgactcgtttggcacgggatttataaccaattcgaatggcgcgacgttcggcggttgtgcttctaccaccgtcaaatggaaatggcatttctaaaggcacgcgggccttgacttatgaggtggatacagtagggccttaccatatctcatctttaatgattactaaaaacactagattaaatctttatctcgcgagaaatgtccgtgcgattatgttgtaaagtccaaaggcaaaaaaaaaggcttttaatggttccggcggaaaattttccgattatccgttacgacaattgctcatttccattttattttttatcaataaaatgtttaaatattttaataatttagaatgattttaattggcttaattattattgccttcgtgactttttgtcttctgttgagtttcattgggtttaggggtattttttggttatgctgtcacaaatgataatgattccttttttaagctcgttcgcgctctgcctctgtgtatgagcgctcccgtcgtgtttctcaaactggcactcgcgcacatgttattgactttgatgaaccaaatacaagtgccggagcaaaccctgttcgtggtggcggtggcgggcgttttccaattgacgatgcaatgtggttgtccatgtttcgccgcttggtgggtttaatttaatttaatttttacttaaagtttatgtttttttttgacaaaaaaaattttgaaaacgaattttttaaaaaataaattctattttaagctttttttaaatttatttatttatttttttaaatttattttttttttttattttttaattttattttttttttaattaacttaactatttttccaaattaatcaatg

SEQ ID NO: 42834 - DNA, 1005 bp, Heterodera glycines
  unsure (1)..(1005): unsure at all n locations
aggcaacttggttggtaccaagttntgcggtaaaaaaatgagaaaaaagagatagccattttttggtcaagaattttttttgtttgcgtttcaaatatcgtaagattgtttgatagggccagacaagagaaggcaactgttggtaccaagtttgcggtaaaaaaatgagaaaaaagagatagctattttttggtcaagaattttttttgtttgcgtttcaaatatcgtaagattgtttgatagggccagacaagagaaggcaactgttggtaccaagtttgcggtaaaaaaatgagaaaaaagagatagccattttttggtcaagaattttttttgtttgcgtttcaaatatcgtaagattgtttgatagggccagacaagagaaggcaactgttggtaccaagtttgcggtaaaaaaatgagaaaaaagagatagctattttttggtcaagaattttttttgtttgcgtttcaaatatcgtaagattgtttgatagggccagacaagagaaggcaactgttggtaccaagtttgcggtaaaaaaatgacaaaaaagagatagctattttttggtcaagaattttttttgtttgcgtttcaaatatcgtaagattgtttgatagggccagacaagagaaggcaactgttgttaccaagtttgcggtaaaaaaatgagaaaaaagagatagctattttttggtcaagaattttttttgtttgcgtttcaaatatcgtaagattgtttgatagggccagacaagagaaggcaactgttggtaccaagtttgcggtaaaaaaatgagaaaaaagagatagctattttttggtcaagaattttttttgtttgcgtttcaaatatcgtaagattgtttgatagggccagacaagagaaggcaactgttggtaccaagtttgcggtaaaaaatgagaaaaagagatagctattttttggtcagaaatttttttgtttgcgtttcaaatatcgtaagattgtttgatagggc

SEQ ID NO: 42835 - DNA, 725 bp, Heterodera glycines
ttcgcggcctcaggacgggcgcttcgcgcccgtttttcaaaatttgttgacctacagggattataagaggtacaataaatgggagaagaggtaaaatagtgattagaagaggtacaacagtgatcagaagaggtaaaatagtgattagaagaggtacaacagtgattagaagaggtagaagggtaattagaagaggtacatcagtttaaattttatttttttacaaattcaatgtaaattgaaacatgatattctttaattttttattcaaaatttaaaaattatttttaataaaattttcaccaaaaaataatttaattcaaatgaaaaatgtttatttattattaataaaattaaaaatattttaaatgaataaaaattgaaaaacagaaaataaatggtagaaaattaatgtacaccgtccggatccgaacctgccccctcccccctcaaaatgatgcctcagaatccccaatcacacagggattctgaggtcttgactatgtcaaaagtaaaatctgatcacgtattcgtgatcagcggcccaaataacccctaaagacatatttttggaagatttttgtgagaaagatttttcaactaaaaaatcctatccacccctttggtcccgaatctcaaaatcacttttatttttataaaaattcttaaaaaaatgatacaaaaaggaaataaaatttatattatagagaaaaaaattgcggatt

SEQ ID NO: 42836 - DNA, 880 bp, Heterodera glycines
  unsure (1)..(880): unsure at all n locations
ggggggaaagaaggggtaggatacaccntttttattcatctattcaatttagctaaaaggagtgaaggggatgagagaaagagagagagagagagaaaagtgataaagcaaagaacggataatttcgtaagggtttttattcggcgacacaattttctttctaaattgtctatgcatcttcgcaacccatccttcgttccgtttaaaaattggcgttctgatgcatcggttccgccgtgtccaacaaccattggtccgtctgtacccatttggtgcccacgcgctgtcgccgctgcatgtgccttaaaatttggcattcgctttgaacattttccaattttacttgttcagctgttttcgcctttctgaattaaaaaagtttagttgctgagaggaaaggaaaagactcgcccgagggcataattaagtagagaagacgcgagcggaggggcatccgcgcgaccactgcgtcgagggggcgacggctgtgcttctctgaacgggcggctgactcatcagtttttgcattaaaattgtgtacaatgcaatttcattttatttttatgatcgttttcattttgaacaatttgttttgcatcgataggctctgccgccgaaagaattttcgaaaattcaaaaacattttcaaaaatatggcgtgactttcgccgttttccttctgccatttcctttcctcactttgctcttccttatccaatcccttcgctctgtcaaattcaatcgcccgcggcgcctttccgtttgccgccatttcctttctctgcccatcgatgggttcgatttggtcctcgtccaattcctttggcattttanaaatgtttttttttctggggcatttcttccccccccccccccccat

SEQ ID NO: 42837 - DNA, 1174 bp, Heterodera glycines
  unsure (1)..(1174): unsure at all n locations
tcaagtgtccgtttggggtactcaaacaaantatggngagcaaaaatccaaccgccagaattaagtacaggctatagggaagctattcccgaaggattcggtctccccattaatctgggcccatcggttcggggggactgccccgaaaaaccaaaaaaaatcgatttttccaagtgtccgtttggggtactccaaactttaaaaaatgagaaattccatgcgaagatttttctggaaaataagcttaattagggccttagttaacctgttaaaaaaaatttggggcgatttgaatgagaatagaaaagagccaggttcgatgaagttttggtaaccgaaaaaaaaatcctaacgtttaaaaatgaaaagagctagagcttgattagtaaaaagccatcgagagagccttatttaacttgtacgataaaatttgatgcgtttcagagccattttctgaaaaaatatttatgattaatttttcaaaaaataaataaacagttaaaaactcgagaatttctaaaaaaatttaaaaccaattacaattgtcattttttcaggttaagttagtcctgtaccggggagtatgcctataaaatttggtacgattttattgattattgaaagagctagaaccgaagaaaatctttttaatttaagcctaaactttttggcatgtttaaaaagcaattaaaaattttattcatctccctttttgatagtaaaagcatcagagagccttatttaacttgtacataaatttgatgcgtttcagagcactttctgaaaaaatatttatgaattaattttgcaaaaaataataaacagtgaaaaactcagaatttctaaaaaactttaaaagttatttctcttcctttcagtatccctgcaaagtttggtgcgcttctgataagtttctgaaaaaaaagttaagcctaaactttttggcctgtttaaaaaggaattaaaaatttttaaaaattttattcatctccctttttgatagaaaaggcatcagagtgcctaaactagcatgtaaataaaatttggtgcgtttcagagcagtttctgtaaaaatacttatgaattaattttgtaaaaaaataaataaataatgaaccctcctccttaataattttcctgcgcccaaggtctcactcagcctcttcgcggcctc

SEQ ID NO: 42838 - DNA, 1046 bp, Heterodera glycines
tcaaagaacatgcagcaataagcctgcaaaatctaataagtggaaaatacctgagtatagaatttattttcagaaagtgtcaacagacttttggaaaaatatatttgcaatttatcaacaattttgagaagtgagttagaaatgataaacttcacgattcaaaccagttttcggtgctctaattaaccgcgataaaaacatccgaatcaattaaatagcttctgagataataaggtttatcataaaatttcatttaaaaataaaccctcaattattggtatgaacgatactttccaaacatgcacgcgttttgcgctcgagctatttatcatcgggcttgtcaatccaaagcgaaacaacaaagatgctgttttgaacgaataaagggcataggttattttgaagaagtgtcaaagaacatgcagcaataagcctgcaaaatctaataagtggaaaatacatgagtatagaatttattttcagaaagtgtcaacagacttttggaatatatatttgcaatttatcaacaattttgagaagtgagttagaaacttcacgattcaaaccaattttcgttgctctaattaaccgcgataaaaacattcgaatcaattaaataacttctgagataataaggtttatcataaaatttcatttaaaaataaaccctcaattattggtatgaacgatactttccaaacatgcacgcgttttgcgctcgagctattcatcatcgggcttgtcaatctaaagcgaaacaacaaagatggtgttttgaacgaataaagggcataggttattttgaagaagtgtcaaagaacatgcagcaataagcctgcaaaatctaataagtggaaaatacctgagtatagaatttattttcagaaagtgtcaacagacttttggaaaaatatatttgcaatttatcaacaattttgagaagtgagttagaaatgataaacttcacgattcaaaccagttttcggtgctctaattaaccgcgaaaagaacatccgaatcaattaaatagcttctgagataataag

SEQ ID NO: 42839 - DNA, 852 bp, Heterodera glycines
aaaaatgctctaccctctcctcccctttttcccttcctctcctcccccctttccccccacgccctccgccctttccccttccttgttcgttcgttcgttggtcgcctttccactgcctctttgatcgcccacccatccgtcatccctccacactttcccacatttgatccttttaaattttatccaaatcattcagatatattcattcgtgcatcacaatctctgctgtcattcatgttctccgccacctctaccaccagcgacagcaacagcaacagaagcaacagcaggttatccaatccgatccgttctcatcccatcacatcacatcaaatcattagacaactgaaatttgaaagagaatttgacaaaatttgagcaatgaaaaagttcaagcaacggatcagcaaagcatttagcggaggcgccgttgaggagagagaagggcaaatgcaaattcaaattgggacggagcaacgcgggcacgggggagtaacgccgagagagaaggctttccgaacgcagcagcggcccccccacccccagggcgattccatcgctcgccaattaagcgccgcctctttcgcttcgtcctcctcccaatttttccccggctcttccgtccccgtggacccttttatccctagcaaatatttcccagcaaatgatttttcgggatggaatcggtgagagaagaaaaacaaattcgaatttggcattttgccatcagcaggagcagataccggtggagcttatcagactcattgtctcatataaatgaaagaattgggccgatgactgtgcaagaggagggaatagcggggggagagagtgccaaagggggaaaagcgg

SEQ ID NO: 42840 - DNA, 1005 bp, Heterodera glycines
  unsure (1)..(1005): unsure at all n locations
ccccatttttcgcaccgtgaatgttatttttattgaattctgaaccggtttcaacgaggagagtagaaaaaatngaaatttaagaaaanaagtcttaaaatgggttataaaaggggtattattttgtaaagtgttttttttgaaaataaagttttaatanantattttttgtagagtgaatgttatttttattgaattttgaatggttttgagtagattagaatataaaaaattgaaaattttgaaatgatgtttgnaaatttatttttttaggggtattattttgtaaagtgttttttttaaaataaaatttttaaaaaatattttttgtagggtgaatgttatttttattgaattttgaaangttttgagtagattagaatagaaaaaattgaaaattttgaaattatgttttaaaattatttttttgaggggtattattttgtaaagtattttttttataaataaaattttaataaaaaattttttgtaatgtgaatgttatttttattgaattttgaaaagttttgagtagattagattagaaaaaattgaaaattttgaaataatgtttggaattttattttggaaggggtattattttgtaaagagtttttttttttaataaaattttaaaaaagaatttttttaagagtgaatgttatttttattgaattttgaaaaggtttgagtagattagaatagaaaaaattgaaaattttgaaattatgttttgaaatttatttttcaagggggattattttggaaagttttttttttaaaataaaattttaaaaaaaaattttttgaatgagaaagttatttttattgaattttgaaaagggtttgagtagattaaattagaaaaaattgaaaattttgaaattatggtttcagttccttttcccaggggattattttgtaaagtcttttttccccaaaaaattttcctaacccattttttccaccgggaaagttattttttattgaattttgaaaccgttt

SEQ ID NO: 42841 - DNA, 748 bp, Heterodera glycines
tcggttgacagatcatcagtcagcgttttgttgtacctagtcaatcaattaataattaattaatcaattaattaattagttattaattattaattaattattaattaagtgtttaattgattgattaattgattgattagcattgttttgtttgtttatttgtgattaatcgccactttctccgtcctttttctttcttttcttctgtcccatttttctcttctcctcccattttcattttgttttctcttttccgattgatctcatcgctttttcaccgtacaaaaatgtacaaattattcgaataaattataaaaaaacaataacaaatcatttcacatataataaaacgaatattggacaaatcggagaaaactttacaaattgaaaatggacaaaatgagaaaaagggaagaaaggccgaccgattctttgggaaaaagcgcactttattcaaatgttcgtccgttggctcccatttggccattcgtcattatttcccacccaattgtccaattgttcactcattccctctcaatggctcttcgtttttttggcttttgccccccccccccgtaaatttcctttttttgtccgcttttataagggatcgtttgctcttaatgcatttccgcgactttcattcgctgctgccaatgattgaaatgaatgagaggaatttcatcgtttgcggtcggccttccctttgccctttttgtttaattgactgaatttgaaaattggtgcc

SEQ ID NO: 42842 - DNA, 1181 bp, Heterodera glycines
aaagaaaagaaagaggaacaaaggaatgatgagagtaaaaaagaaaaaggagagaatgaagagaggaagagcaaagaagaggagaagaaagagagaaagagcaatcaagaagagaaaaaagagagtgatgaagaaaaagaggaagaggttaatgaagaaaagaaggatgagagtaaaaaagaaaatgaaggagtgaatgacgagaggaagcgcaatgctgacgagaagaaagaaaatagggaagaaaaacaggaagaaaaggaggagaaaagggccaaggaagaagaaaacaaggaagagagtaaggaagaaaaaatgggagagaggaaggaagatgaaaagaagaatgagagtaaaaaagaaaaggaaggagagaatgaagagatgaagagtaaggaagaagagaagaaggagagtaaggaagaaaaaaaggaagagaataataaaaaagaaaaggaaggagagaacgaagagaggaagaagagtaaagaaaaagaggataatgaaactagggaagaaaaactggaagaaaaggaggagagaagggccgaggaagaagaaaagaagaaagaaaaaaacgacgaaaaagtggaagagaaaaataataatgacagcgaggagcaaaaagtcaaagataaaagaaaggacaaagaggaagaaaagaagaaagagaaaggcggaagagaaaagaaaactgaaaatggggcagaggaggaggtcagttttcaaaaacaaacaaaaaaacaaaaaaatttaccaattcagtcccgccgtaaggaaatgggcacgaacgcgggttatttgtcggcgaacgatgaatgggactgagatggacaagggatcagcggaggagagagagcgaagcgattggaggagagggagacgagagagacgaaatgatcggcgcaggagagagatgagagagagagagagagaagagagagaaagagagagagagacaaagtgattggaggaaaagagagacggaaatgaatgtttaatttttgttattttaaatgttttgattgaagatttgatttttaaaataaatttattctttattttcgtacaaatggcatataattaacgaatttttgacttccccgtccatttgtccctccgttcgccctttttttcaccgcttttccgcgcccttttcgccgacacttttcgccaatttt

SEQ ID NO: 42843 - DNA, 980 bp, Heterodera glycines
ccaatggtatataacatatatgaattttccgacttacagttcgggtggttcccttgttagtataggagtaagggattttagtgtgaaaaactttgaagtattattttaaaaattttgtcattgttaagagcatgattaagcctaattctgccgaatctgtcccggtcaactgttccgtttgtagtcgaaagtgccctcattctgacgtcaaatgttgtgaaggtgtttttttataaaatattagaaaagaacaaaggttgaatctctaaaaataatgaaataattaaaataaaataatatttgtgtttttaattaaatgttaataattcagcttgtaaacatgttttccgtcgctcaatttcgtcgatgaaggaatattattgcaaaagtgccggagagtgcgacgtcgaaaaaggcagaaaatgtacataccgtatttcctaaaatacagaccccccccttcctgaaataaaatgaaaacgactgtcccttcatcttcttcctgctcatccttaaatatgttggtttgcagccgtaatgatgggtccgacgatgcatgcatatcgatcaacaaatagccatagggacgtgcggtcgctttccgataggcgtcaagaaagaagtcgagctgacgcggaaacagctgaacgcctatgtcgcggatggacagcagtgaatttggggcgcgcatcagtaccaagtattgggcggacgcggacaggcgggccacattgatcttgcgctcaaacaaattttgagtgacaaacacaacagcaaactggtgatggtgagcctttttagtgaacaaatcggacaagtatcgctcgtcgacggacagcatctcgagtatgagcaacaagggctttggaagacgtttgattaattcttcagatggcactcccgggtacacattgactcccgccttttgaagcacaggcaccgctgcattcattttcacaaaacagtagagcatggacaca

SEQ ID NO: 42844 - DNA, 1326 bp, Heterodera glycines
gtcagcacctgtttcaaaacaaatcggcaacactttaataaaataacaaaacaaaattaattacgacgataaatttaaaccgaaacaatttataattaaaagacgagaccacaacaattcaatgagaagaagtcagcatcaaaagaaattcaaaacaattccagagaagacaagacaaaaaaccaaaaaaagaaccgaacagtaaaaaaaactcactaatattttaaggtccataaaaaaagaaaacaaaacgccaataaatataattcaaacataaaagaagtcaaaaggtcaattaagtaccacatccccatcctctgaagaagacggtcccctcgtcttagaacaataaatatgaaaattgagaaattgagaacagaaaggtggggtcaaaggcatttatggcttaatggcgacggctacggctactgtacgctttcccatcactgcggctttgagtgttgcggctcgagcttggctggagagaatatggatggacccgatgaccccgagaaaaatgatgaggacgatgaattgacaattcggaaaattgagcgggtacagaagggagtgagcgagaagaacgacgaatgccaaggaaattgtcatcgggaaaaacagaaatttgagtgaatatccatgccctgaggcatttcagtccttcaggcagaatctttccgtacccgtgtcatgtcgaaagtgtctccgaatctccacatttcaatcaaactcctgccattctcggtcagcgcaatgaaccattctgcggcaatgtgctccaatccaggaatcaattcgttgtactgtgcgtgcttttcacgcacatacggaggcgggatccacacaaatcaaacatgttcaaattgtccgcaaattgatttgatgcgtttgtccaatgcgcggatcacgtctcccaatgtcccttgtacggtgccgatgaagtgagcaacaatttggttatttgtttaagcacacagtagtgcagcgccagagtcttctataatcactctcgtctgatggaccaatgttgttttgccaatagcagcggttgcgggacttttttcaatcatcatgtgccagcattagatcctatttcgcatgtaattgtatcgcgttaccacacatcagaaacagaaattgttacttgtaatcatatgtggtcgaatctcgtgtgtttcaatggcttgagagcagatggtcatgtgattgccccatatttgcaaatgaattcggcttatatgattaaggggcaaattcccgatcacacagcatcaccccgttattctacatattttaagagatggaaatcaggttcggaagtcaaaa

SEQ ID NO: 42845 - DNA, 1494 bp, Heterodera glycines
ggtcttccttggcttcttcgcccctcttcagactttcatggcgggtgccaaagttccggctcaataggctcttcccaatttttgagaaagtcttctcccgggcggaaaagcagaggaaaggcggcgcgttcttcggcaccgtactccgttgatttcttcggcacttcccggacttggcgaagctaaaacccgaacaattgaactatttgcatagcaaaaaaacaaaaaaacccacctcgattgttgatattctcgcgtacagaatcgggaacctccaaatcgggaaagacatgcaaccgctcgaaacaacgccgctgaacaactcgattccgagtcaaaaatttaaaacacatttttttctaaaatagtgttgaattttaattaaacaattcatttcctctcgaaaaattggagtgcttttattggccttctgtcgtatttaaaacatttccactttttccttaaattcggatttgtattttattaaggacattagctcaatgttcaacaattcggcgattttcacatcggaaaattttggagtttcctttttcataagataatattgcttcattatttccattttttcgacaattgtgaacctttttcgctctgtaatatatttaaattgaaaaatttattttaaatttaaaaataaaagtttaattgaatttaccttttaaattagtttgtttaattcctaatttcttggccatttttcaatcgtccaataactcacaccaaacatttgtttaatttttgcattaaatgccttccattccttctgcgaatgttttccattttgcataaatttaatttttacttttaaatatttttcaacaatttctcttttttcatcatcagttttttgatttttcaccatttttccatcttttatttctttcttccatgtataaatactgctgatatttgtgcccaaatgttttgctattattttttggcattttttcttttttccttccaattttccatttaatttcatttttaattttgcatatatttgatcaaattgctttaacattattcttttttcttcaactgaataatttttgttcgtcatcattccaagttcgctcttccatttgtaaattttcattttatttgcacctaatttttgtgcaatttttctttcaattttattccattcttttgttgaatgtttctttcccatttgcttaactttctccttaattttatgaaatttttccacagtttctcttttctttttatcaattgcttttgaaaaattatcacaactttgtccattatttgttggcattggcaattgaccgcccaattcatcacaatttgtggacatttcatcactctcttcttctttaacttccaaatgatcaaattgtcgaacattttgtccaaattggttattctgatcagcattttgtcaataaattatttgatcaattcgacaaatgttttcttctgctccatcgtcccatttttgaccaaatattt

SEQ ID NO: 42846 - DNA, 1016 bp, Heterodera glycines
  unsure (1)..(1016): unsure at all n locations
ggtaattgtctaattgccaagcaatagtttagaaacagcttctaaacatgtaaaaaaaatgcatttcaattatatcttcttttaccccatatatttgaaattttcaattattaaactacatattaaaccaaaaatatgtgctgcttctatcccattagtgtactttgggccgttcaaaatatcaacaaattacgttttgttttcgatttcttccaaatattctgccgctacacaaatatttttcttcataatacaataaaaacaaaaaacaaatattttatgcaaaatttatttttgattcaatttaatttaaaattagggtcatgaattgattttatatctttattggcaaaaaaataatattgaaaatgaattatgaaagtcatcatagccaagaatctccgctttgcctcttcagctatagtaccgtatttgctctaattatcccccaatctccattaatcctccaatctccaattatccaccagtctacgaggtggttgaaaaataatcccccatgggggataattagagcaaatacggatgccaattgtttctcattgggcatagtttttccaatcccattctaacaaaaattaaaataataattattatttcaaaaaacgaaaccaatgactatggttaatagaaaataattttataaaaatttcatttcttaagaaaaaagaaaaagtaaaatcattgaaaatataagataattaattattgaagattttgcgcaccctttaattaattagcaattaatatttctgcggaagtttcacattagaanatgtctttctcatttctaataagtccaatgtttttattcatcatgccnaatcacaccaccatcattatcatcaccataattactcattaccatcactaatatcattcatttcatttaaaaccaataaaaacacaaaaaaatgtctacaaaacttcattgatgcgtaggcgagaaaaatatacaaaatacaaaacattcgctgctcatgactgatgccgctgct

SEQ ID NO: 42847 - DNA, 1716 bp, Heterodera glycines
  unsure (1)..(1716): unsure at all n locations
tgttttttccgtttttattttaccaatttctaatttaaatttcctgggtgacacaaacataagctcaccctccccaaccattatcaatattttaatcggcggcgcggcgtaagtctgttagcattgtcaaccaaccattcatacaaatgacctccctccccccggtcggatttttcgcgacgttcggtatctcccacctcaaatttattatttttaatttgtttcgaactttcaatttttcattcacatttattaactctgcaatttaaattaaattttattttacaaattcaaaatttcccactatttttaatttccattttctaatgtatttaatttttattttccatttaattttaattggttttcaatccgttccaatttatttattatttttaatttatttccaatttaattactaatttattttattttccatttaatttcatttttaatttttttcattccgttccaatttatttattatttttaatttatttccaattttaattcctagtttattttatttttattttcaatttaatttcatttttaatttttttcattccattccaatttatttattatttttaatttatttccaatttaattactaatttatttttattttcaattaatttcatttttaattttttcattccattccaatttatttattatttttaatttatttccaattttaattcctagtttattttatttttattttccatttaatttcatttttaattttttcattccattccaatttatttattattattaatttattttaatttccattttctatatttatttatttctacaattcaattaaaatttaatttccaatttaaatttaaaaattttttaaaatttctccttatttacaatttctaatttccattttctctatttatttatttccacaattacattaaaattaatttctttaaaaatttttaaaaattaatcgaccatttttaatttattacgcaacaataatacaatacagctcacgaattgtttattttaatcatgttatcataaattttcttatatttccttttgaatgccccacaacccttcacccatcgaggtaggggaagtggggcattgtccgtcgccatttggccactgtcgcgtaacattttcttcaacttttcaacctccagtcccacatctgccgattccaaattcccttttttgcacacatcctcccgaccttcagtcccgtcctccaccatctcccccggggcagagcccatctcttttttcgcttcctctgttgtttccgccccatcagtttcttccccgacctctgcttttccttcattcgtgccctcagtcccggcatttatcgggagctgttgctgcaattcttcctccgctcccttcttttcgtcctctttcttttcctccttttgctccttttctcccgcggccgtagccattcccgagacttttctcttccgctgtcccgtctttttcatcttttcctctttcttccgctctctgtactctttgccttctcgatatcgctgccaataatcatttatggcctcttcacagttctgaatggggggtgggggatgaagaaaaggatttagaaatcagataccaatccccgacaggtatccaatcgatgnggtccttgggaaacccacccactttaccagntagtggtggtgggcgatgacgcgcttttggccacat

SEQ ID NO: 42848 - DNA, 939 bp, Heterodera glycines
gggtgggggagctcaattgtcgggggtcggggaccccgatcgggtagtgatcaacaaattttttaacgaaaaatccaatttttctttttaaattctcgtaaattttctttttttttcactttattaatcaaattcaaaggttaactagcgccagcaagagtgcgtccaagttggcctttaccataaatagaaagaatcaaccgaaatttttgctattttgcgaaggggtctgaacgtcgaataggacgacctttttttgctttttcaaaaactgttttttttgcggcgtgctttttccaaaaaacttttggaggaacaaatgggtccggcggtgccgctaggcgccatcgggaaaaattttgaaaatttgattgacatttgttaacagattttgtccaaaaaggaccaatttttgcgattttggaataatttattaagaaaaattaatactttttggtggcaggaggtgccgataggtgccgccgaaaagtttttcggaatttttaatgaatttattaagaaaatttgttcaaaatctcaaatattttcaatattttccccttcgtggatgaattaacctttaaatttttacaacgctcggagtccccaatcccccgaattagtgtcggggggtcggggggcaaaaagtcgggggtcgggtaccgccggggggcacatgtcgggggtcgggtcggggggctcggggtcggggctgaaacctacgtttttccatggaaaatcatttcatatattaatggcaagtaaatacttgaaaaatagggcaacatgcttaacaattcaagcgtgcttgaatttaattatgtacttgaaaattgcccattctgccgaaaggtcaaaaaattcgacaattttaattaaaaagtaaaaacaattttttttcttttttgtatatgatgagaattttcttgggattttaag

SEQ ID NO: 42849 - DNA, 1330 bp, Heterodera glycines
tacatcccattatggagcgctaaaattatcagagtgccgaaaatcgcacgtgatctaagcctagcaaaaaatggtgtaagtaaaaatcgtaattacgctcaaaaagcttctcaaacaattttagcgcttccaattccttctacaatcgcctttatacatcccattatgagcgctaaaattatcagagtgccgaaaatcgcatcgtgatctaagcctagcaaaaaatggtgtaagtaaaaatcgtaattacgctaaaaaagcttctcaaacaattttagcgcttccaattccttctacaattgcctttatacatcccattatgagcgctaaaattatcagagtgccgaaaatcgcatgtgatctaagcctagaaaaaatggtctaagtaaaaatcgtaattacgctaaaaaagcttctcaaacaattttagcattattttttcagaaagtgctctgaaacgcaccaaattttatttacaagctattttaggcactctgatgctttttctatcaaaaagggagatgaataaatttttaaaaatttttaattcctttttaaacaggccaaaaagtttaggcttaactttttttttcagaaactgatcagaagcgcaccaaactttgcagggaaactccccggtaaaggactaacttacactgaaatgagcgccgagctagctgggtttaaaaattttttcgaaaatcagagtctttcgtttttatttaattatttattattttttgcaaaattaattcataattattttttcagaaagtgctctgaaacgcaccaaattttatttacaagctattttaggcactctgatgctttttctatcaaaaagggagatgaataaattttaaaaaatttttaattcctctttaaacaggccaaaaagtttaggcttaactttttagtgaaaattaatttactcatttttcgagtagtgctcagaagcgcaccaggttttgcaggagcctaaaaaggtcaaggaaaggcgtctctgcgttgatttagcagtagtacctatgaatttaaatttcctatgaatttttaaaggttcacaatttatttattttttgcaaaattaattcataattattttttcagaaagtgctcttaaacgcaccaaattctatttacatgttaaataaggctctctgatgctttttctatcaaaaaggaagatgaataaaattttttaaaatttttaattcctctttaaacaggccaaaaagtttaggcttaactttttagtgaaaattaatttactcatttttcgagtagtgctcagaagcgcacccaggttttgcagggtaacagctgagaa

SEQ ID NO: 42850 - DNA, 550 bp, Heterodera glycines
attgcgcaccgccctctctatcatgctctagagcatttgtatgtgtgtaaaatttatcaaaaaaaaagatagccattttctgggataacctctaaatataaaaatcctatgtgagaattaaatcggcgattgtagcacacgtcctcctgtctcatactgcaagatgcttttgtgaggtataaaatttctcaaataaaagacatagacatttttctgggatagagatataaagttaaaaattccctcaaaaataaaaggtctattgcgcaccgccctccctatcatggtcgagagaatttgtctgtggataaaatttatctgaaaaagagatagccatttttctgagataacctctaaatataaaaatcctactgtgaaataaaatggggtattgtgcacaggcctcacactcatacgcaaacgctctttgagaggaataaaatctctcacaaacaagagatagacatttttctgggatagaggatacatatgaaaatcccctcaaaaaaatgggtcaattgtgcaccgtcctccctatgatgctcaagag

SEQ ID NO: 42851 - DNA, 953 bp, Heterodera glycines
ctttaaaagctaatcaggcatttaatattttatataaatggtataccaaatgtagtgagcttcggctaaacccctgcgggcgttgtccacctctctctctctctctcttcctttgtctgtctctctttcctctctttttctttgtctctcttccctccctctctctttctcgccctctttctctgtccttttcatccgtttcccttcctcctcatcatttgtcatcaaaaaacgtgtgttcttcgcctttcagccatttactatgtttgtagctattctcaccctccctttgttctctgaaattctatcggtattgcattttattttgcatcaattatggtacagatgtctgtctgcctgtctaccatctaaattttaaatcatttgtaaatttagctttttttgtttataaagaaataaaatatttttgtgttttttttgtttctactaaggatacacttaatggaaaattactatttttgtgaagaccacatttcgcaagaattgacctcaagaatcggggatgaatcttccttttgtcctacttggtcacattaacgaaagcttaagctctggaatttataaatacaagaaagagcaaatttcgaaactttttgttcgaaatcggacccgggtccagaattggtcgaaatggatgcctaattcatgatcagcgatcccgaatgttgcaatcattttgactaaatttaggttgttttgatcagtttatgaacaaaagagcgaattttggatttgctttttgttcgcaggtccgggattcgaaattagtcgaaatgaatattagatttgtgtcccctagggctggtcgggaccggggcgggaaatcccgaaaaacagaaatcccggtcccggttttgccagtcccggtcccggcgggactaaacaagcactggtaagaatggggtctgggtgagaaaatagaggggaattag

SEQ ID NO: 42852 - DNA, 922 bp, Heterodera glycines
  unsure (1)..(922): unsure at all n locations
tcatcagaccaaccgcgccgagtctcaacttgccgggatcaaactcgtcatggggttgaagtttccgggcgaagattatcacaaaaacgtattgcaaatgttggccaaggatgtagatggattggaaaaatgggttgatcataaaaaccaagaggcggaacactttgtcatttatgtggaacacgctgcggaacacgctgccaagaagcagattgacgcgctcacgtcacatgccaaggtcagcgggagaagtggctaatcaaagattggtgtcaatgcacgacaaattctgaaatatgaataataatcatctgaaagtaatgtctttttggaaaccgaaaagttggattatttggtctgaaactccagacaccttacttggtctactattgccacttttccccaaaaaatgtatttagctcctcctaggaaatcgccgccggattccccagtttccacataaaaatatcggatttgacatttaattttttttgttttttttcaaagagtcgtgctcaagttgtggagctgtgagaattgggggtggtttaatgaagtcaatatggcagggcatcaggcgaatgatgttcgagaatttcgaaattcgaatgacctttgatctgagaaacatgaggatatagtataaccgggggctattattgggctttccacaatgaaattcttgccggattccacgttgcagcataaaaaacttaagaatatttatttatatttttcatttttgtcagactaatcttgatatggtggcatcgtttctttcgaattgngagcagttccatgtgagcgccaacgcggcagggcatcgggcaaacgatgttgagacgagcgaggcgattgtcccgtcgtctgacgcacagattgagcgactccgtcagcttgagatgcgtttcacactttcatc

SEQ ID NO: 42853 - DNA, 986 bp, Heterodera glycines
gtcgtatgtctcagttttgttgccaaactgctgtttaaaattttgtcgttttatggctgagacgggattttgtcgggacgggattttgtcgtttttagctgaggcgggattttgtcgtttttggctgaggcgggattttgtcggggcgggattttgtccgcgcgccaaattttgcattttttattttcaaatcccaaaataagcacgtaatgctgaaataagcacaaatcttagaaataagcacattttaggtttctaagatccggcccctcaaaataagcacaaatcttagaaataagcacacttgggagccctgaaaataaaagttgtcattgtttaaaagtttttctttcacaaattaggaacttgcataaatcaaaaactaaatcggtcattgaaatcaagacttatgaattgttcataaactcaaatttatttttaaaaaattcttgaatttttgcttgggacggagttggccttttttgtattgggacggagttggtgacggagttggcgggacggagttggctcgggacggagttggcctgggacggagttggcgggacggagttggctgggacggagttggcgggacggagttgacccctaccgcatctaaactattaccaaaaataatttttattcactgattgctagggttgtaaattatatggactaaaaaacgcgaaatatggacattaaatatggactaaaaaagcccgaaatatggactaaaaaggccaaaaatggccaaatatggaccaaaatatggataaaaaatgccaaaatatatgttgtaaacccccaaaaatcccaaaaaaggtgtgcatatttaatatttgcttaaataaacctaaaaagtacaataaacaaccaaaaaatggggtttaaaacttaaaaatgcatattttttattgttgttcgttgtatcaaaaacacctccaagattgccaaatttcgaaaaaattctcattaaaaaaaaagaa

SEQ ID NO: 42854 - DNA, 1306 bp, Heterodera glycines
  unsure (1)..(1306): unsure at all n locations
aaatttttattntttttcataancaagaatttttgattaataaattattttcaatacttaatttcctaattttttttatttttttgaatgttttgtcattttacactcctaaaaatgaggttttaatgcctattttctatttttttagagcctagcgcctacctatttttgcagtttttagaaccttaaaatcttatccctagttataatttagaagagcatttatctgtctctttatgaaagcatttctatttgcgaaactttgttcgtctgcatcaaagtaattttaacaagaattattttagattagctgattttaaattaattgtaattggataaattttaatataattgagaacataaaaatgaggtagatacattaagacaaacgttgctctgaacaaaattaatttgggggaaataaataattataaagcccatataaaaataaaatttcaaaatttatacactacattttccgtaacccactgacttacgaattggcgaaattgcgatcaggaatattactgatcaggtctctgaattaaaaaaataaataaaacattatcattaattatcaacatttttacccacgcaaatattggcaaaaggtagcttgcctaatatgaaataatttaaaattaaataaaaaatttagataaaataaattaacttacccagaccagtaatggtagaaagaaactcgaatgggcggggctcgttcctttagaatttgttttttcatagaaatttaataaaaagaattgttttaccatctaggtttctttgctgcaatttcatgcagttttatgtttgttgtacgtttcttttttatatttacggaaaataattggtttaataaggttaattaattttaaggacaaattaaaggaaaaaacattataaatattaaataattttttttttttcaaggtttctgattaaaaaatatggcataaataactttgggtttcatgagaaatcgtataaaaggtaattgacaggaaatttggacaatgaaatcattcgacgaataaattggacaaatatacactatcagccgtcggactcgctcagttgggcgcgcacggttgggcgctcacgtttgggcgcgcacggttgggcgccagcacgtttttccactatagcttttttatttcttatccaaatccaacaatcttgatatcattcgaaagctcttaacatactctattagccatacaaaaatcaaatagatttttaagcctagaaaaaattttattaagaaaaaatttcaaaatttcgactttttcgcaattttcatgta

SEQ ID NO: 42855 - DNA, 889 bp, Heterodera glycines
tgtgagtgtttggtagagccaagactagagaaggcaaaatgttggtaccaagtttgcggtcaaatccccaggagaaaaaagagatagccattttttgggcaagaatttttttcgttagcatttcaaatatcgtgtgagtgtttggtagagccagactagagaaggaaaatgttggtaccaagtttgcggtcaaatccccaggagaaaaaagagatagccattttttcggcaagaatttttttcgttagcatttcaaatatcgtgtgagtgtttggtagagccagactagagaaggcaaatgttggtaccaagtttgcggtcaaatccccaggagaaaaaagagatagccattttttgggcaagaatttttttcgttagcatttcaaatatcgtgtgagtgtttggtagagccagactagagaaggaaaatgttggtaccaagtttgcggtcaaatccccaagagaaaaaagagatagccattttttcggcaagaatttttttcgttagcatttcaaatatcgtgtgagtgtttggtagagccagactagagaaggcaaatgttggtaccaagtttgcggtcaaatccccaagagaaaaaagagatagccattttttgggcaagaatttttttcgttagcatttcaaatatcgtgtgagtgtttggtagagccagactagagaaggcaaatgttggtaccaagtttgcggtcaaatccccaagagaaaaaagagatagccattttttcggcaagaatttttttcgttagcatttcaaatatcgtgtgagtgtttggtagagccagactagagaaggcaaatgttggtaccaagtttgcggtcaaatccccaggagaaaaaagagatagccattttttgggcaagaatttt

SEQ ID NO: 42856 - DNA, 640 bp, Heterodera glycines
accgggaaccgggaaaaacaagcactggtaagaatgggggtctgagtgaaaaattagagatgaaaattggagtaaaaagaaaaaatttagaaataataattaaatatattcgataaagtaacaatccaactgtgcaaatgacctaatggcttgtctccttgcctagtaatcccaaaaaccagcctttttttgttgaaaatctgttaacaaattacactcaaattttcaaaattttccccggcggcgcctatcggcggacgggcacgactgggccccgccgactgggccccgccgactgggccccaaccaactgggccccggattaactgggccccaccaactgggccccaagagacagtaatttttccaccattattgtataatattatttatatatttttcattacatacacataggtatgtgtgtttcgtttacaataatctaatttgtgtttatatttttttcgttcagtgcctaactacaataactttccttcagctattttttaaatttaactatcatttcatggcaaataatatattatcgcagaataaccacaaaaaaaattgagcatgaagggcatctttatgttttcgctaacttagtgcggatggttttatcaaattttggaggtgtgag

SEQ ID NO: 42857 - DNA, 1178 bp, Heterodera glycines
gatccacgtaagaggccccgagcggcggttcaaatccggccttccaccccaatttttcgcctaaataatagttagtaattattaattgtgcttgttgtgacgtcgaacaccacatattattcgccatgctaattagggagcgcagcatactgtaaaaataatggggaaacctggcgagaatacggtagcgtctctgtatgacgcagtaagcaaaggttgtttggggagaagaagcccagaaaaatgccgcgcagctttggcaattattttatttgtgtaccatattcattttgaattttgtgtgtttcatgcgaaagcaattggctgtttttgtcgagaaacctgttgcataaaaatgtgccataatgagaagggtggaggcggggattggggaacataaaaaaagaaaaaattaacaaattatacaacgaacgacgtacgaaaagtgaaatggaattttaaaattggcaaaatgttagctgaccccaaaaatgccagccccagccccgggcatcgacagaattctcgcgatttaacttggacctttaaagtgccaaatattgtgcatcaattcaaaggtgtattacaggatatgactctggtttgaccggagtctcggtttatttaaagtacaaatttaaaaatttttaaatttcaaattcattcatgtaaatttcttagaccgaaacgattagtgtatttgatcaccgatgaatcgttggcatgatcggaagtgatagatggattaattttgtcagaaagtaaaaaatgcagtgatagaaaaaggaaaaattagtgattggtcaattcaacaccatcaatcagttgtgatccgcggtcatcgtcagaaacagcgtcaaactgatcagaatccgattgctgcgatgtgtccggttgatcagccgccaaaaagtgctcatagtcaggaacagaattataaccaccattggacaatgcgacataaatttgtttggcacaaattctgaaatcgcctcgtaaatgccaacacagtggtaaaaggtgttgaagtaggtatgcaaaactaaattcaattaaagattaaattcttaaaaatttacggcgacgtttagtccgggcgatgtttcggcagcgacgtttttgagtgaatcgacggggacgacgaccccaagggggtggcacgtacgacgtacctcccg

SEQ ID NO: 42858 - DNA, 920 bp, Heterodera glycines
cgtcaacccaatgagaaatgactaacagaaaagaggcagtaaagggcattggcttaggaaaacagcttataataaaggagagacgagcagacgatgagtgagagaaaaatagtgtaaaaatggtcaactgctgcattggcagagtcagagaggggtcacaaagagctcgcacagcatcgaatatttccttcattttgggcgtcattcttccccactgcacttctttcttcggtttaattacccaagtttgaggtacttggcgtgtcctgcacataatatctgtggcatggaataaattttggaactgcgctgcctaacggcgttgcttaaagtgcgctaaaaatgatcaaatgattatcaatttttatttttcttaattccaaaatgaattcgaaacgcaaaaatttaatcataattcatgtggtaaaaaatgcatttaaaaataaaaaaattcttgaatttgcttctgaattttttaattttaaatagaaaattactttttcgaaaattttgcacaaataagaggcgaagaaattcaacgaaatttttattaggattttgatttaaaatgttgagaggtttaacaaatttgtacactgaatgttggatcgtcaacaccaatgagaaatgactaacagaaaagagggagaaaagggcgttggcttaggaaaatagcttataataaaggagagacgagcagacgatgagtgagagaaaaatagtggtaaaaatggtcaactgctgcattggcagagtcagagaggggtcacaaagagttcgcacagcatcgaatatttccttcattttgggcgtcattcttccccactgcacttctttcttcggtttaattacccaagtttgaggtacttggcgtgtcctgcccatatctgtggcatggaataaattttggaactgcgctg

SEQ ID NO: 42859 - DNA, 1163 bp, Heterodera glycines
aagaatggatctgacacttgaacaagaccgcgagtggtatatctcattcattcgtgacaatgtaccggagcacctcaccgaagcagatctgtcgcatgaagttcatttgggggcgtttaatctagcgatgcaaatgtgtcatgcattgtctacaacagatttgaatcccgctccaaaggacatcagctttactagaccattcacaccggcaagtactcagagataaacgcctctatcggattcggtctgaggattttttaagcattttcagccataattgccattttgtaccgtttaattgggtacttatacacctacgccacattaattctgatagttatgtcgttttctggggtattggggtggccgatcaagactatgacagtgaggttcatctatttagaaccacggatccgatttcgaacagaagttgaaaattacttattcacatgtatagttcataacagattcaagtgcactcaatgcccgtgagtctctattcacagctaaacgcctgattgggtgaatcggtcatgtccaaaaattgtgcttaggtcgaaaagttgatttaccccctctcatgttcgatttcgggattcggaaagtttaaaattggcagctgttgggggtgagttatattacaatgtgagagtttttgtatacggttcatttccatactaaaaacttggcccgctgcctgcagccgatgcgcgtacacccctgggtgaattctgtcgggaacgttcgttggatgtaagattgaattatgtttccaatttcggttttattttatatccgggaaaattttttgtaatttcgttctgatttgttaacagattttcaccaaaaaattaccaaattttgccataaattttatatttttttttgtaaaatagtgacattaggccataaatgggaaaaagccattaatttttgtttgaaaattgttgtgctttttgtattcaaaagattttttgactgataaaacatgggaaaatcatataataaaaagatttatttttttgcgtaaaaatttcggaattccgcgacacataagcgggaggagaaccgatctggggtttccggcatttttggagtcggcacaccaacaagtttgctcgtttttgaagcccagaaattccaatttccgaattttttttcgc

SEQ ID NO: 42860 - DNA, 958 bp, Heterodera glycines
  unsure (1)..(958): unsure at all n locations
ctcaaccgtatatagtaatggcgttttcnggggaaaaccttatgttgaaggctgtaggcaaaagagatagccatttttctgagaatatctattcttagttatggagccattttccaaccgaccatttgtagggctcaaccgtatatagtaatgcgttttcggggaaaacctcatgttgaaggctgtaggcaaaagagatagccatttttctgagaatatctattcttagttatggagccattttccaaccgaccatttgtagggctcaaccgtatatagtaatgcgttttcggggaaaacctcatgttgaaggctgtaggcaaaagagatagccatttttctgagaatatctattcttagttatggagccattttccaaccgaccatttgtagggctcaaccgtatatagtaatgcgttttcggggaaaacctcatgttgaaggctgtaggcaaaagagatagccatttttctgagaatatctattcttagttatggagccattttccaaccgaccatttgtagggctcaaccgtatatagtaatgcgttttcggggaaaacctcatgttgaaggtgtaggaaaaagagatagccatttttctgagaatatctattcttagttatggagccattttccaaccgaccatttgtagggctcaaccgtatatagtaatgcgttttcggggaaaacctcatgttgaaggctgtaggaaaaagagatagccatttttctgagaatatctattcttagttatggagccattttccaaccgaccatttgtagggctcaaccgtatatagtaatgcgttttcggggaaaacctcatgctgaaggctgtaggaaaaagagatagccatttttctgagaacatctattcttagttatggagccattttccaccgaccatttgtagggctcaaccgtatatagtaatgcgttttcggggaaaacctcat

SEQ ID NO: 42861 - DNA, 702 bp, Heterodera glycines
ttggcgctatttgcaaagagtaaccttttgaaattttttttcactttttttggtcaatttttttttgtttatttttacacataataatgaatattaaacattaacaagacaattatggcgaatgaaattataattatggcgaacaagatcacagaaagcataaataatagattttcctttacccaaaaacccatcctttttgttattgttttttgccaatgtcattttgttaaaactagagtagagcgggaccgggaccgggccgggaattcccggtcatccgaggtcccggttcccggattttgaaaagctcaggtcccggtcccggtagggcaaccgggaaaaacaagcactggtaagaatgggggtctgagtgaaaaattagagatgaaaattggagttaaagggaaaaaattaagaaatagtcataaatatattctttcaaagaaacaataccattactgcaaatagcctagtggctagtctccttgacttttcccttcttctttcccctggttcaatccctctacagaaattaaaatattttgaattttctttttgtatactcatggcgctttcctatcgacaaaatatgattcctcatagttttttttaattgtattttatcattttttaaagaaaatccgtaaaaattgagcctagtaatcccaaaaaccagccttttttgttgaaaatctgtta

SEQ ID NO: 42862 - DNA, 1333 bp, Heterodera glycines
  unsure (1)..(1333): unsure at all n locations
attgggtcactcncacaaattgttcaaattacactgttnaaggtgagcaattntatgctttttcaaaaattgtgctgcgaatgatttattatttgtctttctccaattgattttttaaaagattttcgacctgttcaaatgctacgagtgtnggaaggccacacatttggagcgaattatgtcccgtcgaatggacagagaaacgcgttctcgtcgagttcgtttggataatcacagcactcaaaggacaacgacatcaaaaacagtggaagttggggcagaaggctcaacgaccaaccaaagcagaataaaagctgagggcggcgagcacagtgacgatgaggtgaaaaaacaacaaacgaataattacgaaagagaaattttgttttttattaaataaaaagccaaactcggtgcatattctttaggaaagtacgcttccatgggctgggttaaccaagcaattaatttatgccttttcagactgtcgccgatgacccgggcgtggacgattatcgcactttgtgcactgtgcgcatttccttcttcaagggctttggtctcagctacccaaaacggacaattcaggtactgtttatgaattaggagctgttcgctttagccatcccactgttccccatttgttttacgcttccattaattcccaggaaacgccttgttgggttgagctgcacctgaaaagggctcttcaattgctggacgaggtgatgaacactcctctgatcgaccatttgacttagcctttcccctcatttttaacatctcaactcaaatttccctttcatacggaaaactcatcaagtaatttgtgcggaaacacactaacgaagagcagacacttcgaaactaacaattaaggcctattaacacaaattccctcccgccatttcgagtacaatttaagctgggaatgtgatgatcacttccacctgacctaacattttcaaattgtttctcttattttttttgtcatcacatttccctagttgcccatctctttcattctcatcaactgtccacctcattaatttatttattgtttcaaaaatttttaatttgacattgaatcgatgtggtaacattttttgcgcacataaatttacacacaacaaaagattgacaaagcaaacggaagtaattaatcattggggtttttaggtgcaaaaattttttgggagcaagaaattgcgacgcaaaacaattacccactaaatagtaaattcaaaaaacaaattccgagcaccatcttatttatcctttttggactcctctagaacatcttcatctcttacattcgatgcttcttgttcgg

SEQ ID NO: 42863 - DNA, 1102 bp, Heterodera glycines
  unsure (1)..(1102): unsure at all n locations
gaatctagttaaatttaggtattttaagcataaatttttttataaacccatgaagtacaataatcatgtatgtgcaattggaaattttagagtttttcattaatccgattactttttttgtcgcttcaaattcatagaaaacattttacccctaaatttttgaacttcatgaattcttcaatatgggttctcatttattagacaaaattttaaaaaatcaaaagtttattcttgctgtgttctgctgcccaaaaggcataagatttttttacaatctatgacttacaataatttataagtgtaattctaagttttagaatttttcatttatccgtagacttcaaaaatttaaattaaaaatttgtttttttgctgttgttatgctgctactcacctgttgatgtacaacactggcacatccagtgctgcagttaagcttaaaaacactagtaacatgctgttgatttgccaccgggtcaacgggtgcatcaacggcgcattcatgtacacaaatgcgtaggtcagttggccaaatgtccaaccgcaaaattgcaggcaaagaatgatacacagcgagcggaagatggactgacgagcatgaacagctgagaataaattcgaattgaaaaatatttttaaattttaaatgacatacatgaaatttattgtttattgtttattcataaaaaataaaaaataaaaaagtcatcagaagaacgaaaaccacttactctgacgactattccggtaaatgtgtcgtagagtaagtgacaaaatatatggatgatcacaggaattaaaaaaaagacaaaaatatgtgaaaataaataataaataaattgaggtcaaagtcaaatgaggtcgaaataccaaatcacttagaaatttgttacattctagctttcccggtcttacatattaccctagtgaactttaagttttattttaaattgatttaaagaatttgtttttattagttctttatctagttgattccacaattttgttaccctcccagcanagggaatgaattttttgcccagtttgtattttgtgttaaatctataaaaggggatgttnaaagcgtgctgatggattaaaa

SEQ ID NO: 42864 - DNA, 1040 bp, Heterodera glycines
  unsure (1)..(1040): unsure at all n locations
aaaaagtgattttcttcatgtgatagnnatacnacagaaaaacagtagacacnnagcagaataaatcaaataaaacaaatgattgaaaattaaattttctntaatcanataaataaatatcatctgaaaaatgaagaaaagatgagaaatatttccaattttactattttacaacagtcaaaatagtttcatatttttaaattggaatttcaaactacagcagcaccaaatacaattagtgagtgattaattatagtttgaaaaacaaagaggggaaaggcggaaaagataaaagagagagagagagagcagcaattgactttgttgtggtggatttaatttgaaattagtgggacgaaattcccgttaatgacaaaccgagagcacaaattgaattctcgaaactctcgaacagtccaatagaataagtgagttcaaaaaagtgattttcttcatgttgataagataacacagaaaaacagtagaacaacagcagaataaatcaaataaaacaaatgatttgaaaattaattttctttaatcaaataaataaatatcatctgaaaaatgaagaaaagatgagaaatatttccaattttactattttacaacagtcaaaatagtttcatatttttaaattggaatttcaaactacagcagcaccaaatacaattagtgagtgattaattatagtttgaaaaacaaagaggggaaaggcggaaaagataaaagagagagagagagagcagcaattgactttgttgtggtggatttaatttgaaattagtgggacgaaattcccgttaatgacaaaccgagagcacaaattgagttctcgaaactctcgaacagtccaatagaataagtgagttcaaaaaagtgattttcttcatgttgataagataacacagaataacagtagaacaaccgcagaataaatcaaataaaacaaatgatttgaaaattaattttctttaatcaaataaataaatatcatctgaaaaatgaagaaaagatgagaaatatttccaattttacta

SEQ ID NO: 42865 - DNA, 1102 bp, Heterodera glycines
tgctttttcttgtgccgtttttagcatttcctttaccttttggtcaattgtgctttgatcagttggctttccccatcatttttcgcgtttcctcccccataatttgctgctttaaatatttgttcaaaattttgcatagaaatgaccgaatttttgaatttgaaggcattttctattttgtactgattgtacctgctgaatttggcatcaaaatagaatttggctattcggtttagctgtttgacgaaatcaattagtgtcccgaaattttcaatatttcggataagcagcggcattaatccctgtggttgttcgtcatctgaaaaaaagcaaaatttctcggcccttccctaagaaaagcacaaccttcagtgtacacacagaataaatagccgtacaaaatgtccaaatattttcggtatttttggcattccgtctgcgtatgctttccaaatgctttcccaatttggcacagtgccaatgctctctcatcaactgaactgtgccaagatgggctccgtatctttgtgccaaatgctcctttctctgatcaaaagtgacactttttggcaatcccttgtcaaacaaatagttgtccttttcctgtatgcaaaaatgctcaaaattggattgtcccttaacaaatgcgaggaatgccttgtcatcaatctaaattattttatttattttttttttggttttcatttgattgagaaaagcatcgggatttctaattagccttggcgcaattaatctttttgatcagcaccaaagcttagaacataatttttttttaaagtatttgtttttgtgggtaccgagtagggctgtgcgagaagtgatttttaccgggaaccgagaaacgagaccaagaaatgaccccgagaaacgatacgagaaacgagacctaaaaaacccgagaaatttctcgactcgagaaatttaatgaaatttattcaaacctattttttaaaattaaaaacacattaaaaagagggtaggtcaaacggaatttttgcgtaggagtctcaacattaaagtgacggcatttttttttgcttttaaaaacgctttttttgcgcactttttccaaaaatttttt

SEQ ID NO: 42866 - DNA, 907 bp, Heterodera glycines
  unsure (1)..(907): unsure at all n locations
aaacgctctaaaaattggctaattgttgaaaaagtgaccggatcagtgattggtcggctttcatcagtttgttccccctgctgaaggtgttcaatgacttggaaaaatggctgtgcgagttgactggctacgacgccttctcacttcagccgaataggcaaaaaataaaagcaaagaattgaaatggcaaaactgtttaattcagtggggccaacggcgaatacgccggacttttggccattcgtaaatatttcgaagcgaaaggggaaacgcagcgaaaagtgagtagggaaacaactcactcacttggagatttggcctcattagagaggaaatttacgattaaatactcactaatctgtgcattgattccccccccccccccgaaagatttgtttgattcccatctccgcccatggcacaaatcccgccactgcgcacatgtccaatttccgagtggtcccagtggagtcggacaaacacgggaacatcaattacaaggacctctcagcaaaggcacgtgggagaagggcagtggggggaaaggcattgaagcatttcagtgtgaaaagcacggggcggagttggcatgtgcgatgatcacttatccggtaggattttagttggccattgccaaattggcctccatttctagtcaactcatggagtgttcgagtccaacattttggatgtgtgccacaaagtgcatgagtttggtaatggcgctctgtttgcccattcaatattatttagcgttattttcccaggaggtcaaatttacttggacggtgccaatttcaatgcccaagtcggcctttgtcggcctggcgattacggaagcgatgtgtcgcacttcaacctccacaangtgacagaaaagtcatcaaagcataaactttaccctaac

SEQ ID NO: 42867 - DNA, 1195 bp, Heterodera glycines
ttcagcgggtttaaaaatctagaaaaattagtaagcatttgtagtgctccgatacgtatctctgcaaaatttggtgagccgctgatcaattacaaattatttatggacgatcaaattttttgaaatttttttaagtgcaaaagtggatgggtgtctgcaaaaaattttcaccggagtttaaaaaatctaggaaaataagtaagcttttgtagtgttccgatacgtatctctgcaaaatttcggtgagcccctgatcaattacaaattatttatggacgatcaaatttttttaaattttttatagatttttaaatgtttgcattttttttggcttaccaaaacttcatcgaacctggttctttctattctctttcaaatcgccccaaattttttttacagccacgaggccgcgaagcggccgagtgagtaccttgggcgcaggaaaattattaaggaggagggttcattatttatttatttttgcaaaattaattcataaatttttttcagaaactgctctgaaacgcaccaaaatttatttacaagttgaataaggcactctgactcttatattatcaaaaagggagatgaataaatattttaaaaatttctaattcctttttaaacaggccgaaaaagtttaggcttaactttttcagcgggtttaaaaaatctagaaaaattagtaagcatttgtagtgctccgatacgtatctctgcaaaatttggtgagccgctgatcaattacaaattatttatggacgatcaaattttttgaaatttttttaagtgcaaaagtggtgggtgtctgcaaaaaattttcaccgggtttaaaaaatctaggaaaataagtaagcttttgtagggttccgatacgtatctctgcaaaatttggtgagcccctgatcaattacaaattatttatggacgatcaaattttttgaaatttttttaagtgcaaaagtggtgggtgtctgcaaaaaattttcaccgggtttaataaatctaggaaaataagtaagcatttgtagtgttccgatacgtatctctgcaaaatttagtcagcccctgatcaattacaaattatttatggacgatcaaattttttgaaatttttttaagtgcaaaagtggtgggtgtctgcaaaaaattttcaccagggtttaataaatctaggaaaattagtaagcatttg

SEQ ID NO: 42868 - DNA, 865 bp, Heterodera glycines
  unsure (1)..(865): unsure at all n locations
atcttcgtcgcactcactcattgtgttttattttttacgcatggtaaactgatcgtccgaccagcctacccgtccaccactcactcgtcgccccacctccaccaccagcagcagacacagcagcagccattgtcgtcgtcacattcctccgcaacagcagcaccagcaacttcggcgacgacggcgaagacaacgacgacgacttttgtgcccccttaaaaaatttttatttaaaatgatttgtcgctccatttttttcctttttggattttgtaaattctgatgattattgttttttcgatcagttacctacatatgtttatgctgcgcctcaattttgtgtggaacttttgcaatctttgattcccgcacccaattgttttttgccttgaaccaatttctaccattcttttgtgaatggtccaatttaattaatttattttaattgattgattgctttgtccatccattctctctttctctctcgggcaaaagggtcattagcaattagagttcacagagttcgttctcacattcccatcgattcatcttctccctccccccttcatccgccgttgttctcatcctcctaattgatcngcctccgtcatccctctccccccccacccccgtccaatcattcattcattatctcatcactattcacccccctccccaacatccagttctacatacatacatactgccctcaactgacactgccccccgccttccccgtccgttccccgcgtcctctcatcgccccatctttcttcttcaccgatcacaaccatcatggacatgcattctctcactcatcatccccccaccccgcccccctaaaattctttcatcaaatctccaa

SEQ ID NO: 42869 - DNA, 988 bp, Heterodera glycines
  unsure (1)..(988): unsure at all n locations
tctcagaaaaatggctatctctttttcctacaccttcaacatgaggttttccccgaaaacgcattactatatacggttgagccctacaaatggtcggttggaaaatggctccataactaagaatagatattctcagaaaaatggctatctctttttcctacagccttcaacatgaggttttccccgaaaacgcattactatatacggttgagccctacaaatggtcggttggaaaatggctccataactaagaatagatattctcagaaaaatggctatctcttttgcctacagccttcaacatgaggttttccccgaaaacgcattactatatacggttgagccctacaaatggtcggttggaaaatggctccataactaagaatagatattctcagaaaaatggctatctcttttttctacagccttcaacatgaggttttccccgaaaacgcattactatatacggttgagccctacaaatggtcggttggaaaatggctccataactaagaatagatattctcagaaaaatggctatctctttttcctacagccttcaacatgaggttttccccgaaaacgcattactatatacggttgagccctacaaatggtcggttggaaaatggctccataactaagaatagatattctcagaaaaatggctatctctttttcctacaccttcaacatgaggttttccccgaaaacgcattactatatacggttgagccctacaaatggtcggttggaaaatggctccataactaagaatagatattctcagaaaaatggctatctcttttgcctacagccttcaacatgaaggtttccccgaaaacgcattactatatacggttgagccctaccaatggtcggntggaaaatggctccataactaagaatagatattctcagaaaaatggctatctcttttttctaccaccttcaacatgaggttttcccccgaaacgcattactatat

SEQ ID NO: 42870 - DNA, 1128 bp, Heterodera glycines
ttcctagtcgtatgtgctttgcgttggttaattggcgtgggtgagtgtggtggttgggccgtttttgcgatattgtggctggaaaaaagaagcgatttcgctgtggggagcgcggccgtctgggtttaagtgcttgcttgcgcttgtgctcggcattgaacggtgatggctgctgctggggtgccacctttgtcgtggcctcagtttctccagcgattggcagctgtcgaaatgaataaaacatgcagctcgtctgtgtgttaaagaaatttggcgagttaattgacttgtgtaaatgttgcctaaggcacaaatgctgtggggaactcatcactggggatgctgaacctaaagctggtggtgaagttggtattccttggaaagtactatttattcgattttaaaaagattagactgaagattactaaaaataataaattaattatgaaattatgaaattatcgaccagattaagactgaaatgctgaatttcgtattgtatgttttatttaagcaaaaaataccgaaatgattccctcgatttgaattttaaaaaataaagaaaaaactactggtagaaaaaacaccgataaaaatacaactaaagaaaatatttaaaatttgccacatcataattcttttttatgggtgatttctataaaatccatcaaagcggcatagaaaccttctttatgcccgaaaataaataaatttaataaaaatagccaagccaaaggtatgaaaataattaattctcagtcagaattctttactcaaaaaaagaacttattttcgtgcttgttattccccggaaaggaatttatgaaaaaaacttttttgttactttgttatttgcataattttgccaacgggaatatttttcaccaggtatttcgaaatttttttttgttgttttttttaattttctggttattcgttatcttattatttattattattattattatttatttattttggtacgagacattcaccaacgactcccatttttgacccatataaatttttcccgccggcggtggtcttcgctcgcgggcggaggttcatttttagtgcagcgaattgcaatgcatagaagacagtttgcctgccttttagtaaatgata

SEQ ID NO: 42871 - DNA, 981 bp, Heterodera glycines
ctgaattgctgacctacagcgctattagcgtaactcacttataaagaaatctcatattgatcggtatctgcggtatcccgaccggtagtatgccgatcgtatttctaaaatcttcaatattacctgacccttatgtagggaacagcgtcttattgaggaggagaccaccctgctatatatattttttattattcctgattctaggactacccaccatgtgactgaaatatgtaatggataacaatatagagtgtaatgcaagttatacggatatggagatctctacactatttctcttttactctattatctctgactgtctctctctagaacacactactcgccctactctaatacggcccctccttattacagacaccccccaatgataccaattagagagatgaggaaactcaagaagaatatgaccattttgtcatctattttctaccctggacattcaaatttttggtggaaattcaattttactgcgcttttcattttgataagtggttgtgctctcgtaaccagttgccttaacttctcgggagcaggcccactagtactatacagtaattgttttaaattttttatcttttgaatgctttgtgaattttaaactgacgatggacaacacaacaaggacagactttttgacactgaactcatttggacaaaagagcacaattgggcagctgacattacggcagtgaatgaattttttctattataaatgacttttgcaatgaaaacatatctatttttaaatgatcatcagcgtaaatttctcgctcgtgttgttttttattttttgacactgcgctgaagtgatccctgctctaaaactacctaaattcagaaaatattttggcattaattaaaaaattggtataatcaactcggattcggaaaatatttaatcatattgatcaaattcaaaactttccaaaattgatgattttaaaacagccaataacgatg

SEQ ID NO: 42872 - DNA, 953 bp, Heterodera glycines
  unsure (1)..(953): unsure at all n locations
aaaaccgcgaaagacttagaaatgacaaattttcgttgaatcaaaatcaaaaaggaaaaatttattcagaaaaacctcatttattaatttcttntaatttgagaagctttaattatttttgtgaatacgaaaattttttgaaaaaaaatgtttttgttaaggaaagattttttcaaaaacttcgtgcttcgaaaaaaattgggcttcgccttcggctccgagtgttaagccgagcttcgcccagccctgatagagatagagaaaaatatcgaacatttttattgcttatttaaattttttaacgctcgatctaaagcgcttcaaaaacaaattttctaacacattttttttggtactttcctgttatgaggaggccaaacccaaaaatttaaaaaaatcaacaaaagggcgctatttatgcctcctcaagtgtcatgcgcttgcttgattttgcgcgtcattttgttgattttttttttaatttttgggtgtgaccttaaaacaggaaagtacccttttttctaatatctctaattgattaggcatttgcttagaaaaagctgtaaatgaggtaaaaactgtccttccctcggatgagagaatttctttgttctgtaattttcagagaaagtaattttattttgataaattattctgtgcagcgatgtatggatttaaattaatcagatatatgactaatcattttgaactaaaaatgttgaatgagcatagattgatatggagctaaattggacaatgaaaaaccaaatgccaatttacgacatgattttgctgttggcaattgatacatattatggatgccaacaaatgaaaaaatgttctgatttgtcagaaatgttctgattttggggtagcgaccaaaatttgttctgattctgatttcttagataaactcatatttttgaaattttgtgggcatatgttactttttt

SEQ ID NO: 42873 - DNA, 888 bp, Heterodera glycines
ccagccctttttgctccgccgcgagctgctccgctactgttggaatggtagaggcggggggggggggggagcacaacaaacacatacggctataccaatttatgcatttagatgtgaaaattttgcgcaccgcctgcctgcgcttccgcgagctggtgggggagtgtgcggacggcatggaaccctttctggccgcaacaacaattgccagcctggccatggctgtgttccgccagcaccacctccgccccaacacgatggtgcacacgccggagggcggattcctgcgcggacgccgagcatcggtggagtctcggcgcttcttcacgctgctggccgccgtacggcccgacctgggcccgcttcgcactgcccgctggtccatcggcgaagctgttgtggggaacagcgggcgctcctaccaccgccgccgccgcgacaacaacagcaccaacagctgtgccggcgccgacgatgacggattccggctcgactgcgtggcctaccgtcatccaccactgcgaccgttgtgcatcgagttcaacggctgctacatgcacggtgggagacacacacacacacacacacacacacacacacacacacacacacacacacacacacacacacacacacacacacacacacacacacacacacacacacacacaacacacacacacacttacaataatgttttaattctgagctcaattaaggttgtcgggagtgctaccccgaccggcacatgctgttggcagggggacgcagcgcggagttgctgtgggcgcgcacccagcaacgggcctgggagctcgccgagctgcacgggatggaggtgctgtcggtgtgggagtgccagttccggcgcactctgcgcaccaacat

SEQ ID NO: 42874 - DNA, 1284 bp, Heterodera glycines
  unsure (1)..(1284): unsure at all n locations
atcccttttgaaaatttaaagtacacnntttttggtaacaaaattatgaattcagagagatgcctcccgccaaaaacccgaaaacatgcaatgattatgtaaaagtcgctttccgacagcgttttatccagggaatcgcccatttccaatcacagccataattacgtccaaaaccgtattattaaaaacgtacctctccatcaccttggcaatgaatggcatttgcatctccaaactgtgttcggcctcctcattccgcacggacatccattcgaaggagtcggcaccattggccgacctcagctgctcattcactgacaatgaacaaaaatgcgatgagcaattaaaatgcagaaattcagcccatccgacccctttttatgataatttccctcttaaaacctgcggtgtccacgaaaaggtcgcccaaaggagtggcgtatttgctgcaagtggtcaaagcgcagccggacaaataaacgacgtgggaagggccgagcacgaaaatgcgctttctgagagggaacgaacgcattgaaaagggcggaggagttaaaaaaaaggcacaacattttgtccggcacaatttgtttgaaggcaaatgctaaaagggaaaatggcaaattggagaaaaaagtaaatggagagaaagagaaaggcacctgcagtttcaccgcaataagtgtacccggcatgactgaaacagcaaatgaataagtcaatgccaaaacatacggaagcgaacacaacgcctaaatttactcccccccccacaaaagtggaaatttggtaataaaataaatgctaaattatgacatattgcaaatgatgcgactaaagtgcattcaaatcaaaaccatttccaagtaaatttcttagttggtgagggttaaccatccgttttcaaatgagttcttaatgcagggcaattaacgtgctgattatgcgaaactgacggtgatattatcgcacgcgctgccccaacggtcggaccggccgcgttgagccaattcgtcagctgacggtccaaccctttagcgttttcggaataccttaacatagagagagggaaattgatcattctgatgcgtcggtcgtaccacgacccggcatgggaagccggtcggactcggtcctcaaccgcacctccgttggtcccattgaaagcgctgtcgtagttcatttccgttatgctattcgatcaaattcgtttggtcagcggtcgacggagggatgagcaaacaacgaatgaattatataatgaggaaaatgagacgcgctaaa

SEQ ID NO: 42875 - DNA, 1069 bp, Heterodera glycines
  unsure (1)..(1069): unsure at all n locations
acaaaaaaatccgattttttcaagtgtccgtttggggtactcaaacaattatggggagcaaaaatccaaggtaaaataaaagtagaggtatatcgaagctatccgaaaggattcggactccctataaatctgggcgcatcgttcagggggactgagactcagaattttgaaaattttttataaaaattatttaaatgaactgactagctaatgtgataaaacaggttaattcttttcctttcagtatccctgcaaagtttggggcgcttctgatcagtttctgaaaaaaaagttaagcctaaactttttggcctgtttaaaaaggaattaaaaatttttaaaaattttattcatctcccttttcgatagaaaaagcatcagagtgcctaaactaacatgtaaataaaatttggtgcgtttcagagcaatttctgaaaaaatatttatgaaataaaaaaatcgattttttcaagtgtccgtttggggtactcaaacaattatggggagcaaaaatccaacgcagaattaaagtacagactatagggaagctattcccgaaggattcggtctccccataaatctgggcgcatcggttcggggggactgccccgaaaacaaaaataaatcgattttttcaagtgtccgtttggggtactcaaacaattatggggagcaaaaatccaacgcagaattaaagtacaggctatagggaagctattcccgaaggattcggtctccccataaatctgggcgcatcggttcggggggactgccccgaaaacaaaaataaatcgattttttcaagtgtccgtttggggtactcaaacaattatggggagcaaaaatccaacgcagaattaaagtacaggctatatcgaagctattccggaaggattcggtctccttataaatctgggcgcatcggttcagggggactgccccgaaacccaaaaaaaaattttttggataaaaattatttaaatgaactgactagataatatttaaaataggttatttctcttcctttcagtatccctgncaagtttggtgcgcttctgatcagtttctg

SEQ ID NO: 42876 - DNA, 1144 bp, Heterodera glycines
  unsure (1)..(1144): unsure at all n locations
ttttgtatagcatctaaaatctcccttttcctattctctctaattaattgtaatacatttcagcgaatttgtctcttttgtccgccttttctcctcctttgctcccgcctcaacagaattcggtccttccgccgatccttccctcgcctattcctcaacaaatcgttccgttgagcaaggaaatcgcctcgcagggccttttgcccgtcgaaggctgtcgtccggtcagtagatcaaagggatagtcgggaataaataagatgtttttaatttgggtcaccattggtaacagttctgttgtgtaattttgtcattttatttgcgtttttaataaaaattcatgcataattaagcaatggaagacacaatttgtaaattattaagcatttgggaacgtcatttttaggtagaaaaatgcagaattaagagaaagaagttacaatttgtaaattattaaggagtggaagatacaatttttattatgtgcacgaacttgtcatttttaggtagaaaagtgcataattaaggacattaacatgcatgcagaattaagcaacggaagacacaatttgtaaattattaagcatttgggaacgtcatttttaggtagaaaaatgcagaattaagagaaagaagttacaatttgtaaattattaaggagtggaagatacaatttttattatgtgcacgaacttgtcatttttaggtagaaaagtgcataattaaggacattaacatgcatgcagaattaagcaacggaagataaaatttgaaaattattaagcatttgggaacgtcatttttaggtagaaaaatgcagaattaagagaaagaagttacaatttgtaaataattaaggagcggaagttgcaatttgtataaacttaaaaacgaaattgtcgtttttaggtagaaaagtgcattattaaggtaacatacatgtgtttaccaataaatgtatgctgactgactgcattcatctcgaccatcattgttgtcgtcaatttcttcgtcctcgtcaattctgccaaatcgtttgacatgaattgagtcgtcctcaatttccgtanacaattntccaagccatcgttccttgtattcgtcatccacaatttncattagttccattgggtagtatctgtct

SEQ ID NO: 42877 - DNA, 952 bp, Heterodera glycines
  unsure (1)..(952): unsure at all n locations
aaagtatactgtctacaccgagcaattactgtgcaaagcatactgtctacaccgagcaattactgtgcaaagcatactgtctacaccgagcaactactgcgccacacgctagttaatatatacgttatattgacaaggagtttcgttgctaaaaccattttctcccggccgaaggccgggagcgccctgaaagtagtggaagggtcttacaactttttgaggtgcatccgggaaaactatagagaaaaattcagcgcggacgactgagtcccggggaccgatttctcactttttcttgcagtttagggcccctaactttttttctaaaacccgaatccaaaaagtgcccgctgtgagggccactccccncccacccgtcctctccatgctggtattttttatttttttattagagccaccccctggcctgcacgcttggctaactgaagtgtgctcaaaaagtacacttcagtaccaggcgaataactcgccaggggttgctttgaccgaaaaattgtttctgagcaaaaatgtgtagtatttgaaaggctatcaaaccaagttttaaaatttcgaaaattttcaaaatttttcgagttaggcctaaaaaacggttttcgggtttttgaattttaggattttttaacgatttttcccagagaaacggagaccacttccaaaacatagtttttcgagctctatcgactggtatttttttcggaaaaatttcgattttttcccggaaatagaaaaaatttttggcctgagcgggacgtttgagtcccgggcccgataactcgtcgggggtcggttttagacgaaaaatgccttagagcgaaattgtagagttttttaagctctatcgaatggtgtgccatatggccggaaattttcaaaaattttcgagctaggcccctctagaaattttcgaaaattttttttgggttgaaaa

SEQ ID NO: 42878 - DNA, 947 bp, Heterodera glycines
tgaaatctatccgagtcaataacagtcaatctattctttccgttgttgatttcgttcagttgaatagatttggtgcaatatattgaattttgatgaaaaataaattttcgactttttgttcgaatttgagttcggggttcggaattgggcgaaatggatgcggattcgtgatcagcgaccccgaaaaccccagaaaaaatgttttacgtgacttttaaaaatttgaaatttttgccaaaaaaggggggggggaacaaaccccagtattaccttattttttttcttcacttttcagtgtttttaatttttcacaattcgctaccttcgccaatgcttgcaccaattccaataattgagccggcaactgtcactgttccgcccaatgaagacgttgtgggctcagatgatgagaatcagcaaagagaagaggaactcctggtcaatcaatttgtcatcaattcggaagcgatcaagcgcatattggacgacccgcgctacgctgacaaaaaggtccaaaatatttttcaattaaagtgactctgacttaatggaattttttcattaataatttatcccaacttttttttacaaattttggtaaaatgtcgatgagctctatttttcggcaaaaaaatcattaaaaaggtgaaagctatatggctaaacacaaacatagcatttattttagccctattccgaatttcacttcttaaaattggaacaaatgccgaaaatatttatttacggataactcgataaatacaatctcaaattggctgggattcggaacaggccaaatgaatgtcacatttgtcttttttgccatataaaagtaaccatttgttttccttttaggtgtgtgtagtcagcgtggcgggcgccttccgcaccggaaaatcgtttattttaaacttttttctgcgtaatgtgcgttggcgctcagcacc

SEQ ID NO: 42879 - DNA, 1216 bp, Heterodera glycines
aaatacggtataggtatttagaagtgtccaaattgagataaaaacaaatgtcaaaatttttattgtactttttcgaaattttgatttacatttactgctttttaaggaaaattggcgctagttgcaaagaggtccattttgaaaattttttcacttttttgacataatttttttgtttttgaaaattttttccctttttttgacatattttttttgatacggaatttactttttttactagatggtacgtatttcacgctatttattaattgattatgacaatctgcaggttcggccagcttctttggacgaaatcaatttacgttggatttacaagcagaattcagaggaaatactacaatttctggcttatcatggacttatcaaaaaccaaatggagtgcaagaagtgttttaacaaaatgtcattgacaaagaaaaagcaaaaaatggatagtttttggtaagcacaagttttagattttttaaatttatttttttagtggaaaggacttcagaaacaaaaacgccatcaaagaactgggaatcgcaaaatcaacttgcgtcaattggttcaatttttgtcgcacccaatgtgttcaacaacaaaaaattggtggcgttaacgtcgtggtggagctggatgagacctgttgggtgaagcaaaaacacaaaaagcctaaaaaaggctgcagcaagtggttttttggggccataaaagaaaacgttgtacaaattgataaagaaatggattcgtccaggctcagtgatcatcagcgacgaattggtcggcatacccgaaagtgggctcttcactttccacagtccgaccacatgctcttcagacaccaaaaatcgaccggtggtggcttgtcgaaacttgtcatgctcccggacggcaccgaattcaacgtcaatactaataaatgtgaaggactctgggctcaattgaagcaaaagacgaaaagaatttatggaaccagtacaaatttaacaaattccaaatgtttgaacaaatttttcgacttaatgctagggctaaaggaaaaactattattaatgctttctgtgatcttattcgtcataattataattttattcgccataatcatgctgctaatgcttaatatttatcattacgtataaataaacaaaaaaaaattatgtcaaaaaacgtgaaaatttttttcaaaatggacctctttgcaactagcgcc

SEQ ID NO: 42880 - DNA, 979 bp, Heterodera glycines
cctccaagtaattttttttcttctaattttaaattatccctttttctggaattttatcacattttaacaattaaaatcataaaatttgtcatttttggactaaatttgttcacaatgtaaattgaaaatttcaaaatttttcacggcggcgcctatcggcaccgccggatctccaaaatacccattattttttttaattgactcaaaaatcgcgaaaaacctaacgaatttttttgttttgtgcccctttgaaatgataaatactgtaccaaattgaatcaaattaaaaaaaaaccaaaattagttaagaatagagtcaaaaaaaatttttaaacggtttttaagcgaataggaaaattttttgaaaaaagtctcgagtctcgggttttttgggtctcggtctcggggttttcggtctcggtctcggtgtcgagtctcggtctcgggatcgagttttgttctcgagtctcgggaaatttttggtctcgagcatcactattgttggggagtacgcttacagcacaaaatgtaaatagttggaaaaatctaaattctttttagagcccggacgggaacttttggtactgatactggcttttttctctaactcaagaattttttccgtgattgatttttaaaacagggcttttcattaaaacttttcttaaaagcaatcgggtaggtatcaaatttagcaggcattaatgttaattatgagtcattttttgagaatttttcaaaattttttattgagaaactctttagttagagaacaaaaaagcccgtctcgtaacaaatttccatctgctgggcttgatgttatgcgcgttaattgtgatgatcagccgcaggggtaaaatttcaaaattaaaaattttattcgaaatatttgaaattttaatttttttttcgtagcgtattatttccttgttaattaatgatgaaaatcccattagctgcacctctgtgaaagagtcaa

SEQ ID NO: 42881 - DNA, 508 bp, Heterodera glycines
tttttccaaaagggcaaaatttaaatttatatgaatacctttaatgggttcttttttgtgtgatgaatgacggcgattaaccgataaaacactaattgtaacgaaagaaaagttacacaatttgtgacaaaacggaaaattaacacattttaataacgaatttattcaacggacttttggcgatcggacaaaaaaaaaagatggatttacatgaacaaatcagcgggaaatgctcaaaacatttatcgatgaccaaaaaagtgcaattgcgtcgtaattccatcgctattattggcctttgtacgtggaatagccaaagttactcaaagtgattggcacgtggtaatgggcggtgggatcatcaatttggaaaacgatctgaaaataaatgggggagagaaaagagaaagaacaattggaacgacgaagtgaagggacaaaggcaaagaaaaaagaaatgcgaatttggaaatgaattgtcaaaacattggtcaaaattggggggggg

SEQ ID NO: 42882 - DNA, 782 bp, Heterodera glycines
tctttgatgcgtttggcacgtcattgttggaggaacattctcccatttaggacacttttagtgtgagcgataaacggcagaaataaaccgaaataaaagcaaataagtaatgagaccaaaatactaaataaggagatgcaaatattgtgagaaaggtggaaaaggaaaaacaaaattaggtacataaatggtgagaaaataaaattgagaatgaaaaaaaacaaatacctatttggtgagaagaaattattttgggcatgaaagtccttttttcgttaagttgatggaaacgtataagtatatattttcatgtacatagatgtagttacagattttaagaatttattcaatttttgtaaaatctttgggattaaagtgacctgagattttcccacaaataaaatatatgctaattgggtcaaattcagcttaacacgatgaaaaaaagctgttttcgcactaagtaaatggtttgatgatttactcgttgttctattttttaaatgagacaagggagaaagggcagtgagaaaagggaggaaagggggggggggggggggggcagtccccccgagccgatgcgcccagatttatggggagaccgaatccttccggaatagcttccctatagcctgtactttaattctgcgttggatttttgctccccataattgtttgagtaccccaaacggacacttgaaaaaatcgatttttttgttttcggggtagtccccccgaaccgatgcgcccagatttatggggagaccgaatccttccggaat

SEQ ID NO: 42883 - DNA, 1524 bp, Heterodera glycines
tttttaattggataaataaaaaaattgtttaaaatgaaaataaaaatgataatcactaaaaaaattttccccaaaaccacctttccggttatatttatcatgaaaaatacgcattttaagaatgtgtttttatttggaataaattatcacaaaaccttcatttcctgttattttagcttgaaaaatacgcattttaagaatgtgtttttatttggaataaattatcacaaaagcacatttgcggttatatttatcatgaaaaatacacatttcagaatgtgtttttattcggaatcaattatcacaaaaacacatttccggttatatttatcatgaaaaatactcattttaagaatgtgtttttatttggaataaattatcacaaaaatacatttccggttatatttatcatgaataatacctaatatcaaaagagatattagtcattaaattttatgaattaattggtctttttaaacttcatttcatttttgtattgccataaaaatatgacacatttaattccttaatttaaagattctttattattcagttaaattttaaaaattttaagtttaaaaaaagtttgggacaaaaatattgagtctcgaatttcgaactttttagttatattttttgcaaatttttgttagaatcaattaaaaacatttcatatttttcaatatgtcctgatttttcacgtttttttcctgtgtatgaattctatatgcattttttgttgtaaattaatgtaaaatgattctcttttggatgaaaatcattgataattgtactgatttttttcatttgtacttttataatcaatccaaacaaataaattctcattttcttcatttattaaaaaatagcaaaaaatttcataatttccgttatcaaattgtaataataaacaaaaatttattgccaatcgcaaatgaattcagatatttcagtagtattaatgttttttttaagcgttatacctggtaaagctgaatcagtgaagaaacaattgcaagaaaagttttgtgaagatatttttggagaaaaatggcaatataaagaagatcaacttcgcaatgatgagatgatcagtgaaatgatccgaaacttctataatttaaacgctaatattaaccaaacaggaagaggatattattcagtgtgaatggacgtaatgtcatttcgcatcatagtgaagaaattggggtcatattgaagtgatatttaacgatcgatagcgtacctaacttcggttcgtgactctatatcaatttggggacatattgaagtgatattgtaacaagcgcatctcttccctaaaatagggtgaggttgtaggtaagcactcagttgaagccgcgtctgtctgacgcaacaatagaagtcacgataaggtaggggagtattaacgtacggtgtgcagattatgagtgatgaggggggcctcggacgatgctggaagacaaattgcaaatgtaaaatggctggtaattatttggtcaaggcataaaaaagtggcat

SEQ ID NO: 42884 - DNA, 916 bp, Heterodera glycines
ccaggagatgggccaaattgaaaacttttatttgcgaaactgaaaaatacgaaatgaaaaaaaagcgaaatgcgaaacgccagaaaatgcgaaaagcgaatttttttttaaattttaccaatagcttttgaggttgtgatgcaaaaaaaaatctgcattttccggttcgatctttttctcagataaaaaatgacaaattctacccattttgtggttaaaatttcaaaaattaaggtaaaatgaaggtccggcggtgccgataatcgccgccggaaaattttttggaaattgtaataaaatatggtaggaaaagttgttaaatttcaaaaaatttactatttatttcaaaaaaataaatcgcaaaaaaggcaaaaaaatgctccaaaaagttcaagataaaagcttcaaaccaagttaaaaaacctggaccgggacttaccgggaccagaaaagtcgggaccgggacctcgattttcgtccgggactgggaccaaccgggaattttcccaagtgaaattttttgaaaaaaaaatttgaaaatttgagtgcactttgttacgaaaaattgcctatattcaaaaatgtacccataaaattttttaattctcgtttgtggggagaaattagaagaatttttccattatgcaattttgagtgtaatatgttaacagaaaataataaactgaagcattcgttttaaaaattaaattttcaaatatattcattcttaggggtgtaaatttcgcatttcgcgccaaagagcgaaatgcaaaaagcgaaatgcgaaacgccaaaaaatgcgaataatgcgaaaggcgaaatgcgaaaagtgaaacgtcggcccatccctgatccatatccaactcatctaacaagggaacattccgagctgtgactaggaaattgcatataaacg

SEQ ID NO: 42885 - DNA, 918 bp, Heterodera glycines
  unsure (1)..(918): unsure at all n locations
gtttaatttctgggtcacaccaagttctataaaaggcggatttttgaataaacttttgtgtttaatttttgtgtcacaccaagttctataaaaggcggatttttgaataaacttttgtgtttaatttttgtgccacatcaagttctataaataggcgggttttgtaccaacttttaggttgatttttgtgtcacactaactgctcggtttaatttctgggtcacaccaagtcctataaataggcgtatttttgaataaattgctgagtttaatttttgggtcacatcaagttctataaaaggcggatttttgtataaactgttgggtttaatttttgggtcacatcaagttctataaaagacggatttttgaataaattatgggctaattttgggtcacaccaagttctataaaaggcggatttttgaataaacttttgtgtttaatttttgggtcagtctataaaaaggcatattattgagataaatttgagttattttttatgtaaaccaagttctataaacaggcgaatttttgtacacacttttgagtttaatttttgtgtcatcaagttctataaataggcgggttttgtaccaactttaagggtgattttggtgtcacaccaactgctcggtttaatttctgggtcacaccaagttctataaaaggcggattttagtacaaacttttgtgtttaatttttgtgtcacatcaagttctataaataggcaggttttgtaccaacttttaggttgatttttgtgtcacacccaagctctataaacagtcggatttttgtacaaacttttgggtttattttatgtgtcacaccaagttctataaaaaggcggttttttgaataaactgttngggttaatttttgggtcacaccaaattctataaaaggcggatttt

SEQ ID NO: 42886 - DNA, 1809 bp, Heterodera glycines
gatatattattatttgtatcgtagtcattgtttaaaaattgaagcggttttgtgcataaatgtgaatttaaataaatggattttaagtttgttttattgttcgaatccgggttcagggttcaaattacgtcaaaataatgagtattatgttctacttattttgaatcatttataatttattttaaacaattattaattaaataaatatacatgcattatatgtggactaaatttttaatttgtaaacgcgcgagcaccataaaaggcgttattacgctgatttactgccgtttcaaggttgcttgattacccgatttggcagtgctagctatcgtcatttttttgataccttcataattattcttttatttaattatttttcatttgttagatttcagtttttattttcttctttttttttgcttatcttaactttaattatcctttatgtttctcaaaaattctttgattgtttatttaccaaaaagttaaacatttattgttttgataattggcaaaaattaaatttataaaattaataaaaaagtaaaaaaagggattttcaattcaaaaatttagtatctcatcaaattcaagagtttttcccgtcaattctctttcatactttttttatgtcctccaacttttgttgtaaatcaattactcgtctattgacgcacgcgattcaacttggaggctggaggatgttctattcttttttgttctcacatatttaaatgataatatttgttttaaatttcattatttattttttattttgtaatttttagtcacatcttatatgccatttaatgcatataactctgcctagattttattgaaaaataatttattttttttgttgagtaaattattattcgttttcaaacttgatagaaatcaagttagagcagcattcctgcgtaatgaaacatttaatatagttcgggatcagtaatcatttctagtaatctttgatcatttttatttattttatttaccaattagtattttctttcattattcataaggtctttaatttaattgatttgaacaatattaatttttgaaaatatatatactcatttgagtatgtttgtcaggtaataattcattgccaaattttttcatcatatgtcgcttatgatttacaatattcatctcttcaaaccccataattaaatgtttatttatttattaggtagcaaaaaagtttacatattaatcaatttattgaaattgttataattgtcgccttttgaatattatgatatattaaatttttttattccattaatttatgcactacattttttaaataatattcatttaatttttgataatttattataatttaaaatttttgttgaactttattttctttttatgaaagattttaatatgttctgacgacaattcccattgtcaatgtttactttgtaattatttatattaattttattcatttatttctaattttttttattgttctgacatgtaatcataattttgtattgctgatttttttattcacgtgttgtagttatgttcaaattgttttccaatcttatttggtttgttgtttaacgacaaaaatatattgaccaaatattcattcatttttgttcagaaataaataattatatatttttataattttatcatttaaacgaaaattattttatataaattaataacacttcttttttattatctcgtcaaatctcctctaaattggtaagtagcttcaccatttttttcttagaaaatgtaaaaagtttccacagttgctcataaaaaatttaattt

SEQ ID NO: 42887 - DNA, 1554 bp, Heterodera glycines
  unsure (1)..(1554): unsure at all n locations
aaaaaaaattttttggataaaaaatatttaaatgacctgactagataatatttaaaataggttttctcttcctttcagtatccctgcaaagtttggtgcgcttctgatcagtttctgaaaaaaaagttaagcctaaacttttgggcctgttaaaaaaggaattaaaattttttaaaaattttattcatctccctttttgatagaaaaggcatcagagtgcctaaactaacatgtaaataaaatttggtgcgtntcagaaccctttctgaaaaaatatttaagaattaattttgcaaaaaataaataaaaacgaaagactcagattttcgaaaaattttntagagcaagctagctcggcgctcatttcagtgtaagttagtcctttaccggggagtatccctgcaaagtttggtatgcttctgctcaattagcaaaaaatatgagtgatcaaactttcactaaaaagttaagcctaaattttttggcatatttaaaaagcaattaaaaaatttttaaaattttattcacctccattattgatagaaaaagcatcagagagccttattaacttgtaaataaaatttggtgcgtttcagaaccctttctgaaaaaatatttatgaattaattttgcaaaaaataaataaaaacgaaagactcagattttcgaaaattttttttgagccagctagctcggcgctcatttcagtgtaagttagtcctttaccggggagtatccctgcatagtttggtacgcttctgctcaattagcaaaaaatatgagtgatcgaattttcactaaaaaagttaagcctacattttttggcatatttaaaaagcaattaaaaaattttaaaatttaataattttcctgcaccgaaggtactcactcggcctcttcgcggcctcgtggtgggccttcgccccccccctcccacgcccttcagagcacgacaaatatttcaacaaaaattttgaaatcatgtttcccactcccttctcccaggggtattattttgtaaagtctttttttccccaataaacttttcaaaccccatttttcgcaccgtgaatgttatttttattgaattctgaaccggtttgagtagattagactagaaaaaattgaaaattttgaaatcatgtttcccactcccttctcccaggggtattattttgtaaagtctttttttccccaataaacttgtcaaaccccatttttcgcaccgtgaatgttatttttattgaattctgaaccgttttgagtagattagactagaaaaaattgaaaattttgaaatcatgtttcccactcccttctcccaggggtattattttgtaaagtctttttttccccaataaacttttcaaaccccatttttcgcaccgtgaatgttatttttattgaattctgaaccgttttgagtagattagactagaaaaaattgaaaattttgaaatcatgtttcccactcccttctcccaggggtattattttgtaaagtctttttttcccctaataaacttttcaaaccccatttttcgcaccgtgaat

SEQ ID NO: 42888 - DNA, 594 bp, Heterodera glycines
  unsure (1)..(594): unsure at all n locations
aagtttttttcaaccacatatgccaatataattcttgcagatttaaagctatccatgctgccnnggttctcggcacagcaaagcactaatagggtgttngactaattccttacacaagtttnttacacccacttattgccaatntaatttattgcagatttaaagccatccattgcctgccggttctcggcacagcaaagcactaatagggtgtttgactaacttcaaaaaataattcattacccaaaagttttttacaaccacttattgccaatataatttcttgcagatttaaagctatccattgcctgccggtctcggcacagcaaagcactaatagggtgtttgactcacttcaaaaaataattccttaccaaaagttttttacaaccacttattgccaatataatttcttgcagatttaaagctatccattgcctgccggttctcggcacagcaaagcactaatagggtgtttgactcacttcaaaaaataattccatacccaaaagttttttacaaccacatattgccaatataatttcttgcagatttaaagctatccattgcctgccggttctcggcacagcaaag

SEQ ID NO: 42889 - DNA, 308 bp, Heterodera glycines
ctattcctttcctggtcattaccactttaatatttcttaacacttttaatatttaattcctttgcatataaatgtgaattttattatttaattatattatgttagattattttattgattaattaatgtgttaagataataattctcatgaggctcctctaaactatttacttatctcagtctatttttattttgaccaatatcataaatttaaaaattatctataaaaattaaaaattataattgaattgtaaactttttttccgctattattgcgtatttaagaatttatttattaattttttttt

SEQ ID NO: 42890 - DNA, 734 bp, Heterodera glycines
cgataattccgcccccgcgggggcgggggcgggggttttgatttgaattaactccaaaaaattttacaaaaaattaattttttatgaatgatgtgatggctccacattcctttagtcaatgtatcgcctcaattcaattccttttggcataaattacacagattttgtctaaagaattaccaaattttagagatttttggctaattttttaagaaaaaataggtttttggggggccggcggtgccgataggccgcctggcgaattttgaaatttaagctcgatttctaacagatgtttacaaaaaaaataagatttttacgataaatttttgtttttttaatatattaaattatcatgatttactcaagcaaaattggaactcagatttgtaacatattttcttgaggcacatttttccaaaaaaaaaaaaaaacttggtgaatgtgcgagcgtagccggcggtgccgataggcgccgccgggaaaattttttgaaaactgatggatctgttaatagattttgtccaaaaatgataggtttttgcaatttttagagaatttttttaataagatttacgaattattgagccctgcgatgccgataggcagcgccaggcgaattttaaaattaaaaaaataaattaaaaaagaaaccgtcaacctgaatcgaactcacgacagaaagtaatgtcaaggttgattcactaaccactatacaccacactacacatcaa

SEQ ID NO: 42891 - DNA, 1370 bp, Heterodera glycines
ccgcccggattcgaacttcccccccccccctcaaaatgcttcctcagaatccccaatcacacagggattctgaggtcttaacgatgtcaaaagtaaaatgtgatcacgtattcgtgatcagcgtcataaactacccctaaagacatgtttttggaagatttttgtcgaaaaaattttttcactcaaaaatcctggtcacccccctttggtcccgaatcacaaaatcacttttatttttatatctttttttaaaaatgtgataaaaatgtaaaattaaatttatattatagagaaaaaaattgcggatttttgtagtatattacttttacagaatgacttttcagaagggagttatgaatttttttctgaaaaatcgaaaattttcagaaattctggaataactttttttctttttaagatagaaatcccaaataaatctcataaaattctcccgattttttgctatttttaaagctttattgtatgaaaattgaccctctctgaggtgagttatgaattttccaatattcgcctaaaatcccgagggccaaaaaattgaaaaatatttttgaatttttaaaaaattctaaaatttcctagactgaaaatgatcatcagattcgtgctcagcaccttaaaaatacccagaaaaaatttttcaccctctttttcaacccaaaaaaaaattccgaaaatttctagggggcctagctcgaaaatttccggccatagagcacaccgttcgatagcatttaaaatgctctacaaaaatgttctaagacaatttttcgctaaaatcaacccctgacgagttatgggcccaggactcaaatgtcccgctcaggccaaaatttttttctatttccgggaaaaaaccgaaatttttccaaaaaaattaccagtcgatagaactcgaaaaatgatgttttggaagtggtctccgtttttcccagaaaaatcgttaaaaattcctaaaattcaaaaacccgaaaaccgttttttaggcctaactcgaaaatttttgaaaattttcaaaattttaaaaactggaaaaatccagctcattgaactccacaataagtccgctggagccccctcgctcagatcaaacgctgacgcggtattcacctgggactgaagtggacaaagttggtactgaatttctcctattttctgcagcccttcctactataggtagaggcctggaattttttttgacttttagacaacacttcaacttagccccctctcagcggacattttttgattagagtttcagaaaaaaagttacgagccgtcaaacgcacgaaaaaatgagaaatcagtccctggtactcagttggcccttggaccggaaaacctatatttcc

SEQ ID NO: 42892 - DNA, 1230 bp, Heterodera glycines
aaaaattgttcataatttttttaattaatttcgctatttaaaatattaaaatacccttttttataatatttaaatgtataaaatttaatattaatatttttggaaatagacaaaatttaaatgtgaatttttaatttttggtgacgtcattaaacaattatttttccaataaaaacattcacaaaacaatactttctgtgtggaaaattgtttttggcatcggcatgaaataatttatgcctgaataagccccttccgtaaacgacccttgctcctcaaaaactagggtaaaacggaggtccgacggtgttgttacgcaccgccgggaaccctaaccaaaaaaaatttcaacgcactttttcataagttcagggcgaatttgggtcctacggttgggtcgtcgggaaattttaagaaatttttcaattggtattagaaattttatgcacatttcccaagtcatttatttacttttttggcgaatttgcgtctagcggtgccaatttaggtcgtctggaaatactttaataattgtttttttttcgttgaaatttgatgcatatctaacaaatttgtaaattttctctcccaaaattaggtgttgaatgaccccgagccgggtgcgacgcccgaggtgaaggcgttggccgctctgtcgctgggcctcgtgttggtcggcaccggcaacacgccgcccgcgaaggccgagttcgtctccagcatggacgtggttgccgacctgatcaactacttgcactccatcgacgtgaacgagccgaatgcacgctttgtggcgctcggcattggcctgattttccttggttcgttgcgtggtcgacaaattgattttataaatttttttttggaagttaatttaaaataaaattccgacaaaagcgtttgaaaaaaatttttactcaaaaaagtttttgcgggtgggataaacaagctactccatttagttcaataattcaaggaaaaccattaaaaaaataaggacagatcgttcgttttccttttaaccggacttttttttgaatcaaaaaatttcaaaaatatttaaatttaaaatccaaaaatttttttttttgattcaataatttactgtttttctaatggaattaaatagtgtcaatgcgaatgcaactgaaaaattgctgtttcatatgtcaataatgcttttcccttcgcttccaggccgtcaagacgactacgacgacaccatttgcg

SEQ ID NO: 42893 - DNA, 1082 bp, Heterodera glycines
  unsure (1)..(1082): unsure at all n locations
aaaaataagcnaaatttttctttaaaaaatttttgtcttttgttttaaataatttttttttataaaactgtttataatcttttattgggggccctcttttaaccaaatnttcttcaaaaaattacattaaccatacttatttctttgaagtatttgagataagctaatcacgaatntaaaaccgagaatgattgtgacagcttcggtgtgtgttggcttaagcctgttttttgcaccataggagggcgttgatttaaattttaaaaaattgttaaaaagctcgatttcataccccaagctgcgcataaaaattaatctttacttgaaactttaatatggaagcctgtcaatcttattattaatcatttctgacagctgtttaaacattgggttagtgctgtggcgaagtgtcaaaagtatcgatgatgggtgatcgaaagaggcgggtcatttcagtacagaaaattaatttaaataattaaattaattaattcatttataattgaataacaatcttttaataataaatatatttgtctctattttagtatacacgacccttcaaaaaaacgagaccatcaaataatttgacaaatttaatgcaatccaacttttttacaagcatataaattaagcatccatggtatcatttgatagccctaagtgtcctctattttcctgtaaaatttcaaacgatttggttgagcttcaaagaagttgtagccaaaaatatttaaggaattttaagcgcagcttgggtcgtttatttaaggatgaaatcacagcctaatttaagaataattttagtttttttttaataattaaagtgcaaaactttccgatgcccaatctttccactgtgaatccttaaatgtcgcccattgtcttgcaccaatttttttgtaaatatttttggtcccactgatttaaatttatataatttagagcacatttaattctctataacgaacctaattattaacttttaatggagcatggatatttcggcacgttgttcttaataccaatataatgcctgtttttagttaaactcatgaaatcaaattacattaaaggatttt

SEQ ID NO: 42894 - DNA, 739 bp, Heterodera glycines
cacttatttctttctcaaattgcttcttccattttgaaatgcttgttataactttgctcaaaagcaacaaaattttaaaatttttatatcattcgatagccctaagtgtttcctattagcctagaaaaatttcaaaaagtttcattaagaaagttatgactaaaaatgttgaaaaaatttggttttttgagtttctcagatcataacttttttggaacttaaagaattttaatgatattttgcaaaatgccacggacacatagttttttttttttaatttaatagttttttttttaatttttttaatagattttttgaccacgataataaatttaaattgttgtataaaaaaaatttcatgattattttattatattattttaaacaaaaaaatttaatggaaaattgaaaaaaaattaatctgtggccgcttattagtctattaaacattaatgtactaattttaagcgacattctgaagttatttcaacgatatgtaatatgaggtttatgagtatttaaaatactcgacatgaaaaataaaactttaaaaaataaaattgaaaatcaccagcagcaacatattatttgttttagaattaatttaaaatcagtaggataaaatgtttatttaatcatggaattattttattttttatatcatttaaaatcttattaaaattattttttggataattagtgaaaaaataattattatttttttaaatcttaaatttaa

SEQ ID NO: 42895 - DNA, 751 bp, Heterodera glycines
  unsure (1)..(751): unsure at all n locations
aataattgaaattctgaaactttacacctccaaaaaattttctgacaattcatgcgaccaaacttttgatgctgatttttattttagggttggtctccaaccttcggcgagagaaaaaggggggatcgaatgttattataacttctgtttggcaaaccattcattatttgaaaattataaggtcaaaactttgaagacatgtaaatttttgaattttatatttcaataattttgggcttttgtcaatgttttgttaacattttggcatttttcggatttttcatgtaaattcagaaattctttgttactaaaagccaggatcgggaattaggacctccaacaataccggaaggaatctgcaataaactaaattgttaaagaattttcaaaaaaatccagtaaatttgtaatagaattttaaaaaaaaaatacaaaagttcacacgacaatttattccatcattcgttttataattccgaatttgctgaactgcttcccaaagtttgtcctcgttttggaaaatttttcactcaatttgtttgttggcattggccaaatgcattttggacaaaagtccttgacaaattggtggcggaaaatgctgctggtgaacaacaacatccaactggacaacaccaaagtgcacaagtcgttgatccacggatattgngtgtagacaatcggtggatagtcgtacaanaagccggtgcccataataaatctaaaatataaaattaaaaatattttgaat

SEQ ID NO: 42896 - DNA, 1292 bp, Heterodera glycines
  unsure (1)..(1292): unsure at all n locations
tcataataaatatatanctaatttatcagaaattcacaaattaagattttccaatgaaatctgctaaatatggtcaaattcttaattggaccctagaatcctttatttatcttacaaatttgctcaatttgaaaaatttggctatttttgtggacaaatctgttaacaaatctcattaaaaattatttaaaaaaatctgggagccctgagctaaacagatttttaatgaagttcaagatttttttttatcaatcacctacttcccttgtccaatcgagctgattttttatccagtataataaataaataattttatattaaatatgaaaagatataaatttaatttcaaataaatttaaaaaatatatatatatatatatatatatatacatttcaaccagaataaataataaaaaaaagttgatttaaaggtccatttttataaaatatataaaattagtaataaatttaaagcaagcagcattcttttaataaacttctaaacagggattaaaaaactagtgaaaaaatttaaaatttttcttaatattaaaaatttaaacagcaacagtctatgtaaaattcacaaaatgcagtcaaaatttatctattaatgaattttaaaaggaaacaaattaattattcatttctctaaatgtagtttttgaatttattttgatatattttaaaattatttatagttcttttaataaaaattttttgatttatattattcattcatttagatatttatttgattcaacacattgcttttcacattaagaaataaaccttatctctgaatgataagaactttgtattattaagctattttaatcttttgctcaaattaaatatctgttgccttatgagcttcatttttcgtacaactatgctttttaaatcaattgacttacaaaaattatatttatacagataaaaattttttggatataataagaattgagcccgcaaaataccacataataaaagtttcaattaaccttacttatattacattcttaaaaaaagacacttacatttttattgcacttacgctttcatttgttcattattttcgtgtctttattagtatttattcaaatattgcattatttaaaaattttcatttcaactaatttattattcattctttaatcaaattttacacatttttgtttatgaaattataaaataaatataccttcataaaataattgataagtttattatgcttaatttttttcatgcaattattattatttgttcattttgtttctatacagctctat

SEQ ID NO: 42897 - DNA, 1666 bp, Heterodera glycines
  unsure (1)..(1666): unsure at all n locations
tttttttaaatttggcatccgccttctccgtccgacacacagttgtagcacccgtcaggacaattctttgcgtatttctcctcacaacagtaataacagctgcaccgcgtgttcatattacagtgcttgtcgaacacaaattggcacgccacacagtcgtggttgccagggccgcagttggcatctgaaaattaatttgccaaaatagttttatggcatttcccagtgggtttttgacttggaggaattaattaaatatatgtaataaattatatatcttcgagatgtccgaggttgcttcatgaattccgccagatggctttttaaagttgtcattttttctaagaaccctaaataagtaaccatcgcggtgttaggacgttacttaaaaaccctaaatttttgcttataacttttcaaaaggaaagaatttttaattctcgatgtaattagttaaccctaaatgttttctattgtcctgtcaaatatcaaaaaatgttttctaagaacctttaatgagcaaccattcgcatcattcgaaagcaattatatattgtaattttgttggttaattttgttgaattatcacttctaaaaattctatttcactaacgcattttccgatcgagttgaaatgattttatgataagcaatcattagaataccaggaatttgnntggttgagttcttnttctgcacagctcaattcgtcgaccacggagtttttgcaggttaaaacctgtgaattatgaaaaatgagtgttaaagtgttgatgatttaaattgggttaattaataaatattatatattggaaaataatgattaataattaatattatataattacattgtcgaattttatttgaagaaaaatgattaacaataaaactttaaaaaacattaggaaaagaataagcaagcttaagagggaatgtttcttttagacgaaaagaaacttacttatgttggtgtcactatcctttagtttttctttgactgggaaaagttatgacatttaaagaaacgataatgtattgagataaaatgatcaaaggaatcacagcttatgtatcgcttttatatggaggagaaaaagcaatggacgttgaaaaacaaagaaaaaatggaaaaggaattcattttgaaaggaaaaattaattcagtaaatgtcaaaagaaaaagaatgtaaatgaaaggcattggcattcgttctgatagtaaaaattgattcagcaaatgaaaagtgaaagaaatttaaaatgttgtgaatttattaagtctgtttacactaaaaatgttgtgccatttgttgaataatttcacattacaatttgctcactttcattgccattccttaccgaattaattttccatcttattttttgattttattttctttagcttcccatttctcctctctatataaaggaacagttgtggtcatatttatagtcacaaatgtcattaaattaattttaaataaaaaataaaatttggacaaaaattatccaaaagcgaaactttttttcttttagcaatggctcaatccaacccttttaagcattcttttgttctttttttgttcaacgctctcgtcattgtaatcgccatcactttggcggaaaaaaggccaccgacgcggagaatgccatcgacgcggacaat

SEQ ID NO: 42898 - DNA, 959 bp, Heterodera glycines
gatccattcaaaggggaaatgagtttggaatgtttgttcttagaaagtgaattccataatgctttcccttgggtcaccaattggaccaagctttcataagcacaatcattttcattcccagcccactggcggggaaaattttgtcaaataataaaccctaaataaaagtggaagtcagcattaaattagagcttattaaatgtgatcaaggataaacaaatactcgttaaagctttcttgtcgattaccgtcttcaaagagtaatacaatcaattgtgtgtctagcatttagcgcgttaaaagccaaagttcgtagtggtcgtttctggcattatgcttagcattttatttaaaaaatgagaaaataaacatgtgtggctggtgattacttattcccactgttgtctgcaccttttcactccggctttatcaatttttatatttctcattgagaaatttggcagtctaaaagcattctgcacacattcaaaatgtcccgtgatgtcagttcgacagagaaattgcccctttcacagtcgtccaatcctcgcactaacagtcgcactctcgtcgcgtgaggaggcgcgggccatagtccacaattatccgttctccggtgaagaaggggatgtccacatcaagtacaagttaaataagtcatatttaaaggccggaaatttcaccgtaactacaagttgcgccgcgtgaaatatagagtgcgatcatggtaacttgtaacatggcatccaaatctctcagaatggtcgtcaatcaaacgagcaatatccaccaaactgggtctgcctccgaaacgtctgcgccgaaacgaccccgacccgacccataattcctaattggcttaattatcaaaaatttaattaattatttgttttttaatttaccctttttggtttcgaataatctgcgctttttcttcataccaatttgctttttacatt

SEQ ID NO: 42899 - DNA, 764 bp, Heterodera glycines
  unsure (1)..(764): unsure at all n locations
tgcaatttttgtatttgaaatcgtagtccttctacatgccatcaaacatgcgctgaatgccattaaattccgtggtgcgaatgcagccaatggactctttcacgtaagtgttcatgtaacggccccatctgtcactcgttcgtcttcacacacaatttcgtaagttttgtaggcaattggccacaaagggcgcattcaaagtgcacttccaaagcgatgtgagtgatgtttgaaggaaaaaacaaatccgttttcaacatgattggcatgggccaaattcgaatccaaaggctgtgcaaatcgattgccaattccgaagcacttagcgccgagtgggaacaaataattggattattttattccacggatgtgtttttttacgtaaaagcttccaattaatttaacgactattgattttgaaatgtaaaacaatgcttcaatgctattttgaaaaaaatgcgcaatcgccaaaatttgaccggttttaacgtatattttggaaaaaatcaacctctggatcggttcgggtgcgggattcggaattgggcaaatccgagttcagattataatcggcaccttcgaaaagcatggaccctgattttgagtcgaaaataaaaacattaacttagggacccccattctttatgattagggcatccaaaaatatggatataaaatcacgaaatatggccataaaatatggacaacaaatcgcaaaatatggacaataaaattgctaaaatctcnaaatatggacataaaat

SEQ ID NO: 42900 - DNA, 1411 bp, Heterodera glycines
  unsure (1)..(1411): unsure at all n locations
aaaattctcctccgcaacaatttccttgactaatttttcaattacaaattatacccaaaccattttaccagtgtgaatttatcatataaatttcgttgagaattttagaaccgttactaatcatggattaattgttgatatgccacaaacaagcagtccggataccaaatctcaatttgccatcaatgaaaagcgaagattgtgaacaatgcctcattttataaaattaaatattaattatttttattcaaattgtatattttattttcgaatattcttttaaatcttttcacttttgggtaattttaaacatttaattttgttccttttatcatttcagggtatatgtctataaggcttaatgtatacaataaaaacattttgttattttcttattcgattgaattttgaacttatttttgtgttaaataactgtagagctttgtttttgtttaaatgataaatagtttattttgttaactttttatattttaatttttgctttcctttattttaaaatgctgaccttatttttttatttttaaattattttcaacaaattaatttggcatagaattttttcgtgatataataagtgtattttcaaaatttaatatacctaaaacatctttggaattacaataaatttttttcatctttttccatttaaaggttttcttggaaatgtaaataatatttattagtaaaatttatcactccatctgcagaaaagtgctgctttcaaggggtcaaaattggaattttttgttggccccgccgggcattaaaaattttttgcttttaaaaattgactaaaatggcaaaaatcattcatttatggtgaactaatttcactcaaaatttcaaaaaaaaatttcccggcgccgccggcccttttttaaatttatataaattttgtttctgggagaaaaattcaaaaaataaaataaataaaagaaaaatcaccattttttctacaaattctccgctaatattttcatccattaactccactttaaaagttccatttgaaaagagtgataaaattgcttcataatattttaagaaatgattttgttaaaaaatattaaattaattatttaatttaattaaataaacacatgaattattttaaataagttttgactaaaaattttatgctttgaataatcattttcttacttttttcttttttctttttagagcatattatcatgactagaaggtgtttatttgaactgaaatggattggtggaatattaataaattatgatttgattcttacacagattaagtaattggtgttcatcgtaggtttggtcttanaaattgcaataataaatttttttttttttgcaatacaaaaaatgaagtcaaatgctttacattaatgtattanattttttttatt

SEQ ID NO: 42901 - DNA, 829 bp, Heterodera glycines
  unsure (1)..(829): unsure at all n locations
aattttcctccagatgaaaataccnaggaggaatttaccattgttcacagacgataatggtatattgaggtgtaaaggaagaattgaagaaggagggtttgattataatacggtgaatcctatttatctgtctcaccagataccgattctcgatttgcttatttctgacgcacatttggaaacagaacatggtcgaaaatctcagactctcaattatctgaggaagaaattctggattccaaaatgcagaagaatgattacaatggtcattaagaaaaatacatatacaaaatgtgggatttgtgcaaaattagaagccaaggctttcagttatccaaatcctccccccttaccaattcatcgagttaaagggtcaagtgcatttgaaacaattggcttagactattttggtccaataacaataaaggtcaaggaagaaacacaaaaggtttggggagcaatatttgtgtgtacagtcacacgtgccatacatttagagatagtgacagattgtacggcacaaaaattcttattggctttagagagattcatgaggcgtagaagagtgccaaaaatgataatttctgacaatgctagccaatttgttctttctcataagatattggctaaaattactgaagcacattggagaaaaaataaggtttggggtcaaattcagaccagacaaagggaattagaagaaaaggagaaatggtcaatgatcatgaacgaaagagaggtacnagaacttacagcaaataagggtatcacatggcaatttgcctctccattagcgncttggcgctccggattttttgagcgactaatc

SEQ ID NO: 42902 - DNA, 877 bp, Heterodera glycines
gaatttttttctgaaaaatcgaaaatttccagaaattctggaataactttttttgtttttgtggtataaatttcaaataaatctcataaaattctcccgattttttgctatttataaagctttaatttaccaaaatagacctgatctgaactgagttatgaattttcaaatattaggccaaaatcccgtgggccaaaaaattgccaaaaaataaagaatttttaaaaaattccaaaaattatgaaacttaaaatagacatcatattcgtaatcagcaccttattttaccccagaaaaaatatttttcacccccattttcaacccaaaaaaaattttcgaaaatttctagggggcctagctcgaaaatttttgaaaatttccggccatatggcacaccattcgatagagcttaaaaaactcaacaattttgccctaatgcgttttttcgataaaaccgacccctgacgagttatgggcccgggactcaaatgtcccgctcaggccaaaaaaattttctatttccgggaaaaaatcgaaatttttccgaaaaaaataccagtcgatagagctcgaaaaactatgttttggaagtggtctccgtttttctgggaaaattcgttaaaaaatcctaaaattcaaaaaccaaaaaaccgttttttaggcctagctcgaaaaattttgaaaattttcgaaattttaaaatttggaaaaatcgggcttttaagctctacaataagttctgctggccaccctgcgctcaggtcaaagcctaatgagttattcaacggggactgaactggaaaaagttggtactgaaaagttgccaatttctgccagccctccaagtataggtagaggcctggaattttttttgaaa

SEQ ID NO: 42903 - DNA, 839 bp, Heterodera glycines
ttgttcatttatttttaggttataaaacgtgttcgccatggtgaatatgtaccacctgctgcacaactaaatttagacgctggccacaaaggtgaaaaaatcaaaataataaaatttcacaaaattctatattaaggcttttgatgtttgctcgacttcgcaatggaccggtattatcaaaaatgtgtacgctggtggcactttcattttggcgccgtctttgttcagtcaaatttatgttcttctatcaaagcaaaaccctatttttcacgttttttttgtatttaggcgaattaattagattttccgattacgtacttccttctcaattcagtatgaagcgatgtacacacaaatgcttcgactgattgttcaaagatggccgaatttttcacctggaaccatatcgttggactgcgagcaggctatgctgccgatgcgagaattcttcgactcttacggggttaaaatgctgccaacaacattaatccggctaaccaaaatgatcacaattatcaatgttaatcctgatttgcaggggacggatttatatgtgctaaaaaacgccaaatatgtacatatatatgtgccaaaaaaccctcaaaatatgtgctaaaaacccagaaaaggccaaaatatgtgctaaaatttaaaaaaactgctcaaaaatttctcaaaaaatctcatttttttactaatttcgctagcacaatgctaaccaaaaacattataatgctttttggcgtaaattttttctcgtcctcaaagttttactcatttttcggaattttcttcgctaaaaatcaaattttaccttaaagtgaaaaaattcatgaaaa

SEQ ID NO: 42904 - DNA, 928 bp, Heterodera glycines
  unsure (1)..(928): unsure at all n locations
ttctgggaaaagcaattaaaagatatttaaagtgaacattattttcggattgaataaaaaaaaccttcgcttttcatgaaaaagcattttggacgggaaaatttggcagtgaccaaaaaagcaattgcattttcagtgccattattgatgaatgattttgacctaaagttgaattgtcttttgaaatggttatcattactctgtattttggttaaataaaatttaattttaattttttaatttttttatatttaatttgctttcccaaatttacatttgagttttctccttctgtctgttcctaaagcagcaacaattcggacttgaatgactttgaacaatttgcacatcaattagctgcctctcattaaaagggtaattaacacaaccggagacaaacaccaaaatatcatctaacagaaaacaaatttaaataaatattttattacccttttttaaattttcatgcctttttcatcaaaaaacattttgcttttgcttaatgtgtataagccattttggccgtaaaattgtgccaatttttcatgccgaacattcgtaaattgactgaggtcacagccaacgcttttaacgaccgtacgccattcttcagtatcgtatacatccaacttaaaagtaggactccgtctgatacggtcgtttgttttgctgataatcggtgatcaatcgtgaggatatttttggacagcaaaaaatggaataaaatgatcagaaaaatggtagcacaactgagcaaaatgtggacaaggcgaaaatgagtcaaattaagcattttaaattcgggaaaacctaaaaaaagtcaaatgaaacaaattgaaaaaggaaaaagagagatttgngagagaaagaaagaaagagagagatggtaagagagaaaggagatagaagtagggaatgaggtataatg

SEQ ID NO: 42905 - DNA, 1215 bp, Heterodera glycines
ctggcaacaaaccaagccctgctggcggtccgatggcctttattcttaacggagaattccatcgccgcataagcagcatgcaggctggtacaactcagattcctggctttggccagttgtacattctggacccagtcgaggctatggaacagcgtcgaaacaaccccaggtttactggggagaaaatcacaaacgaagatgagtttgtgcagggtcaccagctaaatgagcagactcttgagatcttagaacaaatgatccaagtgtatcatcctgctgcgcaggcatataagcaggcgcgtgagcagctcactgagcttctccaacaacaaactccggaagagcttcgcttctttcgcatgactttgttgaatgagcgcagggctccagctggtctgaaagacccaaaattgcacccacaccaaataatcaccccttctacgggtgaagggatgttcgctattcatgcggaccccactggtgctcctccgcccaaaggaatttgggtagagaacaaacaagggcaattaaatgaaattgctcctttcagtccgtggactgatagtcttacgtatccattaatcaagccaatgggcgatgatggatacacaactggcattaaatatgctaagccaccatcgcgtaagcgaaaaggtgctcagaatgcatctggcctatttgacccggaagccgagtcagataatgagtcgtgcgagactcagtcaattgcatcatctgatgctgggtcagtcgcaaattcagatgctgaatctgtagcatctgtttcatcgcagcaccggcggattgacaaatccaaacaatttatctccctgcgagattattgcaagtattatctcgcaataagggatgaaaatttggagttgcaataccaccacatcctttcatgtggtggaggacttggtcagcgctggatccttgaccaggctgcaaaaattgattggcaaattgcaacatttttgcgtagacctgacatggacctgcggatcagcactccaaaaaatctgctgcagtatttggtcaaccagtacaacaggcagcaggcacggcaaaaccccaatgcccaacagaaaactgttgatgacattggcagtgttgttcggctttccgaaaacacgtaaattctctccaatattggaagaaaatgtatgaagattgcaacaccgttttgcacggtgcatgacgcgaagaagcgcg

SEQ ID NO: 42906 - DNA, 836 bp, Heterodera glycines
cgtcgttgtgctcctactcttcttccagcatgtcttctgcatcgccttcctccatgtcttcgcccgcttcttccgtcagagaactttcttcctgatcttccaacccaccaccatctgcagtaccgtcccagaatgcattattatggccttgctggtcttctgcatctgcagtctgatgaggtgtctgcgaacgacgcggtgtctgcgaacgacgcggtgtttgcgaacgacgcatcggatcgtcgatcaaccggatgtcttggtggccgatagtcgcgtcaagctgtccctaaatacagtttcatcccgcttagcttgtggtgtgtggatcttaaattcatatggaattatacgtgacaaagtgtacgaaacttattttctatctaacctcagatttgggttagtaaaactatttgcttagtgacacaccttgtcatgatttttgtatatatgtgcatctgaaaatgttttcttgcattcaattcatgatcaaatcaattcaggattaagactttaaccagacaaacatagtaattgcttgagaacatttttttatttcacaaattatttacgggatgcaattgatataaacccaccatgttgagtgactttggattttcaaaaagttacattaattgattttcataggtttgaaaaattacttattttaagattttttcaacaaagaaaattttttccgttatcaatttatagaattgccgaatgctatcaaaaattttgagctcagataacatttgaccggctatttcatatggttggaggataaaattttttaaataagttatttcaacaagcaatatttttttccttttttc

SEQ ID NO: 42907 - DNA, 1097 bp, Heterodera glycines
ccccaaccccaccacaccaccataaatgtgtgtgtgttggggggggggggggggtactggggacagatgggcagaaaaagcgccccgccgaccgatgagaaggcaccaccccaccaccacacccatcccatcaatgggtgggggaagcatttcgccatctcatggacaaaaggctggggggatggatctgtataataaaaatggaggcatcggaattagggtgggggggggggtatggtggtagggtagaggggacagagcaccaacgcagatagcaaggattatggacggaattttcagggaaaatggatgggaagccgaggagtcaaacatcagcagcaaagcaagttcggacacacaatcgaagcacccagagtattgctgaaggggtgtggggggggggggggtgaaagcagtttcacacatatataagtatgcggcatattttcctgctgttgttggcatgcgcctgttttccaacgggcatttttgagcagaagcgccgctgggcagggcacagtgataatggggcaacgggcaacttcattatcagcattcggcatgccgtgccccaccctcgcgccctcccccccccttttttcgcgtctcccactcacactttttttttattcctcacgcaatgtttccagcccagtagcaacagcattcccgtgcctgcttttaatctccttcctacacacagacaaagtgcatcatcagtttttgaatatggttaaaagtgccgggcaaagctaagccaagccaaacatgaaaattgagcattttggagcatagggaaaggggagggcaggaaaagttttgaaggaaaaaaagggcaaatttgatggatgagaaaaggtaattcgataaagaaaaagcacagcgccacgccacgccatacacagaagagacaggcacacacaaaagagaaatgagggaaaaagcagcggcaagctgaacaaagtgtgaaggtcgattgagaattgaacaaatttgaaaggtgacagcagagccaaacgggggggggcggaaagtatagagggagggagaggagtaagtacaccgaccgaccgaccaccgctttattattcgagcga

SEQ ID NO: 42908 - DNA, 956 bp, Heterodera glycines
  unsure (1)..(956): unsure at all n locations
attgatcaaaaaaggatcatgattaaataaataagaatattcaatttggcataattgatcgattagatgcatcatttggccatctgccaacctcatccttttccataactgttcgttcgtttgggaatttctcaaatattcccaaaaaatgccgaggtgagcggcactttctttaggcattttgctatcagcattttcattcgatttcgcttctccaattaaatgacgaaaataagtcacaagaaagaaatcttccttaaaaattcaaaagtctatctgaattaacgggaatttttttgccttttccggcaatttctgataaaattcatttgtaagccattcgctcatcacattgtgcactttcgctgtcagtacatctccatcttccaaatatttgagcaaacacagattttcagcagaaaaatggcacagagagtcaatgggttccgaaattccacggaagtaaactttttgcgcagcaaaaaactcaccggggccaaaagcgattggcatctggacaagaaatggcttatgggatcgaaatttaaatattattggtatatttgaaattgacttagacttcggcccaaaatgtcggccgggacaaaagctgagaatgtttagagaagccatttttagaagctgacccaaaatgccaattttaaaaattttacccaattttctttgaagggaattagatatagttggaataagatattttcggcatttgtcgcttgtatttttgaatttttcctcatcaaaaatcgccctttcttcgtccgtttgcgcttcgtaaaaatagttaaagcattttttgcgctcccttttgttcaatttcaaaaacgaatcccaaaagaagtatctctctctcggctcaattgaacgaaagtggaaaatgtgttggccatcgncattggtcgttcattctgtnccanatgatcactttgtatcgtccg

SEQ ID NO: 42909 - DNA, 705 bp, Heterodera glycines
aaccaaaaaaatcgatttttcaagtgtccgttggggtactcaaccatttatgggagcaaaatccaacgcagaattaaagtacaggctatagggaagctatcccgaaaggattcggtctccccataaatctgggcgcatcggttcggggggactgacccgaaaacaaaaaaatcgattttttcaagtgtccgtttggggtactcaaacatttatggggagcaaaaatccaacgcagaattaaagtacaggctatagggaagctattcccgaaggattcggtctccccataaatctgggcgcatcggttcggggggactgccccgaaaacaaaaaaatcgattttttcaagtgtccgtttggggtactcaaacaattatggggagcaaaaatccaacgcagaattaaagtacaggctatagggaagctattccggaaggattcggtctccccataaatctgggcgcatcggttcggggggactgccccgaaaacaaaaaaatcgattttttcaagtgtccgtttggggtactcaaacaattatggggagcaaaaatccaacgcagaattaaagtacaggctatagggaagctattcccgaaggattcggtctccccataaatctgggcgcatcggctcggggggactgccccgaaaacaaaaaaatcgattttttcaagtgtccgtttggggtactcaaacaattat

SEQ ID NO: 42910 - DNA, 939 bp, Heterodera glycines
cgccgggtggtcccactgcgtctgctcactgctgtgactgtgcgggggaaaagcgcgtttcccctcatttgtcagttggactcactcgatgtaatagggcaatctgttcatggtggaaatggcgcgttgccaaggcggttcgacgagatccacgaggaagtgctcgctgcaagggaagggatgcacttttagccgcgcttgcgttgcccgcaatcacctcgccggtccgaagtcgctgaacgccctctccagcgcggcgccccggcagccgacatttctcttcagccgctcatagcgcgcgttcaccgtctgcacttgcgagtccaagcggtcgctgagctgaatgcccgtggcctgcaagttgctggcccagtcgttgacgtcgtccacactcgtccccgcctcgtgcactctgcgccgcacttctttacattccgtccgcgcaccctcaaaacaaaacgaaagttgaaaagggtttcagagtccattggcactttcagctcctccaggcgaagttgctccacgggtttcagcgcgtccaattgctcttccaccgcactaatggccaacaaagcctcggccatcgctctgtccaactcgcccatttctctgagagcgttcgccacttgttccgaccaatggccaagttgctccttcagaaatgcccattgggtctgcagtctgttggaatccgccataatttgcatgccaatgcgacgctcttcccgctcagcttcatctaaatgaaaaaagcgaagatgggcacaaagccaacagaaaatgaaccccgactttttggagcgaaagggtcggaagagacatcggcgaggagtgcgggggcttggaggacggaccgaaggtcgtgttgcatcagaaaagtgttagccaattggatggtggactgaagcaattccaatccaatcgttggcacttttgctg

SEQ ID NO: 42911 - DNA, 861 bp, Heterodera glycines
  unsure (1)..(861): unsure at all n locations
cccccacactttttcacgtcgtccatcctccccccccccgtcatcatcagcagaggccctccgccccaccccatcccaattgcactgctgctgttgtttcttcatcgtcctcttcttgtccgtccgtcttcctttccttcatccatccattcatccaaccaccggtcgtcggccctgctctgtgcacatgatgacgacgacgccgccgctgccgaagtgtgccgctgctggtggtgtacagatggggggggggatgtacacgtagcgttttagggtgtcatcgccaacagcagcggcgtttccccctcttattcatatgtacatgttgtacatatgtgtaagtgtgtgtacgtcgttgtgtacatatagcagacagtagtcatcatcctcatcatcaacacatcggtggcagttttcgcaaccaaaaatttgctgctgattcgttgttttttgttgtttttgtctggcgtgctgattctgctgctgatcccccccttgtctttctccccgccgctgatcgatcagccaattccaattccctttggtctgcgctctctcatccatttgcccatatttattaatacgtgtggatttaccctctctccccctaccggctacttcataccaaatgaattgcatatgcatgaatcattctgagaaaattggtggagggggggggggggaggggagacggctctttttggtttgtgccccaccggccgtcgccgccgtttagaacgccgaccacgacgccgccggcgatgggaccaccgaccgacgaaatgagcgcgcgcactgcgcaacgtttcatgtaccaacgttttcttcccanaattaggggggtgtgctctttctcctgct

SEQ ID NO: 42912 - DNA, 975 bp, Heterodera glycines
ttaacactctatctatatcaacctcaagacttggagctgtgtatgtgattatctcttgtcaacttatatcagtcaaaaatgttctaatcttttttattcaattttatttatttaataaatccggtttttctattcgtttttatttaaatacagtgattcattaatttgattttttttatcaaaaaacatcataattaaaaaagaatgccaaaagcgatggaattgcaaattcaaattccaataaagtaaactgacttcaaagtgtaccgactaatcagttttatgttctttttttgaacccaataatcgccaattgaagtgacaatcagaaggaaaaggacggcacaatgtaaaaaaatgatggccatcgcattgttttgggaagtcaatgagacaatggccaaaggttgggagaaaatggggtcagacaaatcactcaaaacaatgccaaaaacggtcaaaagggcgacaatccactgaaaaaggcaaaaaagcaattaaaagagagataatacgaaaattaaaaaatattcaccgaaattacggcacaaatccatccaaagcgaaagccgacattttcatagtgccgcgcaaaaaaagtggctcggcacctttcggccataatgaaaaagtggaaaaacggattggccaccaaatacaaataagggggagcagccaaaaggaaggcgagccaaacaggggtcagcaaaagcacacagtttggaggagagaacgaagaatggaagagcatctgggaaaaggggaatgaagcaacattggttaattaattaattaattgccaacttaacatattaggtaacaaagtgttgtaccaacttgatatcggacaatggacaccccataaaaaattgcagtcaaaaaatagaggaaaacgaggttggcaatgaggatctgtccaacggaaatgcatttaaaaagataaatattattcatttttaccatcaaattgccatg

SEQ ID NO: 42913 - DNA, 1223 bp, Heterodera glycines
  unsure (1)..(1223): unsure at all n locations
aaataaancggtgaaaaatgatcaattgtaattataaactttatcaaaatcaacaaataacggtttaaatcataaaactcacccgaattcgttctgacaattcggccgagtttctgttcgcgtacggaagtccgaccatcagcacacaacggcccaactcatcggagaagttgatgccttgaaaggccaatttagtcataattatatatataaaaaatatccaaaacttcataaatttacaaatccccccccaccccccgctgccgtaaaaaaccgaaccctcgctgagttttccgccgaccaccgcgaaaaggacggcaccctcgcgggaacgtgcggactcacaaaatgcgggccaaatctgctgctgtgagggtttcaaaaacaaattaatatggttcgactgtttttccatttttgaatttagttcccttttttgcttctcccatttctgtttccaccatttgcatttgctgccgtttccctgcgccatttttcgccgtctccgccgcctctttcgtctccacgtgaatccgtttgacactttgaagctgttcccattggcccgtggtgcgcaaatggtgcacaaaagaggccaaaaaggcgtaggaggggaaaaaggccaccgcgccgttgggcaccgaacggagcagcgccagcaaagattgggccaccgcggtgagcgcctggggcgaaccgcgcgcggaaaattgcaaattcaacggctgcgcggcgccattcggaccattgcctaaggcggggacggtttaaagcggcgtagggggggggggggaaatcgaatgggaaagagatgaatcataagggaactgatcaaagtgataaagaacacttgatagcagggatggcattccaaggcccaaaaatatttggaaatcgcgtgccatccctgcttgatagcactgttattgatatggggacaaactattggtgaatgagtgagtgatgatggaaaaatgagtaagtgatcgatcacaatattgttcacacagagttagcgaatgagcaactgatcccggcttctcggttttccggatcagtgttgcttcttcttctctatctcagagccaaagattataaattgtttgggaaatttgcctagtgatcaaacattgaagaaagttatcgatggttaattaagtctctgatcagtgaggtaaagcaacctttaaacccgnaaaattgaatggcaattggtaaaatca

SEQ ID NO: 42914 - DNA, 1561 bp, Heterodera glycines
  unsure (1)..(1561): unsure at all n locations
agcagatcctgaaaatattgattttttagtgcaaccgtaccacactctgtggcttcggtatacggtagccacaattcaagcatttgtggtccaaaaatccggcatgggaaaatcatggcagccaaaaattgtatgaaattatggtgacaaacgccgccgggcatttaattattttccccatggcacagtaaaatccatgtgatacagtaatttaactatgacacagtaatattctcacccacgctacagtattatccctgtgatagagtcattttattatggtacaataaaatattctaatgataaaatatcctcagagcatgttcatgtcaccattttcacttatggtacagtaatgtccctgtaatacagtactatacaacaacaatatattctaatggtaaaatagcctcagggcatgtttatgtccccgttttacagtttctacccaccttattacagtaattacaacccattaactcagtctgatctgaccaattcttgccaattgttacagtaggggccgtcccataggtacagtaagatccccgggcccgactggcttttccttgcttacccgctcccgtcgtgtccatttgcgttgtaccgcgtcataggccaaatagggcgcgttgcggaacagctcgtcaacatgccgtagacggaacgcacagatgacggagtgccgtaggaagttgaaatcggacacaaatgtggcatagatcagcgcgtcctcaggggctgtggaaggaaaatgattttaaagagtgagcctagagtgggtggagggagggataaagcaatctcgagaatgaataggtatcagtttcgagaacttagcccgggcgtgaccgaaaaatacgtcagtggaaaatgcgtcagtaaatcgaatttcttgatttataacaatccattatagtaggattttttttttaagattttggtaagtttttaaaatttaataaataacaaaaaactaaaaaaataaaaaacacatgaaaatggaaatttgattttataaggatctcataataataataaactctttaagtttttcttttttaaaaatctttttatgaataaaagtcttaattttgtactctcgcgaaatggccgagaacatgttgcctcgagagtgccaagagaagcgaaaagcttgttactaatgccatcctcaccgacgtcgccggcggcaccgccgccatcgctgctgctgctgatggccaccaactcgtcaaaatagaagggccggctccgctccggcaccgagcagttcagccgtgccttcacaaatgttgaccattccgcggccgccacccgacgcggcacgcccgcgtccgttttgcacacgcgcgccacgcgcgagtaggcgcccggacggaactccgcggccgcctccgccgcctcctcgtggaagaagaaatagacgtactgcaaaaaatggaatttgttttatttttanatatntggcgttttgtcttccctcgcntacaattttttctttctcaccaaatgaaatcattcttggtatgttcaaagcatttgataactctattaacta

SEQ ID NO: 42915 - DNA, 1062 bp, Heterodera glycines
ttgaaaatgtttattaaaaaatttaaggatgaaatttaattaaaataaatccttcagaaaaaaaatcaatttatttttctaaataaataaaaaacattgtcagaggcagtgcctgccgaaaaaaagacaaaaaatttttcgaaaaaaagctaaaaaaattgaaaatttaaataaatttacaagtgaaaaaaggaaaaaaagcttacaacactttcgattcccaggacgtctccgttccaagtactaagaaggcccaacgttgcttaacttgccagacggacgggatggcgtgctttcaacgtggtatggtcgtaagcaaaggaaagcaatgaaagtaatttaaataggcatatttaaaagagcctatttttttgccttttcacaagagaatttattaaaaaaggcaaaattcgccttaaattaataaggtgaaagtttgaaaatgtttattaaaaaatttaagaatgaaatataattaaaataaatcaaaaagaaaaaaaacatttatttttctaaataaataaaaaatattgtcagaggcagtgcctgccgaaaaaaaagacaaaaaatatttcgaaaaaagctaaaaaaattgaaaatttaaataaatttaaaagtgaaaaaggaaaaaagcttacaacacctttgattcccaggacgtctccgttccaagtactaagaaggcccaacgttgcttaacttgccagatcggacgggatggcgtgctttcaacgtggtatggtcgtaagcgaaaggaaagcaatgaaagtaatttaaataggcatatttaaaagagcctatttttttgccttttcacaagagaatttattaaaaaaggcaaaattcgccttaaattaataaggtgaaagtttgaaaatgtttattaaaaaatttgaggatgaaatataattaaaataaatcaaaaagaaaaaaaatcaatttattttttctaataataaaaaacattgtcagaggcagtgcctggcgaaaaaaaacaaaaaatttttcgaaaaaagctaaaaaattgaaaatttaataaattttacagtgaaaaaagaaaaa

SEQ ID NO: 42916 - DNA, 1547 bp, Heterodera glycines
accagaaaagagaactctggctcggactccacacgacgtctgcgagttcatttgcgttaccgcgcaaaacagctcttgcgaaccgtcatttccctagcctggcgtgggaatgttaacccacttccctttcggcaaccggatggaccaactgcgcaagcacagaaaagtcgtcatccgtagtgtgttacggcgttagccggtgccttaggatcggctgacccacattcaactgctgttcacgtggaacccttctccacttcagtcttcaaggatctcacttgaatatttgctactaccaccaagatctgcactggtggaagctccggccgggcccacgcccaaagccttcaacgcaaccaccacgaccctcctacacgtcatggccagactacgcgacaagcacgtgtacaagccaatgacggtggagtataggtggcccgctccagcgccatccattttcagggctagttgattcggcaggtgagttgttacacactccttagcggattccgacttccatggccaccgtcctgctgtctatatcaaccaacaccttttatggggtctaatgagcgggcactttggcaccttaactccacgtttggttcatcccacatcgccagttctgcttaccaaaaatggcccacttggagctctaaacattcaacgcctgggttcagagtcaagcaaccctggcttcatacccatttagagtttgagaataggttaaggacatttcgtccccaagtcctctaatcattcgctttaccgagtataactgcttaacgagctccagctatcctgggggaaacttcggagggaaccagctactagatggttcgattagtctttcgcccctatacccaagtcagacgatcgatttgcacgtcagaatcgcttcggacttccaccagagtttcctctggcttcatcctgctcaggaatagttcaccatctttcgggtctcagcgcatacgctctgtctccgccccatcgcatgcgatcgagacgggactatgttgcgccccaacaccgcagtgccagggatcacacatcagctccgtaagaagccttcactttcattgcgcctttgggttttgaacacccaatgacttgcgcatacgctaaactccttggtccgtgtttcaagacgggtcgaacagatgaccggcttttacaccgagaacgcacaagtgagagcctgagctggaccgaactggttgctggtacgtgtcgcacgcgaccgccaccgacccccagctcgagtcaacacggacccgaaaccattgcacaattcacccagagtaaacagcactcccccgatccgggtaccagaccccaaaaggctggcctcaagaccgagctcacgcagctactccgagcatctcagcgcactccgcctgcaaatgccccattcgccactgaacagaaggacagcaaaccccagtctggaggctagcagtacaacgtacagcaacaaacggggtgaatgcagaccagatacgccagctctgtccgtttccacctcatcggtttcacgtcctctt

SEQ ID NO: 42917 - DNA, 952 bp, Heterodera glycines
tcaaatagattttttcacacggtcattgttttccctgctttgaccgacgaacgacagaaggcggtcatttgcgatgatcattactgcttcaagttaatcaaaaacaatatcaatgttatcgttattcgatgcgaacacgaccgctatgaagaggcggttgcagcagaggactggtttaaccagcagacagttgaagaacatatggaaagcatgataaagttatttatatttaaattttttatgtctttggtaggtttcaaaatagttttaacagtatctttcttctctcataaatatactcacagtacagtaagaacgttgcttaacttacctgaatatatggaatagcaaaaataccaaataaactagaaaagttcaaaattttgtgattctcaacagtctaaataaaattttttctattaagggaatggctgaaaaccaaaaaggatgagccgctcattacactcgcgattcccatgtacccacatttatattatcgtagcatggtcttgctacgaaatagggccattcctcgagccggaaccacaattacattgggtgaaacgaaaattttaatttaattttttaatattttatttttgaaaggtgttacttcgaccagaatcagttctgctagggccgaacggagtttcaataaaatgataatcacagaagatggcatagaagaaattttccatgttcacttgctcgtgtgagttatgcgacaaagcagaaaagtcaaccgactgagcaaatatcttctatcatttacttgttcaccaaaaaattggtcaactaaatccatctatcttccttgctatatttacataaatatgagaaccgaaccaccaattttattttggaaatttaataaaaattcttttgaaagttttaaatttaaaatcaaaaaattgaggttcgggaaaatggaaaaatatctaaaatttatccc

SEQ ID NO: 42918 - DNA, 1051 bp, Heterodera glycines
cgaattccccccccaaacgaaaattaaaacgtttaataggcaaatttcgtaacaagtagcactcaaatttccaaaaattttttccggcggcgcctatcggcaccgccggacctacattttccactattgttacaagttttttgccctaaaacggccaatatttggtcatttttagtgtaaaagtgcagttgttacccagcagcaactattcaataatgaatgaaatattttggaaagaacgaaaaaaacttataaataagacacaaaattttatcaactaataaatataagaaattataatatcaaatacaaaaaaaacataataaatttaaaaaaagacattttcaaggagaaaaaaatgaaaaataatagctatattggcaaaaaaatttgattcattataaaaataaatttataaacaaaatatttaaacaaaaagaccaataaaaatgatttaaaataaaatttcaaaaaatattaaagcaaatatttgcattaaaataaaagaaaataataataaaagaaaaaacatatttattaaatatttattttttatgttattttaactaatgatttttaatattacaaaaatgcaaatataagaaaattgtcagcagtaccagccaaattgaatctagacaagagatttatttaaatggttaaattaataactattgttgttaataattgtttattgtacattaaaatagtaggaaaatcattaaaaaaagactaaatatataaaatttatcaagtgagaaaataaataattaaaacttagaatttaaaaaacaaagataattttaataaaaaaatagatttatcttgattttaactcaatatttctaaaaaattattttttcacttatttttgtaataataatttttttgcaaataaaatttctttttatttattgttctggatagaccttatattttgataataagacaaataataaatctggataaaaacatatcattacagcaaacgcaaataatatagttgaaatagcgagaaataattatttacaattcaaattaaaaaaaataa

SEQ ID NO: 42919 - DNA, 999 bp, Heterodera glycines
  unsure (1)..(999): unsure at all n locations
ttgcttttatatttccgcacgggttcttagaaaagagccagaattagcataaaattaacgacacataaagtgttggccccagtgccgtacagaggctgcaaaggcgagcagaagacttccttgcttttatatttccgcacgggttcttagaaaagagccagaattagcataaaattaacgacacataaagtgttggccccagtgccgtacagaggctgcaaaggcgagcagaagacttccttgcttttatatttccgcacgggttcttagaaaagagccagaattagcataaaattaacgacacataaagtgttggccccagtgccgtacagaggctgcaaaggcgagcataatacttccttgcttttatatttccgcacgagttcttagaaaagagccagaattagcataaaattaacgacacataaagtgttggccccagtgccgtacagaggctgcaaaggcgagcagaagacttccttgcttttatatttccgcacgggttcttagaaaagagccagaattagcataaaattaacgacacataaagtgttggccccagtgccgtacagaggctgcaaaggcgagcataatacttccttgcttttatatttccgcacgagttcttagaaaagagccagaattagcataaaattaacgacacataaagtgttggccccagtgccgtacagaggctgcaaaggcgagcataatacttccttgcttttatatttccgcacgggttcttagaaaagagccagaattagcataaaattaacgacacataaagtgttggccccagtgccgtacagaggctgcaaaggcgagcagaagacttccttgcttttatatttccgcacgggttcttagaaaagagccagaattagcantaaattaacgacacataaagtgttggccccagtgccgtacagaggctgcaaaggcgagcataatacttccttgcttttatatttccgcacgagttctagaaaagagcca

SEQ ID NO: 42920 - DNA, 1115 bp, Heterodera glycines
aaatctaaaaaagcgactgacttcactttgtacaatctgaccatctcttttcgtctgatctttcctaaacacaatcgccacgaagtcatcgaaaagagaactctgagaatcagcacagatttagcaaaaatgacagacaatttgtaggataataatgctcattgtcagaggacataaaaaatcaaaatagaaaagcacttttcaatttacgctttttcaatgaatggaggaaataaatgtttttcgcatgcaacaattactaaaagcaacaatattctaacaaaacagtaaacgtttcccgtttttggatctgatcaaaaatcaaatgttacactagcaaaaagatcagattggtggtgctgcactggatcatcatcgaaatcatcttctggggattgccccgataaactccgctcactcaaacactcatcagctgctgtagccgatctttttggcaatctgaaaatcgtgggcattacaattacaaattggcaattttgtataataattaccccctccgtcagttcttcgacggctctcagcctctgttccaacgcattgagcaaattggccaaatccgcgcatttcgaattgatttccgccacttcttgacgaaggtcaatcgaattttggtgactctctgtgaaaacattcaaaaatgtttttttgtattttctcacccaacgatccgtgcgaaggaccgagcgcattttcaacagtttttttggcttggccgatcatttcttgcaatttactgcgtttgctctccccgtttttcgcctgttggacattgttttgtttcagattttcagcagcctttttcccagaattatctaaattccgtaacttgattacctaattacctttacttctttgagaaactcttcctaaatcatttgaattgttttgtcctaccgtccgccgttttcttcccacttttctgtatttgctggtgcttttcagcgtcttttggtcggttcgtgtcgcttcggattaattcgggtttaatggctgaatacaaaggtttgtccttgtaataaagctggtcagctgcttttattactgaatttaatcgttctagaaaaaatcgtcattaattacctgagaattacaaa

SEQ ID NO: 42921 - DNA, 867 bp, Heterodera glycines
taggcttagaatcaccttttagtatttcaaaaatgaatttttgatatatcttttttgaaaaaaaaattcgaattagggatacattttcaaatttttaaaatttttcacaaaaaatttctataaattctcaaaaatcctcaaaacacgttaaatgaaaatatgtacgaaaaattgcgaaatatgtacgaaataagtccgaaatatgtataaaaatattacatatgtaatatgtagaaaaaccccgaaatatgtaaaaatatgtaaataaaagtccctacttttgtttgcaaacacaaaaaagaaagtgttttttctactaattaggctaaggagaatccaggaaaaaatatgtatttacaaaattcccagccctaaacgggcaacgacaactggtcaatgatataacaatcatcatttttaaaataattttcatacaacgaatacaacaaacatttcgggccaggtcgttttcgcgctgtcattttcgcgcaggcgtcgttttcgcgcggggatccttttcgcgccagcgctttttaagcattagaattgcgaatatgcttaaagtaaaataaaaacaaaaaaatttcttataaaaatttataaatttaacaaactaaggttaaatttcatgtttcgggaaataccactgaaaaaattgataatggtttcgagactcaaattgacattggcataattatgatcattttgtgggacgaagttgtcataattttgataaaaattcattttgaaaacttaatataatctacatattaagtttagaaatccacaaaaacccatatttgatcagcggcataaattaccccaaaaaattattcttcgaaaatttttgagtgaaaaaatttctat

SEQ ID NO: 42922 - DNA, 1132 bp, Heterodera glycines
  unsure (1)..(1132): unsure at all n locations
taattgattcgaatgttttatcgcggttaattagagcaacgaaaanttggttgaatcgtgaagtttatcatttctactcactttctcaaattgtgnataaattgcaaatatattntccaaaagtctgttgacactttctgaaaataaattctatactcatgtattttccacttattagattttgcaggcttattgctgcatgttatttgacacttcttcaaaataacctaagccctttattcgttcaaaacagcatctttgttgtttcgctttgattaacaagcccgatgataaatagctcgagcgcaaaacgcgtgcatgtttggaaagtatcgttcataccaataattgagggtttatttttaaatgaaattttatgataaaccttattatctcagaagctatttaattgattcgaatgtttttatcgcggttaattagagcaacgaaaattggtttgaatcgtgaagtttatcatttctaactcacttctcaaaattgttgataaattgcaaatatatttttccaaaagtctgttgacactttctgaaaataaattctatactcatgtattttccacttattagattttgcaggcttattgctgcatgttatttgacacttcttcaaaataacctaagccctttattcgttcaaaacaccatctttgttgtttcgctttggattaacaagcccaatgataaatagctcgagcgcaaaacgcgtgcatgtttggaaagtatcgttcacaccaataattgagggtttatttttaaatgacattttatgataaaccttattatctcagaagctatttaattgattcgaatgtttttatcgcggttaattagagcaacgaaaattggtttgaatcgtgaagtttatcatttctaactcacttctcaaaattgttgataaattgcaaatatatttttccaaaagtctgtggacactttctgaaaataaattctatactcatgtattttccacttattagattttgcaggcttattgctgcatgttctttgacacttcttcaaaataacctatgccctttattcgttcaaaacaccatctttgttgtttcgctttagattgacaagcccaatgataaantagctcgagcgcaaaa

SEQ ID NO: 42923 - DNA, 205 bp, Heterodera glycines
tctggagctggtgctgcgcaccgccgccggtctgaaagccaacccgcagccggaactgttgaaacacaaggtgatcgccagctgcttcttcgaagcctcgacccgtactcgcctgtcgttcgaaacctcgatgcaccgcctcggcgcctcggtggtgggcttcgccgacggcagcaacacctcgctcggcaagaaaggcgaaacc

SEQ ID NO: 42924 - DNA, 994 bp, Heterodera glycines
aaaatggctatctcttttttttgatgaattttatacacatacaaatgctctcgagcatgatagggagggcggtgcgcaatagaccttttattttttgagggaatttttaaatttatactctatcccagaaaaatgtctatctctttttttgagaaattttatacctcacaaaagcgctcgcgtatgagacggagggcggtgcacaatcgccattttatttcacagaggatttttatatttagaggttatcccagaaaaatggctatctctttttttgataaattttatacacatacaaaagctctcgagcatgatagggagggcggtgcacaatagaccttttatttttgagggaatttttaaatttatactctatcccagaaaaatggctatctctttttttgataaattttatacacatacaaatgctctcgagcatgatagggagggcggtgcgcaatagaccttttatttttgagggaatttttaaatttatactctatcccagaaaaatgtctatctctttttttgagaaattttatacctcacaaaagcgcttgcgtatgagacggagggctgtgcacaatcgccattttatttcacagaggatttttatatttagaggttatcccagaaaaatggctatctctttttttgataaattttatacacatacaaatgctctcgagcatgatagggagggcggtgcgcaatagaccttttatttttgagggaatttttaaatttatactctatcccagaaaaatggctatctctttttttgagaaattttatacctcacaaaagcgcttgcgtatgagacggagggctgtgcacaatcgccattttatttcacagaggatttttatatttagaggttatcccagaaaaatggctatctctttttttgataaattttatacacatacaaatgctctcgagcatgatagggagggcggtgcgcaatagaccttttatttttgagggaattttt

SEQ ID NO: 42925 - DNA, 1225 bp, Heterodera glycines
ttctctcatcatctttttctgtccttttttcaatttaacatttttcaaatttcttcttttttatatacatatttgctgggttaaattttgaaaactattatgttttttgtaatataaaatataaaaattttaaattttttgaccccgacactttttggcaatttttcggagttactccgacccttacagaaatgccatctctaattattaaatgaaattttgaattctcatgattttagatagcattaaatagcctttaactgtgaacggatcatcgtcgtttttgaaaacactgtcgcatgttcgatcttgagattttccatggcattcgaatttttcaaacttttggcattttgttgtgaatttttttttggctttgcctcttcctttttaaatttatttctgagcccagaaaacattccttgggaataatgggccagaaaagaacagcaaactgcgaacagcagaaaaatactcgcattcatctgaaaatttattttattttttaattcataaatttcgcaagctgattatttgtgcttcaccgtaaaatactttggtattgaaaataatgaaaataaaaaattttacattattttttaatgaaaaaagattttttggaaaagaaagagcaataaagcaatatgcagcttattcatgtataaagttgtattttttttataatttaagcatatgatcccaatttttggcaatcaatttgccaactctgataaagcgattatgcaaaaatttaaaaagaaatgccctcctaaaattggccaagcaaatgcttcatctctgtttaagaatatgatgccaattttggcaatcaatttgccaactctgataaagccgttatgacaagtttgaagaaaatttgagaaattatacattcaaattgaattgccattttattatttattgcatgatttttggccctattttatggcacatatttcgtgatttatatccaaatttgcagcgctctaatcattaaatttataaaatttagtaaaaaaaagtgctcacgctgctcagttttgccaactttcttccaggtggactggttgaagtcgcgctgtgaggcgcatttgttcattgtgtggagataccattgatcgaccgtgtgaatctggtcgagaaatatcagcttacaaattttaaagtgcctttttcatttaaaatttttcatcttttaaaattttttattttaagaattttgttt

SEQ ID NO: 42926 - DNA, 1069 bp, Heterodera glycines
atagaaaactgaagatttaataaatttgagagttcaagaaatattttcaaatatttctccttagcggtcattttatttggtagtccacagtcggaattatttccgataggtcgtctaaaatattccaatagaaactgaaagattcaataaatttgagagttcaagaaatattttcgaatatttctccttagcggtcattttatttggtagtccacagtcgtaattatttccaataggtcgtctaaaatattccaatagaaaactgaagattcaataaatttgagagttcaagaaatattttcgaatatttctccttagcggtcattttatttggtagtccacagtcggaattatttacggtacgtcggctaaaatattccaatagaaaactgaagatttaataaatttgagagttcaagaaatattttcaaatatttctccttagcggtcattttatttggtagtccacagtcggaattatttacaatacgtcgcctaaaatattccaatagaaaactgaagattcaataaatttgagagttcaagaaatattttcaaacatttctccttagcggtcattttatttggtagtccacagtcggaattatttacggtacgtcgcctaaaatattccaatagaaaactgaagattcaataaatttgagagttcaaaaaatattttcgaatatttctccttagcggtcattttatttggtagtccacagtcggaattatttacggtacgtcgtctaaaatattccaatagaaaactgaagattcataaatttgagggttcaagaaatattttcaaatatttctccttagcggtcattttatttggtagtccacagtcggaattatttacggtacgtcgcttaaaatattccaatagaaaactgaagattcataaatttgagggttcaagaaatattttcgaacatttctcattagcggtcattttatttggtagtccacagtcggaattatttacggtacgtcgcttaaaatattccaatagaaaactgaagatttcataaatttgaggagtcaagaaatattttcaaatatt

SEQ ID NO: 42927 - DNA, 1160 bp, Heterodera glycines
gctcgagctgctctttccaatggtcttatcccggtctcgatccgtgacgactcaaaaagttatgaagtgaaatgtgaaatatgttttcaccacacgggattttttctgaaacccatcggaaccaaaaatctagggtttggtataagcgttttagaaattgcggagaaaaaagcttcgatattgagaaaccaagtcaagtccagaaaagaatattttaaaacgaattcgttttggtttggcattatgataccgaataacattcggaaattatggaaacaaaattggagaaattcgaataattttttgacttcaaatttttcccagttttgattgggttttaaaatagtagtttggttcagaattttcccctctacaaaaaaaaattataatagaattttttattattaattcgaaatcgttaatttatttgacaaatccaagacttaaaattgggagaagcatggggctgtggctgaggacccaaaatggggccccattggggaattaaacatgatttctgaaaaagtccctgaaatgtcgattttttctttccatatcttcttgtaaagctcgagctgttctttccaatggtcttatcccggtctcgatccctgccgaactcaaaaagttatgaagtgaaatgtttgttttcgccacaattgggagaagcatggggctgtggctggggacccaaaatggggccccattggggaattaaatatgatttctgaaaaagtccctgaaatgtcgattttttctttccatagcttcttgtagagctcgagctgctctttccaatggtcttatcccggtctcgatccgtgcagaactcaaaaagttatgaagtgaaatgtgtaatatgttttcaccacacgggattttttctgaaacccatcggaaccaaaaatctagggtttggtataagcgttttagaaattgcggagaaaaaagcttcgatattgagaaaccaagtcaagtccagaaaagaatattttaaaacgaattcgttttggtttggcattatgataccgaataacattcggaaattatggaaacaaaattggagaaattcgaataattttttgacttcaaattttttccctagttttgattgggttttaaaatagtagtttggttctagaatttttccctactacaaa

SEQ ID NO: 42928 - DNA, 1147 bp, Heterodera glycines
atagccggctcatgttgacgccgacgatggcgaaaagcgaacgcaaaagggcggcgattattcgccgcggcggaaagattcgcttgggcggcgaaagaagctgaaaataaagaaaaaatgaaggttaattgggatgaaaaagcgtttttattaaatataattaccagttttggctttgacggtgattccgatggccaaataaatggcagtggtcacgagatttgtgagcaaattggaaagagcgaaaaatgcaacggatggaccctaaaatttaatgaattccattttaaaattcaatttaaataaataatttttatttttttggacttggacaatgtcgacgatacatccgctgatcatcagtcctttgagctgtttagcagtcaaaaagagtgtgcaaagtaacgcagcggagaacagagaacagacaaaagtaatcgcgcccaaataaaagcgcaaattaattttggagtgccttttttaattggataattaagtcaattaatttgggatgtttttttatgccttacttttccgggaaaagaacacaaatgagtcggtcaagcccagtgaaaaacattgaaatggcaatgccacctaaaattggcacgatttttgattttcacttttaaatttgtcccacccattccaaagacggaaagtgccgcgaaaagtgcggccgtttgatattcgatgaaatttaagcccgaaaaagcgacgaacacaaacagaaaatggccatgctgatggagcagttcgaagaaagagcaaagtgccagcagaaaattggcagtgccattcaaagccccaaaaaaaggattagaataattgaaacggaatttaaaatataaatgcggactttgagcgaattgtcgcaaaaataacgcaaaaattgaaaagtatttcgcaggcggcgacacttctcaaagggagggcacaaccgatgagaaggcgactcggacgagcatctttgaactcggcatacagctgaatatactcgtttggtttttaacccaattattataaaatgactttctcctactgaattattaatgtttgtgtcgaccacagccattggaaattttttctgaatttatccccaaatgaattcaacccatttttttctttattttttaagcgccgcttt

SEQ ID NO: 42929 - DNA, 989 bp, Heterodera glycines
  unsure (1)..(989): unsure at all n locations
aagtaaatttttaaaaggtaataatggggatccaagggcaattatagaaaactaacgaaaattattattcataatttactttttaaaacctatggaaattttgatattaataatataactattaataatataatatcataagaatgattaattatgaacaattcttatgaattttattctgttgatatttaaattaatcaattttattttatttacgtcatagctctcctccccctataattaatctttatatatatataaatcataattacttttttaattgttttacgtcatctcaccctatgtaatatttgtgcaaaattaaaacaacagtttttaataaatacaagtcgagaaaccccaagtgtcacttaaaattattaaataacgtagttatatcataaaaggggagttgaaaagcaatttaattaataaaataattataaatgtttttatctaaaagaacattaacaaaaaagaaaaaccctaatctctaattataattatccagctaaactaatacaaaaaatgaaatttattttttttatcgctatatttctagatatacttaataggtggctaaatgtagtttaaaaatgctgtttaatgaataatgatttgttaaatcttgtaagattttgccaatcaattgcagtgatgtttcgaatattattatttttaatataaatattaagattttatttttatgtatacttttgttaatatatttttaaataaatattattatgtagctttaaattatttatatgaaagaaattaagttttctataagattttagaattaaatttgttataccagcaaagatcattttggttcgaatatactaagtgaaaaatataatagtaatattagaaaatttattatattcttgattaataatttttttannattattagctngttgatataaaataaatattttatcgangtatttgaaaatttatttgtattttttaattttttcctt

SEQ ID NO: 42930 - DNA, 1021 bp, Heterodera glycines
agagcatttggcgtaaatttttgcccgctatttcaaaatttacactgaaaaatgcctttttgtattttctattttgatatgccataactcgtttcattcccaacgaaactgaacaaatttggtatctaaaaaaagtttttgaaaatgggaatctttttctaagcgaatgttaagtaatttgtcatctcagaaaaaagttgtgggaatttcaaacttttatcatgttataactcaagtcctaggcagctctttctaaccaaaatgctaaatttattcttttttctattgattctaaatgttcaaagtgattttgtacccttataaccaaaattattagaattttcgaatttatgttttttcatgtgttagagacatgaaaatagtacgccaaaaagagaaaaaagaaattcacataattttcaccaaataacttttgagtgagccttatttttgtataaaattcatgcaaaatttaaagaaaatctgtaaggcgaaaaaaaagttgtatagagcgaagtaaatgttattttttgcataaataaaatgaagagatagtacgccaaagagagagagaaattacaaagaaaaagaaaaacgacgagatagtactaggcttttctctgctcagtggggcgtacccatagtgtaacaggttcctgcgtgcgacagagaagcgaaataaaaagcaggtaaatgacacagaaaactgtcatcattatgccaaaaatcccgctaattcaaaaatttccccttccaattcggtactgcccgcgttgacagacagtgcactatttcttcttttcctccttccctcctcttgcactatttcatccccagcggcagacagtgaactatttcactgcccttccacccggccgctgccccgcgtagttagcattaaaagttcttcattgatatgtaattggagacaaattatttctactataaatatccaaactattgtaattaaaataccttaaacgacaaatcttggtacaaaaaaaaatggcaaaatcaaaat

SEQ ID NO: 42931 - DNA, 644 bp, Heterodera glycines
  unsure (1)..(644): unsure at all n locations
ctcaaagtgaatggaataataanttattggaaaaatatttctcccataaaatttgagaatgcattttaaagaaaacagtttgaaattcggaacagaaactcctcaccatccaccattccaaaaaaaacaaaacaaaagccatttccaaaaccaataaagccccaaataaattagaaccagatgcttttaataattcaaacaacaaaatctaatcgacacggttatcccttccgtcggggtccctttgccctcctccgctgacccccgcttttcacattcggcccagtgggacaactgctggcggatccattcattgctcggcgggggagggtggcggcgtaacttttgacggcaacataaacagcccccgggggagggcgagggggagaagggggtgggggggagcgcttgaagtggtgacgctgcgttcatcgaccgctaaacaatgacgggggaggcagcataagcttcgcaacgatacgtacggcaaaagcgatgggttggcggtggattataaggttttgaggcagcgggggcaggggagggggaggggaagggttggaagggtcgggtaattgtgagcgtggtaaccggggaatatgcctgctgctgcttaccccccgcccattcggtggctttactca

SEQ ID NO: 42932 - DNA, 1088 bp, Heterodera glycines
  unsure (1)..(1088): unsure at all n locations
actctccacaggtaatttgtgtgaagtgcgtaccatcctctcgccctcctntaagccaaaatgcttaaaatttggatgcataagaaaccggcttcctattgctgtttaaacgattcattcgtacttttaaaaaattggagagggaattcggggtctcttgcttttaatcatagccacagagtactcaagaaaaataattaataactttcttttcgttaagccaattaggcatttgctttcgacaaaccccaaacattggaaattgttttgccattccattaatgtttttcttcttcaaatttcattctgatttaacatttcagtctcgaaagcactgtctcattggatgagaaaaaacgagaagcggtgcgcatggctcagcgggtggcacaatttgcacgagaagtccgtttgaagaaggtagtcacttaatagctatgctcttaaatcttttcaaaaatctcgtactgtaagggaaggggaagggcggtgggggtgatgagtggtgatgagacggacacctggggagtgacagagagcaacatttccctcatttctctctccctcccacccatgcgctgtcttcgccacttgtctttctcttcctctttatccactttgtggttgagatcaattcataggactatttggctgtttctgcttttctccttactcccctaccccatccctcccccgctcttacaatgtccccgaataaattccaaaaacaattgccccccgaacttttgtatgaaattgtctttttcatcaacccccgaaatgacttgtcccatctctgtacctcctcttatacaatacgaaaatttatgtatccgcggataattaaatggaacgaattttgtcgctcggtataatttaggaggaaatttatcaccatcaaaagagtggtccgcattcataatcctatcattttttaggcactcgcgacgctggaggagacatttggacgcgcgaagaacagcccgacttggcgtgctattttggccatggcttcagctggtgctcagaacaacgacccatcttctcatcagcttcttacgaccctgtcttccgccatttgtattatt

SEQ ID NO: 42933 - DNA, 995 bp, Heterodera glycines
aaaagagatagccattttttcaaaaattttcacgatcaaatgcgctgagaaaaaaatccagaacaattagtatcggcgtcattatgctgagagtgcggtggaattcccttgactgtagaccagaaaaagagatagccatttttccaaaatttttcacgatcaaatgcgctgagaaaaaaattccagaacaattagtatcggcgtcattatgctgagagtgcggttggaattcccttgactgtagaccagaaaaagagatagccatttttccaaaattttcacgatcaaatgcgctgagaaaaaaattccagaacaattagtatcggcgtcattatgctgagagtgcggttggaattcccttgactgtagaccagaaaaagagatagccatttttccaaaattttcacgatcaaatgcgctgagaaaaaaattccagaacaattagtatcggcgtcattatgctgagagtgcggttggaattcccttgactgtagaccagaaaaagagatagccatttttccaaaattttcacgatcaaatgcgctgagaaaaaaattccagaacaattagtatcggcgtcattatgctgagagtgcggttggaattcccttgactgtagaccagaaaaagagatagccatttttccaaaattttcacgatcaaatgcgctgagaaaaaaattccagaacaattagtatcggcgtcattatgctgagagtgcggttggaattcccttgactgtagaccagaaaaagagatagccatttttccaaaattttcacgatcaaatgcgctgagaaaaaaattccagaacaattagtatcggcgtcattatgctgagaatgcggttggaattcccttgactgtagaccagaaaaagagatagccatttttccaaaattttcacgatcaaatgcgctgagaaaaaaattccagaacaattagtatcggcgtcattatgctgagagtgcggttggaattcccttgactgtaga

SEQ ID NO: 42934 - DNA, 1186 bp, Heterodera glycines
ttcgacaaacatcctgtacaccataaatcgatttcatatttagtcgaactatataaattttcaaacaatgattcatctttcttatggatagcgcatatgtctctagctttatagaaacggtcgccgaatctgcgaggagctacttttttgagaatttctatagattattattctgcatgaatccttcgcttaaattcccatttatcttataaagtcagattaaattaattactccgatttgttttagaattggtccaaatacgcttgctaatagcttttcttttcgaaaagagaggcgaggaaaaataaaggttgcatccaaatgtaatttttttttttttacattgaagcatttggatggcttgctgtttacagttggctaagtcttctttgcaagaagtagcacaacttttgtttgggccaacgaccccaaaccattcgaatagcaatcgattgggctgactagactgcatatttgcaggaatagcaatggcaggtctatcttaaaggcctgacgagttatgtttcgacaaacatcctgtacaccataaatcgatttgcaaatttagtcgaactatataaatttttcaaaaaatgattcatcttttttatggttagcgcatatgtctctagctttatagaaacggtccccgaatctgcgaggaactactttttagagaatttctatagattattattctgcatgaatccttcgcttaaattcccatttatctcataaagtcagattaaattaattaccccgatttgttttagaattggtccaaacacgcttgctaatagcttttcttttcgaaaagagaggcgaggaaaaataaaggttgcatccaaatgtaatttttttttacattgaagcatttggatggcttgctgtttacagttggctaagtcttctttgcaagaagcagcacaacttttgtttgggccaacgaccccaaaccattcgaatagcaatcgattgggctgactagactcaatatttgcaggaatagcaatggcaggtctatcttaaaggcctgacgagttatgtttcgacaaacatcctctacaccataaatcgattttcaaatttagtcgaactatataaatttttcaaaaaatgattcatcttttttatggttagcgcatatgtctctagctttatagaaacggtccccgaatctgcgag

SEQ ID NO: 42935 - DNA, 1267 bp, Heterodera glycines
cgtcgcgtcgcgccaacagatcaaagtgcggcaccccgcccagcggcagcaacaaaagccttctcccatttccttcgcccgtactttttgcttttgctcggctttcaccttttgccgccgcccccggggggacggcggcgatggaaatgcctccgaaattcggcggcgattaaaattgatttccttcacccaatttcagagggcgaaaagaagcgaaagttctaatgggagatggatatggataaataaataaatgtaaaattaaatcctgttggaagaacttatgttagtcaaaaaaaaacttacattaaaaaagggaaaagcattcgtgccaaagaagaaagaaatttttggtaaaaaaaaatgatgccaattttagtgataaatctatgttggccgagactctcggcctcggttcataaaaggatttagaaaaaaagaccaggacaagttgagatttcgaattcttgaatctaaatcctcatggactatgtatgcctcaagaatgataataaggatgaaaaattgcatgactgagagattaggttgtaatcggacagatcgagtgaagaattaggtgtccgatcattcgcacaattattactagggctggtaattatatgcacatgcatatttttttcctgaactgcgggaggcctgaaacgcatgaaaaacgtgtttctagcttgattagaagcttctagagtggatttccatttgcatatttgtgcacatttcgcgattttatgtgcatataattacctgccctactcataatggctgtattcctggatgcgttctaaaagttaatttgggagaaaggcaaaagttaatatttttttgaaaattttttgggattttaaacattggcgccgaaaaagccactttatatagggcgccgaagtggccgcgccggaaaaccccgcgccgaagtgatcccgacccattttttcacataataaccaaatcctttggtttctatcgaaattttatgtaaatgtttataaaaaagcggacataaaaatacatagggatgttgtatatgtgggtgatcgaaatcacatggaaaggactgggcactcattcgtcgcgtcgtgtgccgttttggtcagctacgggccaagtccgggttgaactgtgagttgtaacgccgctgtcggtcctcctcggcttggctttcacagttacaactttctcatcctttggctccggcttgacgaaaagctgcttcgtcttgacctgctcctgtcgctcgcgcaccattcgc

SEQ ID NO: 42936 - DNA, 1139 bp, Heterodera glycines
  unsure (1)..(1139): unsure at all n locations
caaagtacaaaaatattaatatatcaaggtaacagaganaatgagttcanagctatgaatagaagcgggtgaataaaattcagaattttctgcaatgatgnaatgagttcaaaacttgcatagaaatagttttgtaaatctgataaaattcaagttattaaaaaccaattaaatttaaaataaaaaatntaatagcatgaaaattaaatatcttatcaaaaatattaaatcataattgactattatttattaaaaaattgtttactacaaatcagttttaagatgcatattctattattattgttatntaagaaatcaaaattcaaagcaataaataagctttgggaacattactcaatgatcgactaaatctgatctcgttttctgaaataaaaaatatataataaataataaatgacttaaaagattaaattaatttagcataggtgaaattgactaagaataaaaataatttatttttgtaataaataattaattaaaagaaatcaagtgcttatttgttgaatttgttgagataagcttttaatttttttcacttataccatttactttaatttttagatatatttattgtaatcattttatacattatattctttgtttataaacaatttaaagaattaaaaactgttatttttgaggtaatttttaaatcatattttatgcaaatttgaaaaacatcctttaaaatttttttgaaggatataaacaaaaatgatattacttactaaaatgttaaagtttttagtaaaagctaacattccgcaggctcaacaattctttgttgtggactttaatgaatgtattttaataaaaaatcaaaccaaaatttactaatagaaaaattaataatttttataagtctttttatgtataacataaaacaaatgtatcagttaaaaaacaaggcatcattataaattaatatatagattaaaaacccaaatgaaaataaaattcgaagaactgacaacctaatatattattatttaattaaatgccattaaacgaatcttatttaggccctctccatgttctgagaatttttttatacttgcagcacttgggttgcacaaaaataaaactatataactatattcgacgcccttatgctacat

SEQ ID NO: 42937 - DNA, 946 bp, Heterodera glycines
agaatgcggtggaattcctattactgtgagcagaaaatgagatatccaattttccaaattttcccaaacaaacgcgcagagaaacaaattccagaacaattagtatcggcgtaattattctgagaatgcggttggaattcctattactgttgagcagaaaaagagatagccaattttccaaatttttcccaaacaaacgcgcagagaaacaaattccagaacaattagtatcggcgtaattattctgagaatgcggttggaattcctattactgttgagcagaaaaagagatagccaattttccaaatttttcccaaacaaacgcgccgagaaacaaattccagaacaattagtatcggcgtaattattctgagaatgcggttggaattcctattactgttgagcagaaaatgagatagccaattttccaaatttttcccaaacaaacgcgcagagaaacaaattccagaacaattagtatcggcgtaattattctgagaatgcggttggaattcctattactgttgagcagaaaaagagatagccaattttccaaatttttcccaaacaaacgcgcagagaaacaaattccagaacaattagtatcggcgtaattattctgagaatgcggttggaattcctattactgttgagcagaaaaagagatagccaattttccaaatttttcccaaacaaacgcgccgagaaacaaattccagaacaattagtatcggcgtaattattctgagaatgcggttggaattcctattactgttgagcagaaaaagagatagccaattttccaaatttttccaaaacaaacgcgccgagaaacaaattccagaacaattagtatcggcgtaattattctgagaatgcggttggaattcctattactgttgagcagaaaatgagatatccaattttccaaatttttcccaaacaa

SEQ ID NO: 42938 - DNA, 883 bp, Heterodera glycines
acctatcatgccttgaaatattttaaaataaattccttaaaaaattaaaaattttattataattgcaaaatgtgatcccagcaaccaacatttatgcaaaactaatttataataaattatttatttctttttcttttagctcatattaaatttgccaataaatcagaaaatttgtttgtttgcttttcattggcacatggacacgagcagccaagagctgaacgcgtgtgccgagtgcggcttcaccacccgggactgggcactgttcacgcgtcatgtggaacggcacgaaagcgccgatggcatcattaacagttggaaaagttcaaagactgtgccgacaacgcccgaggcgatggacgaaagcgtagaagcggaagatggtggtggcacagattttcaggtggaattaaatcttgtaattattatttttttttttttttgatattactgattattcttgaaaattatggattttaaaacttattcatttacctaagtatttcttggattttttacatttatactaatgactcgcaggcgcatttaagccctataaattggtccgcaaaatttttgaaacttaaaatttattccggaattctgctatccgtctgtaatacttcaattcgatcatttacaatttcctttaaaatccgctttttcaaaaattgaaaattttttctcgactccttcaccatgaatttgcaaattttcattagataatttacattcctgtcaagtctatcattttcatccctcaaccaatttttttttctcaattttcccccttccgttttttggggtcatggcagttcgtacaatgggcagttcgtacaatgggcagttcgtacaatgggcagttcgtacaatgggcagttcg

SEQ ID NO: 42939 - DNA, 938 bp, Heterodera glycines
gaatttcaagtgataatgaaatgtaaatagagaatctcacattttcagctacttaatctctaaaaataaactgcatcagtgttgtagaaggatcgggttaataatattctcagttttattattttcacgatcacccttgtgaaattctcaaaatttcagatcattatcctctaaatataaaccgtaacagtgttgcagaaatatcgacttggtaacgccaattatctccgatttattgttgtcactatcatctttgtgaaattttcaaaatttcagctcattttcctctaaatatatctgtattaagttgcgaatgaaaattgtaaatcggagattattagcgtttatcaactcaatccttccgtaacactgacacagtttattttaagtgaataaggagctgaaattatgagaaattcacaaaattggacgcaaaaatagtaaatggaagattgtttggcgctaccaattcgatatttccgcagcactgttacagtttatatttagaggatacggagctgcaattgcacgaatttcaagtgataatgaaatgtaaatagagaatctcacattttcagctacttaatctctaaaaataaactgcatcagtgttgtagaaggatcgggttaataatattctcagttttattattttcacgatcacccttgtgaaattctcaaaatttcagatcattatcctctaaatataaaccgtaacagtgttgcagaaatatcgacttggtaacgccaattatctccgatttattgttgtcactatcatctttgtgaaattttcaaaatttcagctcattttcctctaaatatatctgtattaagttgcgaatgaaaattgtaaatcggagattattagcgtttatcaactcaatccttccgtaacactgacacagtttattttaagtgaataaggagctgaaatt

SEQ ID NO: 42940 - DNA, 967 bp, Heterodera glycines
tagatcacatgcgattttcggcactctgatattttagcgctcataatgggatgtataaaggcgattgtagaaggaattggatgcgctaaaattgtttgagaagctttttgagcgtagttacgatttttacttagaccattttttgctaggcttagatcacatgcgattttcggcactctgataattttagcgctcataatgggatgtataaaggcgattgtagaaggaattggaagcgctaaaattgtttgagaagctttttgagcgtaattacgatttttacttacaccattttttgctaggcttagatcacatgcgattttcggcactctgataattttagcgttcataatgggatgtataaaggcgattgtagaaggaattggatgcgctaaaattgtttgagaagctttttgagcgtaattacgatttttacttacaccattttttgctaggcttagatcacatgcgattttcggcactctgataattttagcgctcataatgggatgtataaaggcgattgtagaaggaattggaagcgctaaaattgtttgaggagctttttgagcgtaattacgatttttacttacaccattttttgctaggcttagatcacatgcgattttcggcactctgataattttagcgctcataatgggatgtataaaggcgattgtagaaggaattggaagcgctaaaattgtttgagaagctttttgagcgtaattacgatttttacttacaccattttttgctaggcttaaatcacatgcgattttcggcactctgataattttagcgctcataatgggatgtataaaggcgattgtagaaggaattggaagcgctaaaattgtttgaggagctttttgagcgtaattacgatttttacttacaccattttttgctaggcttagatcacatgcgattttcggcactctgataattttagcgcatcataatg

SEQ ID NO: 42941 - DNA, 815 bp, Heterodera glycines
gggtcaatgccacctccggccgccaacttcgtctccttctcctgatcagtgccacctccgaccgtcatctcccctttcccagcctctgtgcctcctccggccgtcatcttcttcgccttctccgggtcaatgccacctccgaccgtcatcttcttcgccttctccgggtcaatgccacttccggccgccaacttcgtctcctccgggtcaatgccacctccggccgccaacttcgtctccttctcctgatcggtgccacctccgaccgtcatcttcttcgccttctccgggtcaatgccacttccggccgccaacttcgtctccttctcctgatcggtgccacctccggccgtcatcttcttcgccttctccgggtcaatgccacttccggccgccaacttcgtctccttctcctgatcagtgccacctccgaccgtcatctcccctttcccagcatctgtgcctcctccgaccgtcatcttcttcgccttctccgggtcaatgccacctccgaccgtcatcttcttcgccttctccgggtcaatgccacttccggccgccaacttcgtctcctccgggtcaatgccacctccggccgccaacttcttctccttctcctgatcggtgccacctccgaccgtcatcttcttcgccttctccgggtcaatgccacttccggccgccaacttcgtctccttctcctgatcggtgccacctccgaccgtcatcttcttctccttctccgggtcgatgccacttccggccgtcaacttcgtctccttctcctgatcggtgccacctcccgaccgtcatct

SEQ ID NO: 42942 - DNA, 1323 bp, Heterodera glycines
  unsure (1)..(1323): unsure at all n locations
gaagaagacgaagttgacggtaggaagtgccatccaacaggagaagacgaagaagatggcgggcggtggcggctctgatcaggagaagtagaagaagttggcgggcggaagtgtcattgaggaggagaaggagaagaagacgccggtctgaggtgccactgatcaggagaaggagatgatgttggcgggcggaggtgtcattgagcaggaggagaagatgttggcgggcggaggcggcattgcgccggagaagacgaagatgatggtggtcggaggtggcattgccgaggagaaggagaagaagatgacggccggaggagccacagaggctgggaaaggggagatgacggtcggaggtggcactgatcaggagaaggagacgaagttggcggccggaagtggcattgacccggaggagacgaagttggcggccggaagtggcattgacccggagaaggcgaagaagatgacggtcggatgaggcacagaggctgggaaaggggagatgacggtcggaggtggcactgatcaggagaaggagacgaagttggcggccggaggtggcattgacccggaggagacgaagttggcggccggaagtggcaccgatcaggagaaggcgaagaagatgacggtcggaggaggcacagaggctgggaaaggggagatgacggtcggaggtggcactgatcaggagaaggagacgaagttggcggccggaagtggcattgacccggatagtgtaaaatgcactattttcttaagaaatacagtactttttataggcaccgaaataaaagtcgacgtatgtcagcgggcctaaatcgtagacccactattccaaaggcaatacggtagcaaattttgtgctctataaaatgggcctactcaaaatttccagaaaaattttcccaaccccctagaaattttttttgaaatttacccctcgttcccagccaaaatgggctgatcagatcaccatgaaggagtgatctgatcaacttggtgttgctaccttttttgatcagcatccaaagttatgcttacctgaatttttttagatttttttaatgctgatccagagaagcaatattttaaaaatgaaatgggacaacacttttgaccccctatattttgatcaaattgtgaatatggtaaaataaatcaaataaatgtttatgtcacaaatgcaaatatggtatcattggaaagcccataaaaatgctatccnatggtatgctacttatctnngtgaattgnaaatgancatttatacgncattatttttttcaagcatgatgggacacacttatgaccatgact

SEQ ID NO: 42943 - DNA, 1078 bp, Heterodera glycines
  unsure (1)..(1078): unsure at all n locations
tatgtattctccaacttataattcgggtggtttttttgttggtcttaaattcgaaaaaaaaattagaaaagaattttccgaaaaatgggtgaccaaaaaatagtcccgacccattaggctttcgaatgacaccacgtatggcaagaaaagtctgaaaatttaaaagacaatatttatgaaacgacctaacgctttggttttttgaaaatttgccaaaattcctctctttttttttgattttccatcgaatttttccaaaatctctccccattgttttttcagtgccaatttgtccgaccaatactttgtcaaccgtcgtgatcgctatttgctgatcgaagactgtccattgttggccgacttcttcgtcgacctgttccacctcgtcggagacaattccttccgtcttttggcggacggacgcgtcgaattcaccgccggcggaacgctttcgccgatacacccggagacaggtacaaaaataggggcgaggattttataaaattcgggaaaaatttctatatttttgaggaaaaatgcatttttgggggttcggtattctttagaaatcttgaaaaaaatcctgatttttcgaaaattttctattttttatggtccttcccgcgcattcaacgccacattagcgacgaggtggacaaactgttcgccaggttcaaaacgaaagtggcgatgcaaaaagcagccgacgcgacgtcagccaaaaaaagtaaggaaaaagaagggggaaaatggaccagcaccgggtgggtgccgaacccggaacgatgggaggaatgagaaaaagggagaagggctggtacaattcattacccaaaaattaaaattttttaacaaaccctaaggatttttagaaaaaaagacctataaattttttaaaattttcaacattttttgacgatgagaaattctttgaatttttaaaaccaaaaataaatctgcaaaatttatcatttttcgggttttcaaaaagtgtgctatggtatcanattttacgtcaaaaaagcgctttttttgaatttctgagtgacagaattagaggnctgctttgccgtcatat

SEQ ID NO: 42944 - DNA, 1354 bp, Heterodera glycines
  unsure (1)..(1354): unsure at all n locations
taatcctactcgatgatcaatcatcattttaaatatctgcgtcattatttaatataatatgcaaattatatgaagtgaaaaatagatttggataatcctactgatgatcatcaattatcattttaaataattgcatcataatttaataataatattcaaattaaatgaggtaagaaatagatttggataatcctactgatgatcaatcatcattttaaatatctgcgtcattatttaaaataatatgcaaattatatgaagtgaaaaatatatttggataatcctactgatgatcaattacaattttaaataattgcatcatatttaaaataatatgcaaattatgtgaagtaaaaaatagatttggataatcctactgatgatcaatcatcattttaaatatctgcatcattatttaatataatatgcaaattatatgaagtgaaaaatagatttggataatcctactgatgatcaatcatcattttaaatatctgcgtcattatttaatataatatgcaaattatatgaagtgaaaaatagatttggataatcctactgatgatcaattacaattttaaataattgcatcatatttaaaataatatgcaaattatgtgaagtaaaaaatagatttggataatcctactgatgatcaattacaattttaaataattgcatcatatttaaaataatatgcaaattatgtgaagtaaaaaatagatttggataatcctactgatgatcaatcatcattttaaatatctgcatcattatttaatataatatgcaaattatatgaagtaaaaaatagatttggataatcctactgatgatcaattacaattttaaataactgcgagttatttttcattttcataattactttacttcattgtggaaggtttttaattactctttatgtaaataaatcgaaataataattaagatagctgagctcgtgaactaaaaagttgaccggccagaaaaatttgtgattacccaaaattttttgctaggcgcaattttctgagtntagtcaaaaatttttcgaggtttttcgatttttgcacatgtttaagttgtcgggcggggattggtgaagagcaataaaagatgcgactatgtgttgtgcacattttaaaaaaaaaattggcgcgccagcactaagttgaaggggcggaccccctttagcccctggggtgggtcggggtctcagaaagttagcgccgggggaagcatgtggttaatgaatcgggaggcccggcgctattggctattattgtagagctcaccgaggcgaacattttaaaaaaaaatttggccctctagccccaggttgagtaggtcattt

SEQ ID NO: 42945 - DNA, 895 bp, Heterodera glycines
accaataataaactaacgatttttagcataagtaaatcgttaaattatgaaaatattttaaaaaattggtatatgtttcctccgtatagacaaaggccaagaaggaccataccgctgttatgaaatttatagtgattgtgccaacaattaaatgtaagacaagaaaaaaaatggcccgaaatacccacaaaaagaaaacacgttttttctaacattttttggatgtgtactggcgtcgtacaggttcgggactgcgtccgaaattgatcccggaaactccggcttttccgggtccggacggttttttcatacaatcccaaccattccgaaaacatgaactccccgcgcattaccatccccgtcggatggcgaggccggcccacagcgcgtcgttgcgcacttggcgctcgatgtgcttgcgccacagcaatccgttgacaatgacacgactccaccggcggctgacaaactccgaggcgcacaacgacttggcgtccaacaaatgaagcacattctccgccaaaccggctgaaattgggagggggggggggacaaatagggaaaatttgacgaaaatgcacaaaattacaaaaaaaacactcacattttaccaaagtttaggaaaatgtcttttttcttcggtgtttcgagggttttattgcactttatgagtccaatcgcatttgatgagtcaaatgaattacgcataattggatttttactataacttttttttcatattcgaacaatccctatataattctacacgacaaaagttacggcccaaaaaattcattggttgattaattggacttataaattgcaataaaacctccgggttttccaattctgtcgttttactaattaattgtatgtgtacgttttgacagcggcg

SEQ ID NO: 42946 - DNA, 1013 bp, Heterodera glycines
cattgttcaactttgcgcgctctgccgggaagagtccacctgggtaataattctcaatcggtggcagggtgtccaacacagtgccataattttccgcctaagattgtattaatttttatttaatttttttataaattcctcttaccttattgaatttgtgtggaaaatatttcttgttttccacgccctcaatttctaggccaaacgtattgacaaaattggcaagttttattgggatcaacttgtaactaaaatgatcaaaaattttaaaaatatttaatattcaaaatatttacctgtcccggaaaacggtggttgtgtagactcctgttttgcgggccttcatttccaggagatggttcccctggtggatgagttcagggctgacacccatgcgcagcatttcaccataaatcagcacatgatcgtagcgggaacctttaaattttatttcttccaagtttttttttaaataattccaaaattaccggcgtgggcgtacgcgtatgttgtcaccgactccggcttctccccggcttcttcgtaccccagcatccagttgttctcggcgtcctcatctacggcatcctcttcttcttcgcattccatagactcgccgtcggtgttttcggcattcttcctttttctgcgcttcttcgcaccgggctccatgccgaggacttccgtttcgaagttcagcaaccacttggtgaaggctgccagtgggtcttcgacgaccttgcggcattccacgtccgtgtgccagaattcgaacggggaccaggcataagttcggaatcggccacaaagcgcgcaggccttctccaattcctggtcccatatgcccttttcaatgcacctggtgcaagtcacgtgggcgaagcagaagttgacctttgaatttttcaaatttaattacccactcaaaaaaattacctgatgcttgaatcgcatcagttgcgggtccggcttaaagttcgttgtacacttaaagtcaaaaaacacaaaacgct

SEQ ID NO: 42947 - DNA, 1325 bp, Heterodera glycines
  unsure (1)..(1325): unsure at all n locations
tggcaatagaatgagtttattaccagggaacggattctttcctgctaaaaaatgccaaatatgtacatatatatgtgccaataaactcctaaaatatgtgctaaaaaccccaaaaaagccaaaatatgtgctaaaaattaaaaaaaaactgctccaaaaaaagtaaatttctcaaaaaaatctcattttttattcatttcgctagcacaattgcaaatcagactcatttcaatgcttttttacgtaaatctttttctcgctctctaagatttatttttcgaaattttcttcgctaaaattcaaactttaccttaaaagtagagctggtcgggaccgggatttttgacaaaaaccgggaccgggaattttcggattgaaaaaccgggactttttggctgggaaaaccgggaaaaacccgggactagtcccggtcccggtcaaaactggtcaaaaccgggactgggtactcagttgtacccgtttttttcagtaccagtcccggtcccgaccagctctacttaaaagtaaaaaaagtcatgtcaaaaaatgcaaaaaaaaaggaaagaaaaaattgaacatttttgcaattcaaaaaataaacaaattctttaatcatcaaactcgtcttcgtcataatagttggaagtttccgctccaatttcgagcaaatcgtctactggaacctcacctttttttctaaaatgctctccaaatttaaaatcataataataaatatgattaagccgaataatggtactaatatataggcccctaaaatcgaacaattttggaaaaaatatcaaaaattgtgcaaaaaaaaatcattaacaccattcacttaaaaagattttttacaaaaaaattactaattgcgatttttttctaacttcaatgattttcagttaataataaataggagttctcaattttgggattctataattcatgaaaaaagtgggtttttcctacttgataaaaaatttatgggtttataaatttttttaaaaattcaaaccaatttttagtattttttttgtccatatttcagtgtttttgtccatatttcgtccatattttgcgattttttcgtccatttaaatccgggccttatcaaaaattaaaaaatgtatagagggggcatggatgtgngtggccattcttataagctcataagggctttcatcctacaaaagttcaaaatgatgaacatataaaattttttttttanattcgcctcttttcaagacatatgcttaagtcgcgcatatgatgaatgattcaccaccccatnctgagatgngatgaattatatgctttaattgatc

SEQ ID NO: 42948 - DNA, 882 bp, Heterodera glycines
aaaattagtcagcttttctatatcaaaatttttttacattttccactttttatatccaccggttaagaaattgtttttttttttgtttgcgcgaattgaacaaaatattacaaccgaattgggtaaaaaatcgaaatgtacaaaaaagaatgagcaaaaataaatgggccaaatggaaatgagccaaaaggaaatggtccaaaaagaaattgaaatgggccaaaacgaaatgggcaaaagaaatgggccaaaaggaaatgggcaaaaaagaattggcaaaaataaaaatcctttttcaacgaataagccccggggtgatcatttcatacgttgcttcttctccgtcctcctccatcccgcttgcgtttgagttgctcatttggtcccactccatcgcgttcgcagcattcgccctcgcttccgccgcaaactgcttgctcgcttcagggtgtcccatcaatctaaaagctccattttttacacttttaatttttttatttttaaaattttatttatttatttgtgaacagttccccgtataccagggacggtccgaggattttggcttgggggggggggggggtaccaccgctctgggcgacaaacttttttttttttttgatttttacaccacttttttgcggcgcttttttggggaacaaagaggccggcggtgtggcgccacttgggaaattttttcaaaaatttccccttcgtcgacaaaatctctcactttttaccgcatgcgatttaataaaaatttgtgatggattattaagttttttttctccgtaaaatttccttgtttctagattttttgaaatttctaggtttgaatttccttttcttttttatgagaacgacccaggggtgggggaaatg

SEQ ID NO: 42949 - DNA, 933 bp, Heterodera glycines
  unsure (1)..(933): unsure at all n locations
aacaatcttacgatatttagaaacgcaaacaaaaaatctttctagaccaaaaatggttatctcttttttctcatttttttacggcaaaattggtaccaacagttgccttctcttgtctggccctatcaaacaatcttacgatatttgaaacgcaaacaaaaaaaattcttgaccaaaaaatggctatctcttttttctcatttttttaccgcaaacttggtaccaacagttgccttctcttgtctggccctatcaaacaatcttacgatatttgaaacgcaaacaaaaaaaattcttgaccaaaaaatgtctatctcttttttctcatttttttaccgcaaaattggtaccaacagttgccttctcttgtctggccctatcaaacaatcttacgatatttgaaacgcaaacaaaaaaaattcttgaccaaaaatggttatctcttttttctcatttttttaccgcaaaattggtaccaacagttgccttctcttgtctggccctatcaaacaatcttacgatatttgaaacgcaaacaaaaaaaaattcttgaccaaaaaatggctatctcttttttctcatttttttaccgcaaacttggtaccaacagttgccttctcttgtctggccctatcaaacaatcttacgatatttgaaacgcaaacaaaaaaaattcttgaccaaaaaatgtctatctcttttttctcatttttttaccgcaaaattggtaccaacagttgccttctcttgtctggccctatcaaacaatcttacgatatttgaaacgcaaacaaaaaaaattcttgaccaaaaatggttatctcttttttctcatttttttaccgcaaaattggtaccaacagttgccttctcttgtctggccctatcaaacaatcttacgatatttgaaaancgcaacaaaaaaattcttga

SEQ ID NO: 42950 - DNA, 118 bp, Heterodera glycines
ctgaggagttgtgtgagttgtgcgctgctgtgcggacgcgggcgagcggacggaacgacgacgattttgcgattttgaggggggggggggcggggggcatgggagaagaaagttcccc

SEQ ID NO: 42951 - DNA, 1161 bp, Heterodera glycines
cttgtttgtttaaattcatttttcatttttatgaattcttgtacaatttcaatcttttctttatctgattttgacttgtagcttttttgtattttttgattaagcccaaattctttgatccatttttgaatataatttcgatttgtccccaattttttcgctattttcgtattaattttattccattcttttgttgaatattttcttcctttttgctttattttttctttaattttataatattttccaattatttctcgttttttgagttcatttcgtttttcttcttctttttcttgccatttttccccaaatatttcatcaaatgatttctgctgaagttttttcttttctgattcaattggaataattagggcaatcaaaaataaaaataataaaatacagaatttcattttcaagattttattttatttttcttcaattaaatggcaattcattttttgaggcatttaaatgattttttttctgattaaaatctgacgtaattcataattctactgatttaacgaataaaataaggaaatcctgtttaatttcaaagaaataataataataattttatcttaatgacaaaataattgccaattggtaaattaatgattaaataaaattttattactttctactggagctcattcgaaaataataaacatattttcaataaaaataaaataaattcacaatgtaaagagattttagaaaaattaaagagattttatgaaatttcattatttcagaaaattggtgtaaaatggccaaaaatgaaattttagcgcagaaaaatgttgaaaaagaatggaaacaaaattatgtagaaatttgtaagaaaattggagtcatccgagacataattaacaaatggaagaaacaatttggaattcgctgtaaaagaataacggaggaacaaaaaatagaaaaaatgaaaatttattggcaaataaaaagtgaaaatccaaaaatgagtgataataaaattgcaaaaatattgaaaattcatctaaagagcattttcaattggaagaaacaatttggagaacaaataaacgaggaatgaaaaagggataattaaattaaaaaattgcggcattttgttgtcttccttatttaattttattttcaccccatcagtttttgtgttca

SEQ ID NO: 42952 - DNA, 1169 bp, Heterodera glycines
  unsure (1)..(1169): unsure at all n locations
cagttgatccgtgatcgattcgaggccgaagcctgcttccgtgcttcttgcagntcacttaagtggacgccaagctctttgacgtccccggtgaccatcattttcttgagattcggtgccccacatgccaaactcactacggtggtgaaacttgcctgcgttgcttcgtccaaaagaagatgggttgctcgacttatcgttcctttgatgcgaccagccatgtgagtcgtgaggaaaataactttccttttgtcgtatttcagataactttcagccacttttgcttctcggacccgcagaggtgtgttaaacacgtgctttttgtagtcctcaaattgctttaccttcttgtctttgacttttttcaagaatgtctgcgtgagtcttggccgtagcagacttctttccaacggttgaatttgctcgccgtagcgcactctggccgttccactgaagagtgccaagtgttcctccgaaactccaactgcccgagtttcttccaccattttggtgacaggaaggttagacgtagctgtcgccacaatgaccgtttcctcatttttctccgacaaaagaaggtcgatggccgtagccaatgttagtgtcttacctgtgccaggcggggcttgctgcaacacaaccaaaggaaggtcacatgcaatgagtgccaaagtttgctgttgttcctcgttgagtctcgctactgatggcattgccgtcttttggccaagaccataatcaatcagtttttgagtggtcactttcagtccacttcttccaggcctggcaaggagtgctttcatgatctctcctcgcggtgaatcctcttcggccagtcgagacggttcattcgtgccgaagcaatcagcatggtctgagaaaccaacagaagcaccaaccgattgaatgatggtttcttcaccattcaccatctttctgaagttgcttatttgaccatcactttcatggtgtccaaggcgaactttaacactaacaaaaaatgtgtcactgccttcttcagtcttttccgacgacttcttaatcagaacaacttgcccgtatgcaaatgccttagcatcaaattccagggttgccgtgacgggggagtccgttgtccatgccagcgggagaagtttgacaagctttctgtccttcgtctggaacttcag

SEQ ID NO: 42953 - DNA, 1046 bp, Heterodera glycines
tagtttttagtagggttggccgggtccgggtacccgaccgggtcccagtcccggatacccggttttttcaatacccggacccggcttttctggacccggcaatacccggaaccgatttttgtccaaatacccggatccggcggacaaccctaatttttagacaaatcaatgtaaattaacaaaaaaaaaacaaatatatttacaatgtttatttataaatgggaaaataatacaaaaaaatatacattaaaatattgtagaaaaaagagacaaattgttacccaatccaattaataaaatgtgcatattttgaagttacagaataatcagtacatttatattaggtaaatattacagaaggaaatgcttaaggaatttttggaattgcgaaaaaaaaaaattttttttttttggaaaaaagtgaataaaattaatttttaaaaatggaaattttggttttggatttttaaacacacaaaaaaaaaaattatttatctacaaaatgacgcaacatcgacaaattccgcgacgcgcgggcggaggcggtggcggtggtgtggctggcgcaaaatatgcatgaacttccacatcaggtcgggtttgctaaaaaaaatggaaataatttaattttattataattttaatttttaaaaaaaattaataaagttgtttagataaaatattcattttcaaaaaaatttaaatttaaagatagcttcgtttgatgttagaacgtttcagcgccatggcatacatagagaatggaaattttgtatatttcaaaaaattctcaaatttttgtcttagaatttgtgcaaggatttcatttctccttccccgaccgaaaagtaaaaaaaaaaacttaaaaattcaataaaaaaaaaattaagaaatgttgaaacaaaaagtatgttaaatataatataggtgaatttggaaaaaaatattttaaaaagcaggccacctgtttttttctggatttttgtctaggaaaactaggtcaaatatgaaaaaaaaaatttcaaaatccaagttatgcatgaaaa

SEQ ID NO: 42954 - DNA, 1257 bp, Heterodera glycines
  unsure (1)..(1257): unsure at all n locations
gggaacacttagcgaatttaatgacggaaagtaacggagggaaggtaaaactgatgaagcaaattataaacaaagtgactaatgaacagacagaaccgtcagaagaaaaaaagacggaggtgaaaaattggttaattaattgagaaagacaattaattggcaaattagttaatttattgagaaagaaaactaatggtcaatttgttaattaattgagaaagacaattaattgaccaattagttaattaattgaaaaaggcaattaattggcaaattagttaattaattgagaaatataattaattggtcatttagtgtattaattgagaaaggcaattatttggcaatagccaattaattaatttaatttgtggactaattaaatatattttgcataaacgtaaaaatgaattttgaatttgctgccaaaggaagtgatgcttttgtgggagaacggacccgaggacacttccttttaccacgcgctcagaatttgctccgaagaagcgatggaacagaacaaaaaagcgccggaacaaaagaaagtgaaagacgcggaggatttaaacatggaaatattcgccaaaatgatcatttgcatgggcaaaaggctgaaaatgccacgccgaagggacgcaattttgaacggaatgcattttgacaaattggcaaaattggtggacgaatgggaccaattcggcaaaatattggggcaaaaaagtgagtggactcggggaaatgccaaaagaaatttcaggctaaaggcagcagataattaacccttaaatccgaccatttactctatcagattggttaaatttcccgaaggaccattcaaagaaaacttttcgcatcctgctgacaaatgagctcgaaatttataatttttccaaggaatttaaaatatttcttcaatttatttctataagtttaattataaaaagaaaaaaatccattgcatttcgttataattgtattttaaaaattttaaatttattttcctatcaatgttcgtgaaaatttccgagtttgtattaaaaaattccaaatttaattatttttgtttcaaaatttttcgctcaagatgggcattgcttataaatataggcaattgctcctattttcataacttcaagctcttaataatgaacaaattttaattatttttttttcaagaaaattttttattataatttagaaaatttgtggctcaatctgatggacannagaaagcacaaaaatctggaaaagcttatt

SEQ ID NO: 42955 - DNA, 1559 bp, Heterodera glycines
ctctctctgtctctctcactctccttctctctctgtctttctcactctaactctttctctctgtctctctctctctaaacatttcatttttccctcgtcgtcgtcggcgcttcattcactgaccaaagacgacttttttatccgttggttgggccattttttacgccggcgtgctccttaccacttcccctttctcaaatttcagccgttctttacgattagtgcccaaaatagctgcttctcctccctcgtcgtcgttttgtgcgtttttttcccgtccatttcaaaaactgctgactttttcgtttgctttttcggctcgacaacctttcccccccccccccccgcttattttatgcttttgctgtcgtcattcatccgcttccttctcagcatcttcgtgtctccctcctattcgctgtccccaatgaccaactggcacaagaagggacggatggacggaggggaaaagggggaaattgaaggagaggcattaggagaggcggaagcgaccgcggcggatgaccatcaccatcaatcccaattcgaggaaggacggaggaaggggacagatggaagacggaggaaccgacggcggggtaaaagcggtggccaaagaaagggtcaaattaatggccaaaagaggggcgtagacataaaatataaagacagacagacagacaaagtgatggatggccaggccaaactgtggtctgtcggaataaaagtaaaagtgtaaagtgaaaagcactgaccgctacggcgcgcctaaaatgagaagagagagaaaaaagggataggcggagatttatactttatatacaaagaaaattgaagatcagtgcgtactttgagctctcagactttcgtctcccccggcacattttgccgtctttcccccccccccttttccgctctcttccgccgattgctctttggccggcattgccattccagcggcgaaatatggaagcgtaagaagccactgataaaaaatgcacaattttctgcataagcaagcgatgaatccgccgtccgtcgggacacaacggcaaaaatgccattggtaagcggtgccaacccaacctttaccctgccccgtcctccgcattttgccattctctttttgcctgctataattcaatcataaatttgcatacgccgcgagggaatccgtccaatcagtgggacaaatcaccaaacaagctgatcggagatacttgtgaaagtaagactgatctttgagcaaagtttgagtgatcagaacaatcggtgcttactcaaaaatcatcaaatggaaaatattaactttgttcaagagtttttcgcgcatttttggtcataacttttttgaaactaacaataagcgaaattttgcaattttatagagaatagaaaaggctacccgacttttggggatttgcaacttggggacccgacatttggggacccgacatttgggggaccgaacgaacatttgagcaaaagacacttaagaaaaccacggacatttggtaacccgacattttaggaaccccgacatttggggttttccataa

SEQ ID NO: 42956 - DNA, 800 bp, Heterodera glycines
cgtgtttagaccgcagtaactcggctcagagtgaagattaagggacgcaaaagagacgatttaaaagcgattcgaaaattctatcgactgatataataacgatgcagtcgcggcgttgacaactgagatggaaccaaaagttccataatatctttccataaggctggaaaggcagaatttgaatggccagtcgatatttacactgagcacccgttgaagcgggtgatgcgaagccatagcaaactgtatttttaaattctggccgcaattctaccaaaaacgtgtttagaccgcagtaactcggctcagagtgaagattaagggacgcaaaagagacgatttaaaagcgattcgaaaattctatcgactgatataataacgatgcagtcgcggcgttgacaactgagatggaaccaaaagttccataatatctttccataaggctggaaaggcagaatttgaatgaccagtcgatatttacactgagcacccgttgaagcgggtgatgcgaagccatagcaaactgtatttttaaattctggcagcaattctaccaaaaacgtgtttagaccgcagtaactcggctcagagtgaagattaagggacgcaaaagagacgatttaaaagcgattcgaaaattctatcgactgatataataacgatgcagtcgcggcgttgacaactgagatggaaccaaaagttccataatatctttccataaggctggaaaggcagaatttgaatggccagtcgatatttacactgagcacccgttgaagcgggtgatgcgaagcccatag

SEQ ID NO: 42957 - DNA, 1150 bp, Heterodera glycines
cccccccctaccaaaaaggaacactttcccgcggcgggcgcgtgcacaaacagcacattctgccgaattcatccgcacagccgattccgctggtgatgaacaacgtggaacggttccgcggtaacacggccaacggaagcggcgaaatgcttttgatgcagcaggcacactaattgattaactaagccaattaactatgccaattaatatttaattatgacggagggactaggatcaatagctttaatcactttccacctaatcccagaaaatgccttcgtctatgtcttcgtcgtcttcgcatgagcgacggcgtcgcccgaggggccgaggcggcggagtgcttttgctgggcaaatgctgccaacagcagcgaaacatgcaacactactccaggggtaattaggcaatcaattagccatgctaatgaccatcattgttggtgggcagtcgatgggaatggtggcggtgttccggtgcgttatttgcgcagtagccgcgacggctccgaagatgaccgatcggcactgatcgaactgaaaccgtcgacatcgctgcaactgggcgattttgtcgcctcaccgaacgactcgctgaagctgaaagagtgcagaaggaaaaaactgaggcgagcaaatggaaagtcgagaatcaatctcgacgacacggccgaaaaagcgggccaatttggcagccgctgattaattgggcaatggaacttaggcataacttgaccccaattccggcatgaatttgcgggtgtctttgtgccgtccctcgggtcccgtcaatgatggatgccttttcggttcttttgtccattggcatgtcccgcataaatttcagtgctccaccctcctctgcccatctgcgcactgttagcagtgccaaaactttggaaaaagggctgccaccttcgccgcgttcggtgttatactgcaacgtggaaaacaacaacacaatgccaccgcacatcgcactgacggagacgacatcggcacgcattcgcacggaactgccgcgtatccgcgtcaacgcgagcgccgatgagagtcggtcggtaagcggagcggaactggcgatggaggagcggcgcgcaagtggcgagtcggcaaagcgacgggggagtgccggggtgagaaaactgagt

SEQ ID NO: 42958 - DNA, 1380 bp, Heterodera glycines
ctttaattaaaaaaatatttgtatttttcggcgttcaataaaataaatttaaaaaactattttaagatatttgacattattttttaaatttatatctttttgtttaatttttgccttgctctctctatccagtgataccaaatttataccgactttttgactaacagttcgcgaggttcccttattagctatgtttctaaatttatgttccaaaaataatttttacgttaattttaagtcattgaaaaaaataaataattccattcttgatttcttggagtgcttttttaagtatgttgatttaggcaaatattttttcaaatgagtttatttaatattcttttttcaattagagtatactataaaattagttaaatcagtaattcctcttcttcatattaatattttaaacaattattaatttatttatatattagcattagttaattaaaattaatgttaaaaatagcaaaatatattttactttatattataaacttgttccacaaatgatccaattccctgtcaagcaaagttctcatgaattcattaattgttttttttaaacttttatctgaaagctaatataattacaaatgaaaataatcaaattatcaaaataaaatgttaacaaaaagtatttttaaaaattaaataaaaataatgataaatttagctgatcagaataagtaaatttatttgaattaaactctatttattttttatttttttcttttctttatccggtctaaattagattgaacaaatatctgaaataaaaagatgaataatagaaataaataattcaaaaataaatatcataaaaataaaaaactttttttgacataaacaaattaatacagaaaatttaaataaaatattaaaattatcaaactaatattgaaaaataattaaaaaaattaggaccttggagaattaattgtaaatgtatttgaatgaaaataaatttgacctttgaaaaagataaaagaaaattaaaaaattaaattcttatgtttgattttattttcattttttaaagaatttaattgcgcatcaaggtccgacaatgcgaaaaagagactaaagctgcgttccgacgagttaattggataaaaatatttttttgaaaattgtaaagaatatttactcatataattatttaattttcataaaaaattaataatatcgatgataaaaattgcattaccatttttatagttgccaaatgaatacaaatttttacataaatcaatcgagactaacaatcatcttaaggatgacattatatttagcaattattcattcagtataaatgaatccgcatttaattatattaatctaaacaaaatttttatttaattaattttttcttttatt

SEQ ID NO: 42959 - DNA, 951 bp, Heterodera glycines
  unsure (1)..(951): unsure at all n locations
aaattttaagttttcttggcaaatcaatccggctttccttatcagtccgtttaaaacattcttataggggtttttccctttcggcattgtacaaatgcttggcaattcctttggtacgcgcactaatcgttcaagaggggctgtcattggattaccgtatggattatcggacgcgattacggtcgccgtagatttattcaattccgtaatacgaaatgggccaaaatggttccacaaaatctttttatgtggtgatcgaatgtgggacccgggaaaaatgaccataaccctgtctccgatttggaatttgttctccgtgacttttgcttgtgcgtcgtagtgttctttcatttttgcacgacttatttgggaatttttctgcgcttggtccactaattgcattagtgactcacgaaaaagttgaatatacgaattttggtctattgtgtaaagcggatttacgctgaatttcaattcatgttccaatgggaagtttatcggtttgccaaacattaaatggtggggggaaattccggtgacttctgatggtgtcgaattataggcaaacactacaaaaggcagtctttcgtcccattcccaagctgaataagtcgaccttcgtagcattcctagtatggtctgattaacgcgctctgttacaccgtttgcctgaggatcgtatcctgaggtggtcgttctcttaattttgagtgtttttgaaatttcctccaatgtttcgttaacaaactcctttcctttgtcgctatgaagctttttcggcgttcccaagacacaaatgaagttttttacaacatttttcgcaatcatttcgggatttttgtttgggatcgcgcaggccacgaggtattttgagaaatggtctactgccaccaaatgtaccgatttngagaggnntgcagtccatcgataaatatcgatacaaacaattcc

SEQ ID NO: 42960 - DNA, 988 bp, Heterodera glycines
ccattcttcactccgctgatcgccgcttggacctttctctgctgaccaattgatcacacttggaccgttcttcgttgaccaactgatcaccacttggacctctcttcgcctctgtccgagcatcaccaggtccggtgttcaccaatcgctgtcgccaactgatcgctgcacacacaagtcgaggaccaattgacgccgttggatcaggtcaagcacagccaactggccaattagccggttatttaaccggctatccctcgcgtgtcaattagtcgattgtttaatcggctaacaatctggtctcaaactcctactcccaacggcctattcattcacagttgcgcaggcaaccgccgcttaagtccaattctaagcggtttgcgttagtggcgacctgaacccacagggacgaccgcagctatcagttactaaccctaaaggccaaaacctattgtacggtccgatacgtccaatcatagaattttaattctttctttttgtttgcacatatttatttttataataaccttttcggtcagttttgaacctattttttttgtgaaccagttttgacgtcacacatttattctgattaattttgatcagtcttgatcaaggagttgtctattcatattaaattttgattacgcatttaatatttatttttgttaagttgcttagtcagttttgacttactaattttatttttttttggggagagcgttgcttagtcagttttgactaaacaatttcaatttttgaagttcaagtagtgcatttacaatttgttattcaacgttttattgtttaactcatattattaaccaagggctgccgaattaccaagttgatacatttttacgaatcaaatcgtgactatttagtcaaatcaaataaaatctgaattaaacttaaaaagggatcataatgtcagacatttatgtcgaacgcatagaaacagctaaatatgccattgagttatatctgg

SEQ ID NO: 42961 - DNA, 1006 bp, Heterodera glycines
  unsure (1)..(1006): unsure at all n locations
cataaatctgggcgcatcggttcggggggactgccccgtaaacaaaaataaatcgattttttcaagtgtccngttaggggtactcaaacaattatggggagcaaaaatccaacgcagaattaaagtacaggctatagggaagctactcccgaaggattcggtctccccataaatctgggcgcatcggttcggggggactgccccgaaaacaaaaaaatcgattttttcaattaattttgcaaaaaataaataaaaacgaaagactcagattttcgaaaatttttttgagccagctagctcggcgctcatttcagtgtaagttagtcctttaccggggagtatccctgcaaagtttggtacgcttctgctcaattagcaaaaaatatgagtgatcgaattttcactaaaaagttaagcctaaactttttggcctgtttaaaaaggaattaaaaatttttaaaaattttattcatctccctttttgatagaaaaagcatcagagtgcctaaactaacatgtaaataaaatttggtgcgtttcagaaccctttctgaaaaaatatttaagaattaattttgcaaaaaataaataaaaacgaaagactcagattttcgaaaatttttttgagccagctagctcggcgctcatttcagtgtaagttagtcctttaccggggagtatccctgcaaagtttggtacgcttctgctcaattagcaaaaaatatgagtgatcgaattttcactaaaaagttaagcctaaactttttgacctgtttaaaaaggaattaaaaatttttaaaaattttattcatctccctttttgatagaaaaagcatcagagtgcgtaaactaacatgtaaataaaatttggttgcgtttcagaaccctttctgaaaaaatatttaagaaataattntgcaaaaaataaataaaaacgaaagactcagattntcgaaaatttttttgagcagctagctcggcgctcatttcagtgtaaagtagtcct

SEQ ID NO: 42962 - DNA, 1286 bp, Heterodera glycines
aaaaaaattgtccataaaaaaaaaacccgtttttttgaatattaccaacaaaaatttttaggcagtttataaaggaggaaggaaaaaaatttttcatttgcctaatatttatttatcttgtgaactgtggaaatgcagctgatgccgtcggaaaagctccgattttttgggaagtttttttctttcagtttcaccactgattgttgaggcaattttttcgccaatttcttttgtctacaaacattatttattgcgtttcatcctgtagtgtgtaaaaaattttcagtaaaaaaacttgttatctgaatatttacaagcaaaatttaagaccatttccaaagaggaaggaacaaaaatttttgcctaaattttatattatattgttgaattgtttgaaatgcatctgttgtctgccgttttgaaatttttcaacttttcgcgaaaagatttcccagaaaatgcatgggacaaataaaaattaaacttctattatgatcaatttaaatttcctatcagtttcgggtttgctttaaacacgctggcctatgaaaaaatggagttttatggatgtcaaattttgggacttttcttcgacgtggccatcagcgggttgtttcgtgacaaaaacaaaccagtttgatgctattcgaatgagctagacgcgctctacattttcaaatgtatcaacaaagggtctaccgccactccctggcgagatatggcctgtcaaagcagaacggggccaataaatttgaatttttgttaatcttcggcagttgcctttatttcgagcctactctacttgtgcatcttttcccaatatggcactgcttccgaattattgaactgtttcacgactgattgttgagataatttttttttccgattcctttatctccaagcatgagccttataagtgattgttcctatccttctcttgaaaaaaattgtcactaaaaaaaacacgttttctgaatattaaaaacaaaaatttttagacactttctaaagaggaaggaaaaaaaatttttcatttgcctaatatttatttatactgttgaactgttggaaatgcagctgatgccgtcggaaaagctccgattttttggggaagtttttttctttcagtttcaccactgattgttgaggcaatttttttcgccaatttcttttgtctacaaacattatttattgcgtttcatcctgtagtgtgtaaaaaattttcagtaaaaaaaacttgttatctgaatatttacaagcaaaatttaagaccatttccaaagagg

SEQ ID NO: 42963 - DNA, 995 bp, Heterodera glycines
  unsure (1)..(995): unsure at all n locations
ctgcaggtcctaagaaataataatggtcgtagctgggaaaggggacagaaggcattttgacaatttcacaccaaattttcatttactttttttcgcggcgactttttttgagacaatttgattcaatttttaagaaaaatcccaatttatgaaactgtgcaaattactaaatgcccaagttttccggcactgtccttttgccatgccaaatcattcctttggcactcccagtgctaatcagaggcaaaaatggcatttttaagaatgttgaaaagagaggacggcactccctttgaggacgatgatgaaaagggtcaaggagaaagtgacggcgcggaaggagggaaaagtccatgaccatttgttgatttggctaattaattaaatgcctttaaatttcaaaatccatcggctcttctgcagaactgtaattctttgattcgccagttaagtttcaacctcacaatttgtcctgtttttcgtgcatttgcccctctcccccgcaaattgttcatttttgtattttattttctaatccatttcatcagtattgtattatttgcacattaaaagtgactttttgactcccgtttaagacgttatttatccgttcagcagaaaataaaatgccaaaaagtggtcaaaaacaaacaaaaaacgaagtgatgattcataaagcataattgagagaaaatcgcaaaaatggcaaagtattagtcagatcagcagaagaaacaatcaaaaattaatcaaaagaagagaaaagtgaaaaagaaacaatttagaggctaaactcagaaaaaacaattaacttttttaaaataacaaaagaaagggcaaatgaagcaaaatggaaaaaggggagaagaggaaaagctaaaccagtaattagcattagtanatgancataataacccatccacccgacaaattcgacgctttttctcagccgattcttcgacttttcctccattcaaaacgcataattcattgaa

SEQ ID NO: 42964 - DNA, 931 bp, Heterodera glycines
  unsure (1)..(931): unsure at all n locations
accagttatcatacaaaaaggcaatagttaagctttgagatataaaaaatcgtctagaataattatctcaacaatttgtcgggaaagttgaataaatttcagttgcaataggcatattggcacaatacataaatgtagagcaggctcaaaatagaagaaataccaaagattaaaaaattcgtgtttatggcccactctgctttggctggacataactcgccagagagtggagatagaccctttgttgatacatttgaaaatgtagagctcggctagcgcattcgaataacacaaaatttgttttcatttgcccccaaacaatccgcttatgacgggccgaaagaaaattcacaaaaatttggcaccggaaaaactccatttttttatgggccagcataataaagtaaacccaaaatgtaagtgaatttaaattggtcatgtgagatgtttagttttttatttgacccatccgttttctgggaaaaaacttttcgagaaaagctgaaaaattttccaattgcatcagaagcagactcaaattcttcaacaacataatgtaaaaaatattacgcaagaaattatttttacatcctttttagaaatgctgcataaatttttattgtaaatagtcacaaacaaactttttttcactcccaatatctaccagttatcatacaaaaaggcaatagttaagcactgagatataaaaaaatcgtctagaataattatctaaacaatttgtcgtgaaagctgtataaattctgggaaaaaacttttcaagaaaagctgaaaaattttcaatcgcatcagaagcagcctcaaattctcaacaacataatgtaaaaaatattacgcaagaaattatttttagatcctttttcgaaatgctgcantaatttttattgtaaatagtcacaaaaaaacttttttt

SEQ ID NO: 42965 - DNA, 884 bp, Heterodera glycines
ttttctgattttgtgcctttacacgaaagacctgcttttccgagtcgtacagcgactggtcgacccttttcaacacgctttccccccgtttaggagcagtacgggtggacggtccgtcacaacgacgacccaaacagcaaaggcagtggcggagggcatttcgctgctgccgtcgctggcgccgttggccccgccgatccgttgatgaaccagggcagcaacaacaacaatggcggtggtgctactgcaatgcctatgccaccaaatggtagcggtgcgtttgccatgtccccctccacgtttgtgccgtcgcatccgtctcccctcgccacttcgtcgtctcctccgcccgaatacgcgccgccgcctccgctgccggcccatggcgctggtgcttaccgacagcaaacgacgggcggagtgcgtttttggattgcataaatttttcgaaatccgaattttttaaataaaaaattcggggaaagacgggcaatctcaaaatttttattggataatttaatacaaacagcaaatggatgacaaaagttgcgttatttcagcacagtttccctaccggcgacctcgccaacaaaagtggggtcggcgccgtttatccatcggcgcatccgccgcccgcgggcactccgacgcagcccttcccaaacgcaacaccaccaccacaacaacactaccaacagcatttggtaaggcatggtgggagggaaccaacagcacggtgtacaaattgttcaattggatgaaatccacctttcctagtggactatcacgtgagcctcctgcagttgagtccatgcccaaaattggcgtttatagccgtggaaaatttagggcggaaaattaagtccttccatacatgtgcaaat

SEQ ID NO: 42966 - DNA, 724 bp, Heterodera glycines
cccccctccccgtcgcctttctctttctccgccctcgtcgcaccaccggcggtgcccaccctccgttaccccctaattagacttccttcccattccctcatcaaattggttattcttggaccctttcccacttccccgccctccatttcgtctcttccattcactttttccctcatccctttgtcgtggtgtccttcgcccttccctccaatattttggcctttccgctcggcgaaaccccaaatgagcggcgatccctcccccgccccccccccattcgacgaacccatctccctgcgctccccccccccacctcacctccttttcaaaatattttcactgccaaattcgtccccatcatttttcatttcatctcgtttctttttggccaatcaaaaatgaagccttaaggagctaaattccatctaatcgcataaattcacttttcgcttttgaatttcttcgcgcttaaatcttcttctctttttcttctacattatccctccatcagctgcatttttcctcatttaaagaaagggcgggtgaaaaaaataaaagcgtttgccgctcggctggaggaaagggtaattattaggttgaagttttaggagtgactttttgaggtcgattgatttgaaagtgaattgggaaagggatgagagagtgggcatggacaacagaccaggagggacaatggcagaaaaatatttggggggggggcgaa

SEQ ID NO: 42967 - DNA, 1142 bp, Heterodera glycines
ccgacaaaaccggcattcaatccctataacatatccctgcgattccggtctcgaatcctgaatctcggccccatactttttcaaaattccgggcttcaagagttataacgatttcaaacttcaatttttatttgtttatttataagtttgttggaattatgaaatgctttggcattttgtgtcttcatgaaaattctcattttgtgccctcctcaaaggtgcgaatgggctacttttttttcgcactgcgacggatggtggcaataattgtgcggcacataggtgccgtgccgaaacagtcgtttgcgatcagtccaatcgtatgggccgtgccgatttttcacttaaaacaatcatttttaaaacaaaggctttcatatattcatattagctaataaataatacaaacattttatttgtaaaatattaccaagccaaaagtgatcctcaattgtctcctgaattaaaatttttttttattgttgaattaattaaattttaatatttcattttttcctaaaattaatttagttgatttaattatatttaaatatttttatttatacatttgcagcaattgtctgctcaaaatacagatgtgtgctgttgaaaatgtgcattcgactgaagccataattgcttgaacgaaatgcgctcctaaacaattaaaataaaatatttaaatgtttattaaattattattttataattaagatagaaaatttcaataaactattttaatttaaattacttcaattgtaaaatcactgcgatttttttcgaactactgtagttagcatagaagacaacagtatccttatcatccttgtttaccagattttacacaaactatggtgaacaaagttcaaaaaattttgaatttaccaaaattggaaaataatgaatataaatagagagaacattagcaaaatattaaatttagcttggttttgagcaaaattataagaaattttggttgaaaaaatgcccgcccatttggcaatttaataaaaataaaaaaaatttccggcacataatttactcgttaccatggtccaggatgagcaacaaatgtgtccgtattttcttggcatcccgcagaaccgctgataatatgaacaggagccggtggggccacgtaa

SEQ ID NO: 42968 - DNA, 766 bp, Heterodera glycines
ttttctgtctgtcaaatgcttttcttcgcccgacttttcttttgttaattttcttttcgccaccacaaatggcacaacagaagcagcaaaggcacaatcggcgcggaaaaagaaaaagctgaaaattctcgtctattcggtagtgcccgcgcacagtcacatgcaatttatgggcgcaattgccgactcattggccgaggcagggcacgaagtggtgaggaacggaaaatggacagaattttgaaatttaaattggcaattaagcatttcatcaaaacgattagcgacgagttgcgatggacaaccaaagccgagatcaacgagactaaactgtcctcgaaagtttatcgggttgtgctcaaatcgcgcggagcgcccgtcgcgacttcggatgtgctttatccattcagtggggccaatgcgtggccaatgctcaacgcatgggacaacagattcgtcaggatttttgatttgtggccatattttttcaaaggcaataattactaattaattgctttacattttccaatggaattcactgacttttgcagaaattgccttccgtcgcgaattgctggacgaattggccaaggagcgttatgatgccgccatttatgaactgttcgatctgtgcggtgctgccatttttgagcgcatcggtgttcgcaccaaattggcaacacttacaatgccaatgcaacaaattagtgccgctcatttgggcattcccgacgttgccagttttgtcccaagtaaaaaaagaaat

SEQ ID NO: 42969 - DNA, 705 bp, Heterodera glycines
attttaactgtgacgcaatatgtttgttgcctttcgtgtccatatgaccgtagtttatgcatttttttaaaatgatgctcgttgggccttgagcaagccattggaaataaaaacatttatttgtgttaattggataataggggaaataattatgtacagttggtttattgttttttttttgaatttcgattctaaaaaattggataatgaataggttacacgaagccgcgaatgtccgattttggcttgggccgcaaaattcagcaaaaaaatttttgaaaacatttttttttgcagtttggtgctgatcaacgcgctttacttcaagggaacatgggtgaaccaattcgacccaaaattcaccataaagtcggcattttatgtggacgcgacaacaccaaaaaggtggcgaaaaatgggaggcagctcggttccctcttttcataagaaaattctaagaaaaaagtcgagaaattttcagtaattttttggaaatttttttaaaacttatttttcaaaatttttttcttagaattttcttttgaaataactaagatttttttattgaaaaatttctaacaaagggaggtggccaagtgtccgtgggatttcggaatgagattttttgggtagatagagcacacctgggatcttaagaaaaatgttttcaatttctgccaaatggacccctgtgccgagataaaa

SEQ ID NO: 42970 - DNA, 984 bp, Heterodera glycines
taccaacatttgcctctctagtctggctctaccaaccactcacacgatattgaaatgctaacgaaaaaaattcttgccgaaaaaatggctctcttttttctcctggggatttgaccgcaaacttggtaccaacatttgccttctctagtctggctctaccaaacactcacacgatatttgaaatgctaacgaaaaaaattcttgccgaaaaaatggctatctcttttttctcttggggatttgaccgcaaacttggtaccaacatttgccttctctagtctggctctactaaacactcacacgatatttgaaatgctaacgaaaaaaattcttgccgaaaaaatggctatctcttttttctcttggggatttgaccgcaaacttggtaccaacatttgccttctctagtctggctctaccaaacactcacacgatatttgaaatgctaacgaaaaaaattcttgccgaaaaaatggctctcttttttctcctggggatttgaccgcaaacttggtaccaacattttccttctctagtctggctctaccaaacactcacacgatatttgaaatgctaacgaaaaaaattcttgcccaaaaaatggctatctcttttttctcttggggatttgaccgcaaacttggtaccaacatttgccttctctagtctggctctaccaaacactcacacgatatttgaaatgcaaacgaaaaaaattcttgccgaaaaaatggctatctcttttttctcctggggatttgaccgcaaacttggtaccaacatttgccttctctagtctggctctaccaaacactcacacgatatttgaaatgctaacgaaaaaaattcttgccgaaaaaatggctatctcttttttctcctggggatttgaccgcaaacttggtaccaacattttccttctctagtctggctctaacaaacactcacacgaaagtgaaatgctaacgaaaaaaattcttgccg

SEQ ID NO: 42971 - DNA, 976 bp, Heterodera glycines
atgccaaattccctcactttctctttttaccgaaaatgccttcgattaccctttttccctgtgctttccttttctgtttaattcatttatcgattgtctttgctcgccttcgttcgtttgtttgtccatctgtcctctttcactgatttcttcttttgaccaacttttgcatacctttcttttcgtttaaatatgttggcataagaaatatgggtatttttgtcattccaaaatgttcttttttgtttaaattgataaattttagggaatttctttgttggtttaaattcaagttaatttttcattgtaccttttcggatttttaattattcgactaattgtaattggagtaaggttaaacgttcccattgcctttccattaaaaatgtcggcgaaagttaaaacggaggcgtcgtcgccaaaacaaatgaacgaaaaggcggaagagaatgaattgacagagcgtttggagttagactttgtcgaagtgcgccttttttctcgatagtatttggcaccataaatccaaattgatggctaaaacttggcgaaaatggctaaatttcctgggttttcccaccgtgtagaaaaatttaagggaagttacatttgtcaaaaacttgggccagaagagtaaaaacttgtagagcctcttccgaaattttctttcttctatacgcacctgtttagaatgtccagtttcacccatctttatgaactgtttaggagtcagtcggcgacgattggtacggaaatgccatcatggaatgcgacgacactttagccaccgcagatgaagcggaggaggagggccactcaaaacgtcgcccgactcgccacgttcgttgtctgccccgcgttcccccgaagacgaagtggagacaattggtgccaaggaattaattttcaaaactaaaatttttttttggggggggggggggatcatcggcaccaattatgccactaatttgtttcg

SEQ ID NO: 42972 - DNA, 1135 bp, Heterodera glycines
catagccagcgtgttaaagcaaacccgaaacttgataggaaattaaattgatcataatagaagtttaatttttatttgtcccatgcattttctgggaaatcttttcgcgaaaagttgaaaaatttcaaaacggcagacaacagatgcatttcaaacaattcaacaatataatataaaatttaggcaaaaatttttgttccttcctctttggaaatggtcttaaattttgcttgtaaatattcagataacaagttttttttactgaaaattttttacacactactggatgaaacgcaataaataatgtttgtagacaaaagaaattggcgaaaaaaattgcctcaacaatcagtggtgaaactgaaagaaaaaaacttccccaaaaaatcggagcttttccgacggcatcagctgcatttccaacagttcaacagtataaataaatattaggcaaatgaaaaatttttttccttcctctttagaaagtgtctaaaaatttttgttgttaatattcagaaaacgtgttttttttagtgacaatttttttcaagagaaggatatgaacaatcacttataaggctcatgcttggagataaaggaatcggaaaaaaaaattatctcaacaatcagtcgtgaaacagttcaataattcggaagcagtgccatattgggaaaagatgcacaagtagagtaggctcgaaataaaggcaactgccgaagattaacaaaaattcaaatttattggccccgttctgctttgacaggccatatctcgccagggagtggcggtagaccctttgttgatacatttgaaaatgtagagcgcgtctagctcattcgaataacatcaaactggtttgtttttgtcacgaaacaacccgctgatggccacgtcgaagaaaagtcccaaaatttgacatccataaaactccattttttcataggccagcgtgttaaagcaaacccgaaactgataggaaatttaaattgatcataatagaagtttaatttttatttgtcccatgcattttctgggaaatcttttcgcgaaaagttgaaaaatttcaaaacggcagacaacagatgcatttcaaacaattcaacaatataatataaaatttaggccaaaaatttt

SEQ ID NO: 42973 - DNA, 942 bp, Heterodera glycines
  unsure (1)..(942): unsure at all n locations
ctagagtgactaaaactgaaaaataggcataaaatacataacaaagcggcccaagcccttacccagaaaatatttgngaggcgagaatctgaaaaccttttttttttgtttgctcttccggtcaaaattttgctttttggggccaaaatttcaaaataaggcaaaataggggtctgccgataggtgtcgccggctaaatatattttttgaaattttgatgcattttgttaataatttgattaaaattgtagatcatgatgcagaaaattatggaattttaataaaaattatttttatggctctaaaattgccaaaaaggaacgctttaggctcttaaaactccaaaataggcactaaaaatagaaaatagggctctaaaagttttcggagtgtaaaatgacaaaagcaattcaaacacttaaaaaattaggccgaatcagtattgagataaatcattttaaaagcaaaaattcttatgaagacaatcaataaataaattttagagatgaattttagagaaatttttcttttttagggggtgcatttttgaaaattttcgggtcgattcttagggatgtatttttcatcatctgcaactaattttctttttattttgtgaatgttttttaaatttttgctcagatttataacaaaataaaaaatcaaaaaaggcagaagttttttaatatattttttcaaaaattgccacgattcaatcgttaattatttataaaggcaaaattacaaccgcataattttgtctattgcttaattcatgcaaattttctggattttcagtaaaatttaaaaaaatgctaaaaacataagactcgacctagaaaaaccagaaaatgcttctcccctcaaataattaaaaaggttcgtaaaatttatcctctaaaatttatttgtgccaattttgatgcctatttatgacttatt

SEQ ID NO: 42974 - DNA, 992 bp, Heterodera glycines
  unsure (1)..(992): unsure at all n locations
cggttactgatttactcattaaaattccaaaagccgattggacggatagaatttctaaaaattcaacaaaaggactaactattatttcttcccgtgtatccaacaagagaagcagagaatttcatttacggttactgatttactcattaaaattccaaaagccgatttgacggataaaatttctaaaaattcaacaaaaggactaactattatttcttcccgtgtatccaacaagagaagcagagaatttcatttacggttactgatttactcattaaaattccaaaagccgatatgacggatagaatttctaaaaattcaacaaaaggactaacaattatttcttcccgtgtatccaacaagagaagcatagaatttcatttacggttcctgatttactcattaaaattccaaaagccgattggacggatagaatttctaaaaattcaacaaaaggactaactattatttcttcccgtgtatccaacaagagaagcatagaatgtcatttacggttactgatttactcattaaaattccaaaagccgatttgacggatagaatttctaaaaattcaacaaaaggactaactattatttcttcccgtgtatccaacaagagaagcatagaatgtcatttacggttactgatttactcattaaaattccaaaagccgatttgacggataaaatttctaaaaattcaacaaaaggactaactattatttcttcccgtgtatccaacaagagaagcagagaatttcatttacggttactgatttactcattaaaattccaaaagccgattggacggatagaatttctaaaaattcaacaaaaggactaactattatttcttcccgtgtatccaacaagagaagcagagaatgtcatttacggttactgatttactcattanaattccnnaaagcgatttgacggatagatttctanaaatttcacaaaggactaactattatttctttccgtgta

SEQ ID NO: 42975 - DNA, 632 bp, Heterodera glycines
cccccgagaatcagaattttttgaaaaaaaatttatttttttttaaaatattatattaatttttttgtaaaaatagcaaacgagtttatgaaatgaaaaaaaacagatcatttacaattgaacgcgtttaatgcaatcaattaattttaaaaaacacgaaaatacacccctaagaaccgactttttgagttgccccccccccccgaaacgaaggtcctggctacgcccttgcctggaccattggccggtttaatcttggcattccccatggacaactgggttaatttgggttgctgttaccacccactttctcatgaaagcgatcaaaatcggcatgagaaggatgcggaatgttcaatatcaacatttcatgatcatttatttgttcctactttttttgtcttgatttattggtttgatcatgtttgcttgttatacatacattttaaaaaactaaatccacaaaaagaaagagtttctaatttaatgttttaatctgcaaaaaattgacaagtgagaattttttcatacgtagtttacatgctttactcctcttttaaattataccagcagaatagcattctgacacaaaatgtcgcacgtaataaattattaaatttggtttcgttgaa

SEQ ID NO: 42976 - DNA, 1056 bp, Heterodera glycines
attgtaaaaattggattggtcggaaccggggatttcgtcaaaaccgagacgggacctgggaagaccgggagacttcctggctcggtcaggtcccatcaactttaatattaaaaaaaaataataatttcaatgctttttgctaatttttatataaaattatttttgaaaatttaatagatgaagctcaactccattaaaccgtccttcaattgttccgtttgcagtcgaccgtgccaacatagcaagtatggcgtcaaatcttgtgaaagtaaacaatttttaaagaatggaatgaaaaaataataaattaaaaaacgctgaaaggaataaaattgtttgatgattaataataaatcggaaattaacataattattgaaaaataaatttacttaatacatttattagttttgacattataaaattatcaaaggtaatttgcttttttgtcgtattttttgaaaaaaaaaaaaaattttcaaacaaccaattattgatcctaatgaacaaaaagaccgtgttttcttaattttaatgctgattaggctatcagagtttgaaaaaattcaactttgagtccgattttggacataggcgcaaatgtcggggctccctacagatgaccttttttgcttttgaaaccactttttggagtgccttcttttcaaaaaaaacttttggggaagagcatgggtccggtgaagcatttgatggaagctgagcagaaaatgtgccgaattcgcaaccacggactccgatcactgaatcattttacgaccaatgcaattcgttcgaatcaatttttgcacgtaaattcaatttggttgactgttcctacaaagattcggtcagcgaattcacaaaaaaaaaaaaaatttgaatttaagaccgatccgccaaatgctcctcgggcagcgaattttgaaataaatcacttgggacccctcattagcaagtcaccaccatacgtcgccatggatttgatatttgttttcgaaattgtcaaacctttccatccttcgaacagctcatcatcaatgataaggtaccattctact

SEQ ID NO: 42977 - DNA, 1164 bp, Heterodera glycines
ttatcaaattgttaaccataaatatttttgaataaacacttatttcatttaaaataaatacaatatttcatttaaatttttttttgtaattgagtaatttgattaaaaagttatcaataacaaattaatgaatgcaaaaatgaaaatatataaaaattgacggcattaaatcgccggacggcgaaacggcaccaaaagttcaaggaaaaggaattgaaatgccaattccgtcatggaaattcccaaattttaatgaattgttgggcaaggacaaggacaataatggtggaacaatgaagagagaaaaacgtaaatgaaaataaataattaattaactgaggattaaattaaaattttgctgattttgatggacaagtcccatttatgccactgatgatgccagaatttaatccaatgatgccagaatttaatccaatgactccaggaatgccaccgatgatgcctggttttaatccgatggtgccagggtttaatccaatgatgccgggttttaacccgatgatgtcagggtttaatcctatgacgccaggaatgccatcgatggtgccgggttttaatccgatgatgccagggtttaatccgatgatgccgggtaggaggaattgccgaaacttcaatataatttattgatgaatttcaacattctaatggccaaccctatttgatgaaacaaattttgagaagaaatttagttcttttaactgcttaaaatggattacaataaaaagcattagtttttttaaatttacgaataaatacttaatgcccattaataattattgtacaattagtaacgcagtttatgatttatcgctcttacagcaataacaattaggttaaataacttcgaaaattgtataaatttgagttgaaagtcattttttcaatttcacatcaactttatcttcaaaaatgccaagatgttcttgagctgtgcgagtcttctcatgctctaaaaataaatgttaatcaaaataaatttttttgtttcagtttttatttaaaatcttttttttaatttttaaatatttaataatgtaaggctaaccaaaataaaaataatatgaaaaaattcgaaaaatatatttaaaagcgattagtattgtgttttatcttattttgaattaaaaaaattataattta

SEQ ID NO: 42978 - DNA, 975 bp, Heterodera glycines
  unsure (1)..(975): unsure at all n locations
atttatgtcattattttttttatttaatttncaatttttcttttcggtggttccgttgcactgaactcctcccatttgaatctgaccaaactgtccgccgttattgaggacgaaattttcataaagctttttcgcgcgcccgcctttggatggttggagagaattgacgaagcattggcaattgaaagcggcggaggaacgaattttggcggattagcaaacggagagaatgcgggagaagaagaggaggaggaagaggagaagcaaaatggggacaaagtgagaaaaggagttggtggagaggaaaaggaaaaggaaattcaaaatgaaaacggaaaattaaaaaaaatggaaaattaaaatcaaatgggaaaaatttaaaaatggaaaacggaaagagttcaaattgccctaggccatctttccccagtggcgttcgcccctttcggccgaacaatttgcctctggccactttttggtgttccaccaaaacggaacgacaacaaatgtagcagcagcagcagaaaaagcgggaaatgaagacgcatttacactggttgtgtacagcggaagggagccaaaccaaagactgaaattggggatgaaagtgcgaataacggacgaaggcactgatcagttgaaggtaaaatagaaaaggcactgatcagttgaaggtaaaatagaaaaggcactgatcagttgaaggtaaaatagaaaaggcactgatcagttgaaggtaaaatagaaaaggcactgatcagttgaaggtaaaatagaaaaggcactgatcagttgaaggtaaaatagaaaaggcactgatcagttgaaggtaaaatagaaaaggcactgatcagttgaaggtaaaatagaaaaggcactgatctattgaatgtataatagaaaaggcactgatcagtcaagaataactgcaaaaagttctgattattatgaggctatacgataaaaagcactgat

SEQ ID NO: 42979 - DNA, 882 bp, Heterodera glycines
aaaaaataattcattacacgagttttttacaaccacttattgccaatctaattcttgcagattaaagccatccattgcctgccggttctcggcacagcaaagcactaatacggtgtttgactcacttcaaaaaataattcattacccaaaagttttttacaaccacatattgccaatctaatttcttgcagattgaaagccatccattgcctgccggttctcggcacagcaaagcactaatagggtgtttgactcacttcaaaaaataattcattacccaaaagttttttacaaccacttattgccaatctaatttcttgcagatttaaagctatccattgcctgccggttctcggcacagcaaagcactaatagggtgtttgacacacttcaaaaaataattccttacacaagttttttacaaccacttattgccaatctaatttcttgcagatttaaagccatccattgcctgccggttctcggcacagcaaagcactaatagggtgtttgactcacttcaaaaaataattccatacccaaaagttttttacaaccacatattgccaatctaatttcttgcagattgaaagccatccattgcctgccggttctcggcacagcaaagcactaatagggtgtttgactcacttcaaaaaataattcattacccaaaagttttttacaaccacttattgccaatctaatttcttgcagatttaaagctatcaattgcctgccggttctcggcacagcaaagcactaatacggtgtttgactcacttcaaaaaataattccatacccaaaagttttttacaaccacatattgccaatctaatttcttgcagattgaaagccatccattgcctgccggttctcgg

SEQ ID NO: 42980 - DNA, 1334 bp, Heterodera glycines
  unsure (1)..(1334): unsure at all n locations
ataaaggcggggaaaaagtaccacgggcgctcaagaacggccttnttgaagaaatatttaagggtgaaggtgcncatgnacagataatccaaaaaacggtgtattngctcaggctctcggcccgtacggactgttataaagtgcctttgnctctcgaatttgtgcctcctaaaaatggaaaattattaggcaacaaaatgctgaccgcattaacctgaagaaatgcgaattcgtcaaaaaggttctttcgtctcccggttttcaattgccaatattggtatttgtcgccaaggatataactgataacaaaaacgggccaaacgaagacgctgaaccactttcgaactttaaatgctgttgaatgctgaacacgaccaaccatacaataatatgaactgttttaatataaattaaataaaaatttaaaaaagttccaaaacaactagtgattgtgggtgatactaatacaagaatacaggacagaccgggattcggggattataccgttgccggaaaaagtggaaaaacggccattttaattaggtttttggcgaattgtttttttaaccaaggacaaggcaaatcgactatcccttacccttactataaaagaagtgttttcgattcatcagtccgcatttttcattttttcctcttcatttgaattttttaaaatttctattccttatttatttgttcactttttggcctcgtttcaggctcattccatcttctgtacatataccctatttcctcacattaatgtcggcctacccacaagaacttctccaaaaaaatgtgagatttactttttaggcatgaatcttcaaatcaataagttgttgtgtattttcgtatttacagatcgcttgcaaatgcagagacggcgaccttatcaacgtgcctttctatctgttgctgcagtccaagacattcactgacttttggaaggtgtcatttgactgttcatatttcattcaccaaattaattgccagattcatcccttttctcccaatgaaattccggctgattatgtgttttctatggaaatcgttcccggagaggttttcatcaaagtggtcgactggatgggacatcgcaacggtcaattgcagtttcattgaatttagatgagaaaacccactaatttttaaggaaaggacgatccggttgttcgcacggtgacttcaatgctcctctacgtaattaaaatagaaattttgtttcaggatccgagaacgaatgagcgaattccgcttatttacaacgatttcgagagaaatttcttcgacgaaggttgcagttgcaatttccgtgaatgtccgggattaat

SEQ ID NO: 42981 - DNA, 999 bp, Heterodera glycines
cacaacggactcgaaccaccaccctttgttcctttactatcttacaaaaaccacttcgccacacatgcaaatttttttggaactgggaggccaaaattgaaacgatgtgtttagttattacatgatcatttagttaattaaataattaaaaatttaggaataaaaatgtcatcaaataaaaagtcattcaaactgaataagacaaagtcccagcaaaaaagcgttcaccaaaacagcatcattacccaagttggattgtcaaaaagtcaaaacagcaggcaacctttctaaattttatctaaacttgtcgaagccaactttaaattttcaaggttggatgtgtctgcttcggtggatagttcagtggccttttcaatccacaaaacttggcccgacttgcaattgaaccaaagtcacttgttcttcgaatgcactctgttcctttactctgttcttgcgttgtttctacagtatctgaacctgtacaggactttgtggtggcttcccaagtctcactggcccaattctcttgtcggtttttcccttttcacttttttattgcttacctttagaaataccacctgataaacccttacattttgtcctgtattgggcttctacttggtcttcgagttaccaaatgcttttgggatacggtaacattttggaacccatcaaataaataatttatttagataactgaccgtataagcttcttttctgctgggcaagatggctggaagttcatttgttggaaagtgtttgaaaatgcaattgttaagactcctctcaccaccgttgtgttgtccagcttcctgttcagcttcacacgaatttactttgaattcggcatcaaatccttcctttgtttcacttgcccgtgggttttatgaaattgaagaaaaaagctcaaaatttttgcttaagatttgttaattttgtagaaaaatgaccatatttgatttttttatagatttttactaaaactatgtaattttc

SEQ ID NO: 42982 - DNA, 937 bp, Heterodera glycines
  unsure (1)..(937): unsure at all n locations
tcaagaagcatacttagcaaaaattgtacattacnagagtattgaaatttgatttttcagtgattatttttgccatttatcaatcaatttttgcattcattgagctttggtttcactcgttaatttacatatttatttttaataagattttttcaaaaaaataaaaaatgcgtcattatctccttaaaattgtatgccaaaaacactgcgttataaaacggaatttgatctgatcaattaagcatgcttatcacgaaaagcaccacataagcttggaagaggcaatcgaagcaaacacaaatggggcttacggagaagcattgttggcattggtgaagggcaatctgtgaacaatttggacaattaatgaaaaaagagaaaaaaagactcattaaataaaaaaaaataaaaaaacttatgataaaactgataattttttcacaaatttattaaatatgttgaaattattcttatttattatatcaatttttatcgtaaaattttgacgatttgtgaattttgtcaaactattaagggcaattagctaataaaaaacaattaagctgattaattgtttaaatttcttcatgttattttaaattcacccactttagttacagctaaacaaacctgtcaacgaatttattaaatatttttaattaggttacaaaattctcaaaatcagatattttgatgcaaaaatcattgggattcgtcaacggcaaaacgattatccgtttgctattgtacatcgccttgggaaattttctcgcaatttgcgtggcatttataaataatcatgttaaacaaaaacagaaattttgcaccaatcacgtcagatggcagacattgtagaatntgtctttaaaattgaaaataaattaaatacaaaaccagggctcccaagtttttttttcaaaattacaaacaatttacc

SEQ ID NO: 42983 - DNA, 864 bp, Heterodera glycines
tgctcacgttttcgctgttgaacttaaatttaagaaaaagccgacagaaaagagtccatcttcggactaagaatcaaatgaccatcacattcatttctacaaacaatcggagaaaattgagttgttgagttactttgtcttcggtgtaacggaccatcagcgattgttttgccgacggcgccttcgcccaacaaaacgactttaaatgctctgattgtctcttccattccattcggttgggatcagcaggaagttctcagtctttgttgttactttcaattcgtgataaatttgaaaaaataaaataaacgaacggaactaaaaagggcaaaaaaatgaaataaataaaaaaaagatatttaacattttggaaagtgttcataagtagagaccggcgcgggattttgcggggtcccagtccgcaatcccgcattttttggaaaatgcgagattaatcccgcgggatcccgtcgcgcaaagaattttgaattccaatcccgcaacgggatccgcaaattcgccgccgcccacgaattcccctaagatttcaattggaatctgaaattacccttttttcagtgaagtccgaagaaaaatattcaaaaattccatttttttttctaacgcggcgcctatcgcggtaagggatgaactccgtctagccattccgtatcagcaaacttcaaaaatctatcttttgttgataaaaccagcaaaacagtatcattcaacttttttttctaaaaaatggcctttttgtctaaaatctattacatatgaaatcgcacaaaaaatctaattttttaccgctggtgcctgtggcgccgccggtgaatttctaaaaaactgacttaaaacaaaaat

SEQ ID NO: 42984 - DNA, 1055 bp, Heterodera glycines
  unsure (1)..(1055): unsure at all n locations
ttttaaatttatctatatccaagaaaaatgactatctctcttttgagaaatttatacgtacaaaagcgctcgagcgtgagagggagggcggtgcgcaatcgccatntaatttctcagagaattttaaatnntatcttatatccaagaaaaatgactatctcttcttctgagaaatnttatacgttacaaaagcgctcgagcgtgagagggagggcggtgcgcaatcgccatttaatttctcagagaatttttaaatttatcttatatccaagaaaaatgactatctcttattttgagaaattttatacgttacaaatgctctcgagcatgataggaagtgcggcgcgcaatcgccatttaatttcacagagaatttttaaatttatcttatatccaagaaaaatgactatctcttcttttgagaaattttatacgttacaaaagcgctcgagcgtgagagggagggcggtgcgcaatcgccatttaatttctcagagaatttttaaatttatcttatatccaagaaaaatgactatctcttattttgagaaattttatacgttacaaatgctctcgagcatgataggaagtgaggtgcgcaatcgccatttaatttcacagagaatttttaaatttatcttatatccaagaaaaatgactatctcttcttttgagaaattttatacgttacaaaagcgctcgagcgtgagagggagggcggtgcgcaatcgccatttaatttctcagagaatttttaaatttatcttatatccaagaaaaatgactatctcttattttgagaaattttatacgttgcaaatgctctcgagcatgataggaagtgcggtgcgcaatcgccatttaatttcacagagaatttttaaatttatcttatatccaagaaaaatgactatctcttcttttgagaaattttatacgttacaaaagcgctcgagcgtgagagggagggcggtgcgcaatcgccatttaatttctcagagaatttttaaatatatcttatatccaagaaaaatgactatctcttattttgagaa

SEQ ID NO: 42985 - DNA, 869 bp, Heterodera glycines
tagaatatacaatttagcactccggtggtttagcttaatagagcatttattttccctatttttttatctcccaaaatgattaggtcaacaatgtgtcctcctcatcggccacttcatcagcagcaggtggcagcggcggcggcatcgctttgccatctgctaatcacccatttgtttcaccaacctcattagtgccacaactggaggcagcaaactcattttgggtagaaaaaacactcatttcaaatgggaaaaaataatttaattaaatagttaaatgtaaatggacaaatcccattcccgagtgggtgttggctggaaaaccgggccaaaaataataacattaaccttttttttgaaattacatacttttcagggtgcactgtttcccctcccctatataaaaatttttacaaaatttataaattttttttgtaatttttctagcgatttaaaaaaaaataattaatgctgaataaagtttctttttaatgtttccaaaaaaaaaaaaaattgttgaaatatttttcaaaattgtatgagaaacgaacttctcattaaggccgtagccagacccttggcttcgggagggggctgaagtcaaaaattcgatttttaggggtgtatttttgctttttttgaaatcccgaattaggagcttattttggaaaatttttcgccaaaaaattactattttttgccattttggccgcaattttacaaaattatgataaaatgggggtccggcggtgccgataggcgccgccgggaaattttttgagtattttaatgcacttttgttaagaaaattgtttaaaatttaaaaaaaattactgaaatttttttacttttttgggtttcgggggggg

SEQ ID NO: 42986 - DNA, 737 bp, Heterodera glycines
  unsure (1)..(737): unsure at all n locations
aacagagacaagacgtcagtgtggactttggagtgaagtgagtgccccgggggggggggggggtaatgcaaattagcaaattggggacgaaaagcaaagcgaaagaatgaagcacggatggaaggtgatggtggtggtgaccttctctgaattgtttatgggaatgcgcccaaagatggagcgaaaatgcaataataatattttatttattcatcaaagtgccgagagtgcttaagggcctgggaaggtcaatgccacttaaaggggggggggggggacaaatgggagataaaagagggacaaatgggagacaaaagggacaaataggagacaaaatagggacaaatgggagacaaaatagggacaaatgggagacaaaagagggacaaatgggagacaaaatagggacaaatgggagacaaaataaggacaaatgggagacaaaatagggacaaataggagacaaaatagggacaaatgggagacaaaatagggacaaatgggagacaaaatagggacaaatgggagacaaaaagagagacaaatgagagaaaaaatgaagaaaactaaggtccaaataataaaaatggccctttcttcccgtatttctcaaatgaccacggtttttagcgaattggttacccaacaagttatgtccgatgccatcatcccgaactgctcttactccgtccacnagtgacgaatgaatgaatcacccatttttttctgtttgccat

SEQ ID NO: 42987 - DNA, 1111 bp, Heterodera glycines
aaaatgaccaaaataggcttagaatcacatttgaatattttacaaattaatttttatatatcattttttgaaaaaaattttagggatacattttcaaaaaaaaatttttaaattttttacaaaaaatttctataaattctcaaaaatcctcaaaatatgtaaaaaaatgaaaaatatgtacgaaaaattgcgaaatatgtacgaaaaagtccaaaatatgtataaaaatatgtacatatttaatatgtagaaaaatcccaaaatatgtaaaaatatgtaaataaaagtcccaacttttgttcgcaaacacaaaaaagaaagtgtttttcctactaattaggctatggagaattcagcagtaaaaaaatatgtatttacataaaattagcagccctaaaaatgattgttaaataccaaaaagagtttaacgaaataacaaatgagaaggggaacggattttgcaaaatttcgcatttgttttatttcatattgcacaattttatcatgttttgtattttgttcttcggtttaaaaacctaaaaatgtgtgttcaagtatttagcttaattaatgataattaattgggctaatatttatagttttttcacaatttttttcctgagcccccgtagcctgaaatgcacgaaaaacatgttttttcggctgttgttaagctagttttcgagttattagcaactatttttgtagttttttatttttagcaactaaaaaactataaattttttgaaaaaaactattttcaactattttggcgttttgcccaaaatttgcaataaaaacgaaaaatcacccctattaatcgaacataaattttttaaaaaaaatacaccactaagaatcgacccgaaaattttcaaaaatgcacccctaaaaatgaaaaattttctcaaaaattcacatccaaaaattatttgtttattttcgtgattataatttttatttttgaaaattatttatattcttaatgatttggcaaaatattttcgctttttgaagaaattttcgattttacaccccctaaattcggaactttttagcaactatttgtccagttttagcaactattttggggggttttttagaacactaa

SEQ ID NO: 42988 - DNA, 81 bp, Heterodera glycines
caagctgcagccatcgggcttcgcctcgctgcgcgaagtggcgtcggcgctgcaggacctgcgcgcgtccggcaagcagct

SEQ ID NO: 42989 - DNA, 891 bp, Heterodera glycines
attttccaatttttcccaaacaaacgcgacgagaaacaactaccagaacaattagtatcgcagtaattattctgagaatgcggtaggacttcctattactgtcgagcagaaaaagagatagccaattttccaaatttttcccaaacaaacgcgccgagaaacaaattccagaacaattagtatcggcgtaattattctgagaatgcggttggaattcctattactgttgagcagaaaaagagatagccaattttccaaatttttcccaaacaaacgcgccgagaaacaaattccagaacaattagtatcggcgtaattattctgagaatgcggttggaattcctattactgttgagcagaaaaagagatagccaattttccaaatttttcccaaacaaacgcgccgagaaacaaattccagaacaattagtatcggcgtaattattctgagaatgcggttggaattcctattactgttgagcagaaaaagagatagccaattttccaaatttttcccaaacaaacgcgccgagaaacaaattccagaacaattagtatcggcgtaattattctgagaatgcggttggaattcctattactgttgagcagaaaaagagatagccaattttccaaatttttcccaaacaaacgcgccgagaaacaaattccagaacaattagtatcggcgtaattattctgagaatgcggttggaattcctattactgttgagcagaaaaagagatagccaattttccaaatttttcccgaacaaacgcgtcgagaaacaaattccagaacaattagtatcggcgtaattattctgagaatgcggttggaattcctattactgttgagcagaaaaagagatagccaattttccaaattttccc

SEQ ID NO: 42990 - DNA, 615 bp, Heterodera glycines
ccgacgtcgccgtgtcctaccggtacagagaggcgctcctcctaggcaattgcgcttttgcgtcagaagttgcggttgctgtagaaccgtctgctgcacgaagacgcggattgcattggcactgaactgcggcggatcagcgcaacgccgccacctttgcgtagtgagcagcagcgacgacggcacgaggcgctgtgcgtacggagcggcgaaattgcacggatgacaccactgattgggatgctgcagcacaagctgagcacgctggacgacgcgtgcacgaggcgagaggagcaggcggagcaggagcagcaccagcagcagctgaaccaccgaggggaacggggaacaggtaaaacatacacaaaaatcaagcgggagaaattttttgtagaaatatttttatagagaactcggcgaacctgaccacgggaaggatggagggatttattttccattaattgaccgtttttctatccgccccttttccgttaaaaagatgggacttttgggcatctaaataaatttttgcaattttttagaaatcttactaaaaatttaacgagaacgactgtcggcactatcgaatcacaaattttctttagtttccataaa

SEQ ID NO: 42991 - DNA, 931 bp, Heterodera glycines
atgtttttttccttgttgttaaactactttttgactttttattagtgcctattttctaggtttttattttagagcctaaaaaaattttgaaaaaaaactatttttgcctaattaggaatttttcaaaaattctgattatttaaaaaagttaattcatttttttaacccgggaaatttaggccaattggaaattcataactcacttcaggattggacaatgttagtggaataaagcttaaaaaataaagaaaaatcgggagaatttatattttatttgtttttttaacttaaagatgaaaaatgtttttccagaaattctggaaattttagacttagctcatcaagagctttcgaatgataccaaatttgtcaggtttcgatcgttttaaaaatcccccggataagtcaggagtgccaaaaagacataggttcaaataggtaaaattctcatttcaaggccacaccatcaatcacaagtgcacagacaaatgttaaaacattgtcaagtgatcaaagaaaggatttgtttgtccggcttcttatctgtgattttttgaacgggttatattccttatttgtgattttgcaagttctcatctcatcatttttgtaccagtgtttcttgtattgaaaagtgaacaacgatttgaatgcaacaaaaaatgttatcatataactgatgaaacaaaggcaatttctttcactttccgtcgctgcttctttttctttgaagccttttcgttattttctgctcgcggagcgacaaacatttttgcattttgtcggctttccaatcgcatttgaagaaattttaacgcagctatattgaggccaacgcaattctgaaaaaggcaagcacaaagtttaatgaccctttgatcactctaaaacatcgcaacaccaaccaaagtgtcagcgatatgtttggcaa

SEQ ID NO: 42992 - DNA, 1286 bp, Heterodera glycines
ataaaaagttgataaattctcaattcgctgttttcgccttccagacgctctaatctggtaggaatcacattcattccccataaggaaatagacgcaattatcgcatcacattttggtctcttttttcatattttaggctaccaaacatttgtagacggcacaaaatttagcacacaatgaatgctttagcttagcagtgttttgatattgaaaaaagcaaatatatatataataaatgtatttttaaattaaaatatgtagttttcaaataataaattattcactgacaaatcaaattaaataatttaatttgacaattcaacggcaagaaaaatgttattcgaaggctcagcagggcaaaattattgtcattgtttagctcctaaaaacggtatcgttttcatcattgccttcgcgaaggattcacaaaaacgcaaagcgttaccaactgagccacgcaaaggcacgaagacaaaaagcataaaatgcagaataaatgttttattttttatggtcaagtccccggaatccctgcttttttttgtgctagaataacatgaaacacattttcttggctttttagggtcgctgatcacgaatatggcattcattttgacaattgcgaagcttggactcgatttcaaacaaaaatgaaacctaatttattttcaaaatttatattagataaagtacttgatgaaaaatcatagacaaaatcaatgattttgcaaaagctgaagtattctgatttgggggtagtaaccaaattttgttctgattacttttaattcattttaaataaacgaaattttatggcaaaaagtcattttttggacaaaatctgttaacaatttatttcttttccgaaattgttaaatcgattcgggcggcgaaaaatattatatttgatccatttttaatcgaataaatagttaaaaataacatttgaagcaattttgcaaaattttctgattttgaaaaattttagataaaactcttatgaatctgtgaattgttttattttcttcattttgataaaattttgtaaatatttcttttccttttacaatttacaagtttttcttttctttgtaaaatttatgaatttattccaattttacctttttacaaactgtgaacaaaggaaaatcgcattattatgcaaaataataattaaaaatagtttttaatcgaatgctcaaactaaccaagacggcatgtcgttgtcactgttcagcttaaactagatacgctcaataaaaaattcaaaattgtataaatttttg

SEQ ID NO: 42993 - DNA, 734 bp, Heterodera glycines
gaaataccaaataaatgccgaggagggacaagtgatcgccgcatatattgtgggcaattaaataattattaatttatttaaaaaatgattttacataatttatcagtcggttaattaattgataactaactaattgattggttaattaagaacaaagctcgcgcgcgaattgccttaggcgaagcgccagaccttccgattgcctccggcatgaaccaaattgtaattaattaataaagcaattattaaattcacgcaaaacaattacagtaaatttaacttttagaaaaataattttttaaaatttttctgtacagaaatggagggcgtcgttagcagccgaagctgtgaaagtgttgggaacaagtcaaaacaaagcagtcaatgttttggatttggaggtttcactttaaaattgaatattttttggcacaatgccaacaaaaattgattaattaatcgcaacgaattgcattttcaaggcgattcatctgatcgccggtggatatagtcagcagcagggcgaaaacggcacgggttacggtatgaacaacagcgaattgggcggcgcaggatacggtaacgagcgggactacggtagacaattctccaaattttccatttgaaaacattaaaattgcaaactttcaagatttaggattcttctcgggactgaataaaaattacatcgaatagagtgagttatttaaaatagtttcttaatcacaaatgaa

SEQ ID NO: 42994 - DNA, 955 bp, Heterodera glycines
  unsure (1)..(955): unsure at all n locations
attttgaacaaatttatggccaaaaaggttgggtcttttaattcttttggccataacttttttgaaccttaatgaaatttttcaaaaatttgcaggctaatagaggacacttagagcttccgaatgataccaacaatgttggatttgattgacaatgaaaaaagttatagccaaaaaaatgccggcgcccaactgagcggttccgtcaacaagatataaaattatataaaaaaatcacaaaattttcaaacccacacagaaaaaaccatattattatatgcatatatatttatttatacttatatataaatttaaaaattattttaaattttaactccatataatttcagtttaatacataaaaaaataattgttaaaaaaaattttaaaatacataaataaaaaatcgaactatttataaaagtccttgctgagaaacttcaacatttgattgctcctcaacacgagttttaaaaaagaattattaatcattaaaaattcagagaatgtaaacatttctaattttaatgaaaaaaagaaaaaagaaaatggaaaataaacatttattataatttaattaaatttttttactataagataaagattaaaaataataaatagtacaatatttatgtaaaaattaaagatgaattattcaaaataataaagcgaattcaaagtttatttaaattaaaaaatttgtacttcacaaattaagtgaattgcatttgataaaagactaaataaaacattaataaaatttatttcttaattattaatacctaattaaacggaaggttataaatgaaatagcaaattgtactcaatttaaattaagagaaatagaaaataaatttaataattcaatactanaaaatttaatattttttgacggacaccccatgaggataaataaacataaacaatcacaanagtaaaaaataatttacctaat

SEQ ID NO: 42995 - DNA, 1211 bp, Heterodera glycines
  unsure (1)..(1211): unsure at all n locations
aattaattatttattttctgtctgtcaaatgttttcttcgccngacttttctttttgctaattttctttctctccaccacaaatggcacaacagaaacaacaaaaaacgcacaatcggcgccggaaaagaaaaagctcaaaattctcgtctattcggtaatccccgcgcacagtcacatgcaatttatgggagcaattgccgactcattggccgaggcggggcacgaagtggtgaggaaggacggacagaattttagaagaatttaaaaagcaattaagcatttcatcaaaacaattgacgacgatttgcaatggacaagcaaagccgagagcaacgagaccaaactgtcctccaaagtttaccgggttgtgctcaagtcgcgcgaagcgcccgttgcgacttcggatgtgctttatccgttcagtggggacaatgcgtggcaaatgcgcaacgcatgggacaacagattcgccaggcttttcgatttgtggccatatttttgcaaaggcaattaattattcctaattaattgcattacattttcaaaatggaattcactgacttttcagaaattgccttccgtcacgaattgctggacgaattggccaaggagcgctatgatgccgccatttatgaactgttcgatctgtgcggtgctgccattttcgagcgcatcggtgtgcgcaccaaattggcaacacttaccgtgccaatgtatcaaacgactgccgcccattttggcattccaacatttgccagttttgtcccaagtaaaaaacgaaattaatcattatgaggagaatcacaatttcctgttcaaataaatttgccttaatccgctattcacagattgggctcatccgccgctcaatgcgccggcgatggacttttgggagcgtctgatcaatttcctcaacactttttacgattggtacaaattgaatgatcgcgtcaccgatttgcaggtgcgttcggtgcatttgttgtccattgtatttttagcatttatttttatttttattatttcagatttttttccatattttacattcatatttcggtactttcacaaaaataaaaaccgaaaaatacacctctaaacatggaaaattttttggaaattttgtaaattgcaaaatttactaatttttgctttttttctaggttcaatatttttcaganaaataataaatatgtgctctcaattatg

SEQ ID NO: 42996 - DNA, 926 bp, Heterodera glycines
  unsure (1)..(926): unsure at all n locations
atttgaaacgcaaacaaaaaaaattcttagaccaaaaaatggctatctcttttttctcatttttttaccgcaaacttggtaccaacagttgccttctcttgtctggccctatcaaacaatcttacgatatttgaaacgcaaacaaaaaaaattcttgaccaaaaaatagctatctcttttttctcatttttttaccgcaaacttggtaccaacagttgccttctcttgtctggccctatcaaacaatcttacgatatttgaaacgcaaacaaaaaaaattcttgaccaaaaaatagctatctcttttttctcatttttttaccgcaaacttggtaccaacagttgccttctcttgtctggccctatcaaacaatcttacgatatttgaaacgcaaacaaaaaaaattcttgaccaaaaaatggctatctcttttttctcatttttttaccgcaaacttggtaccaacagttgccttctcttgtctggccctatcaaacaatcttacgatatttgaaacgcaaacaaaaaaaattcttgaccaaaaaatggctatctcttttttctcatttttttaccgcaaacttggtaccaacagttgccttctcttgtctggccctatcaaacaatcttacgatatttgaaacgcaaacaaaaaaaattcttgaccaaaaaatggctatctcttttttctcatttttttaccgcaaacttggtaccaacagttgccttctcttgtctggccctatcaaacaatcttacgatatttgaaacgcaaacaaaaaaaattcttgaccaaaaaatggctatctcttttttctcatttttttaccgcaaacttggtaccaacagttgccttctcttgtctggccctatcaaacaatcttacgatatttgaaacgncaacaaaaaaaattcttgacaaaaa

SEQ ID NO: 42997 - DNA, 1373 bp, Heterodera glycines
atcaaatttcagagatgaatttgagtttttaattatcttttatggcctcctgctggggcatataactgtaaatttgtgattttcacagttaaattttgccaaaattgcgcgaaaaatgtgaaatttatttttatttaaatgattttaaacaaattaaattaaattattttaggtttttgttttttttattttccattcaaaatatttaattttttttctcattttaaacttccaaagccacttttcgccattttgttcacagttcattttaatttttctcctcattaacacccctaactgtaagtcttttttattttctttctaataaaaaataattgtttcatttccaagtaaaaaaaaaactcgccgaaaaattaaccaattacaaattaaaattcctttgatttttttttgcatttaaacccaaggcaacttttctcaaaatacataaaaaatgttttaattttttccaaaaaatcgccgcaactttttttttctcaaattaaaatacttttcacttttttccacgtaaaaccccccaggcgcaattttcgtcttctcccctttctttcgacacccaaactaactaatctttgttctttcttctcggcccaatttgcacatgttctctgttggcagtgtgttaagagcccatcagattggtcccgccgggggccacaaacttcgaacaaatccatccaatggcaaaaagggggtaggggggggggaacacgaagaagaagggaagaagaagattacgattaatccccacgggggggggggggataatccgccgctgcacaaaaaacgccgctttttttgtcccggacaaaaaatataccgaaaaaaactgggggggggggggtcaaataatgcaaagatagccccctcagacgacacttgttcttatttattattgtctgcatctccccaccctcccccagatattcaatctttttatggaacaaaagaataggcacggtttcagatgcattcttttaaaatattactaatttttcaaataaaatgcacaatttggcagaatttatttaatattggaaaatttaaaaaaatagattaatgtatgatgatcagggatgatatttatagttgctaaaaacttccgaatttaggggtgtaaaataacaaaattttattcaaaaataaacaatatgaatccaaatcattattgagattcacgtagcaaataagaaacatgtcgagttgatcgggagatagacgtgagcgattatcagttacaatagatttgtaaattgaaaagatcgttcgacatcacatttttatagctttttagttgctaaaaataaaaaactaaaaaaatagtttcctaataactccaaaaagtagcttaa

SEQ ID NO: 42998 - DNA, 1248 bp, Heterodera glycines
  unsure (1)..(1248): unsure at all n locations
aagaggtacaaaagtgattagaagaggtaccaaagtgattagaagaggtacaaaagtgattagaagaggtacaatggtgattagaagaagtacaaaagcgattagaaaaggtacaacagtgattaaaagagtgattagaagaggttcaacagtgattagaaaaggtacaacagcgattagaagaggtacaaaagtgattagaagaggtacaaaagtgattagaagaggtacaacatggtttaaaattaaataaataatgaaaagtttttataaaaatcgaatgcattttaatttaaaattttttttataataaaatactctttttattcattaaatataattttgaaaattaataattgaatatttattttgaaatgaaattcatttttataaattcaaaaaataaataatgaaattaaataaattcaaacaaaaaattaattttaaaaaatttttcacaaaaaaataatttaatttaaattaaaaaattaattaaaaaaaacaaacactcttttaaatgaattaaaaacattaaaaataaccaaaaatgcatagcaaaaagaatgtacaccgtccggatccgaacctgccccccccccctcaaaatgatgcctcagaatccccaatcacacagggattctgaggtcttaacgatgtctaaactaaaatctgatcacgtattcgtgatcagcggcccaaataacccctaaagacatatttttggaagaattttgtgaaaaaaaaattttccattcaaaaatcatgtgcacccccctttggtcccgaatcccaaaatcacttttatttttgtaacatctctcaaaaaagtgataaaaatgccaaataaaatttatataatagagcataaaattgcggatttttgtagtattttacttttacagaatgacttttcagaagcgagttctgaatttttttctgaaaaatctaaaatttccagaatttctggaataacttttttcatattgatgttagaaaacccaaataaatccgataaaattctcctgatttttctctatttttanagttttatttgctcaaaattggtcaacccttaggctagatatgaatttttcaatattcgcccaaaatcccgagggccaaaaaatgccaaaaataaagattttanaaaattcaaaaatctgaaactaaaataacatcatattctactcagcaccttatttaccccagaaaaatattttcacccccattttcgtccaaaaaaaattt

SEQ ID NO: 42999 - DNA, 731 bp, Heterodera glycines
tccgtttgggggtactcaaacaattatgggggagcaaaactccaacgcagaattaaagtacaggctatagtgaagctattcccgaaggattcggtctccccataaatctgggcgcatcggttcagggggactgccccgaaaacccaaaaaaaaattttttggataaaaattatttaaatgaactgactagataatatttaaaataggttatttctcttcctttcagtatccctgcaaagtttggtgcgcttctgatcagtttctgaaaaaaaagttaagcctaaactttttggcctgtttaaaaaggaattaaaaatttttaaaaattttattcatctccctttttgatagaaaaagcatcagagtgcctaaactaacatgtaaataaaatttggtgcgtttcagaaccctttctgaaaaaatatttaagaattaattttgcaaaaaataaataaaaacgaaagactcagattttcgaaaatttttttgagccagctagctcggcgctcatttcagtgtaagttagtcctttaccggggagtatccctgcaaagtttggtacgcttctgctcaattagcaaaaaatatgagtgatcgaattttcactaaaaaagttaagcctacattttttggcatatttaaaaagcaattaaaaaatttttaaaatttaataattttcctgcaccgaaggtactcactcggcctcttcgcggcctcgtggtggggccttc

SEQ ID NO: 43000 - DNA, 1053 bp, Heterodera glycines
  unsure (1)..(1053): unsure at all n locations
agttttctgtgnggcattggggttttgccgtgcttgctgcctgtgtatttgttgaccaaatactgcagcagattttttggagtgctgatccgcagatccatgtcaggtctacgcaaaaatgttgctatttgccaatcaatttttgcagcctggtcaaggatccagcgctgaccaagtcctccaccacatgaaagaatgtggtggtattgcaactccacattttcatcccttattgcgagataatacttgcaataatctcgcagggagataaattgtttggatttgtcaatccgccggtgctgcgatgaaacagatgctacagattcagcatctgaatctgcgactgaccccgcatcaaatgatgcaattgactgagtctcgcacgactcattatctgactcggcttccgagtcaaataggccagatgcattctgagcaccttttcgcttacgcgatggtggtttagcatatttaatgccagttgtgtatccatcatcgcccattggcttgattaatggatacgtaagactatcagtccacggactgaaaggagcaatttcatttaattgcccttgtttgttctctacccaaattcctttgggcggaggagcaccagtggggtccgcatgaatagagaacatcccttcacccgtagaaggggtgattatttggtgtgcgtgcaattttgggtctttaagaccagctggagccctgcggctatccaacaaagtcatgcggaagaaacgaagctcttccggagattgttgttggagaagctcagtgagctgctcacgcgcctgcttatatgcctgcgcagcaggatgatgcacttggatcatttgttctaagatctcaagagtctgctcatttagctggtgaccctgcacaaactcatcttcgtttgtgattttctccccagtaaacctggggttgtttcgacgctgttccatagcctcgactgggtccagaatgtacaactggccaaagccaggaatctgagttgtaccagcctgcatgctgcttatgcggcgatggaattctccgttaagaata

SEQ ID NO: 43001 - DNA, 1542 bp, Heterodera glycines
  unsure (1)..(1542): unsure at all n locations
ccttgcggttgtacatttggtcgttgtacttgttccctattctatggcattactcggctggccatagaccaggatgctcacaaagagccatctcatctgatctggccagcgcgacagagctgcctccgccagagttttgtcccaaattttgtcgtcttcaagaagaccatgcattattgcagcctcagtgaatgaggtacaaagcaacccattaaccatcttaagatggtctgggtctccaggaaagtgacgcataagtgaatagagcgcgaacctttccgggtccgatgggggtacaggaacaattcgaccgattggtggtctctttgttaggttatatttccttttgttccatttgtcctttgcccatataaaatgctcagggactttttcaaaaagcatgtccttgagcttcggatcatgcttccattcattttgccattgtttccaataggcagaacattgcgtctctggcagttcgccttgctggatttgttgagctttgctcaccagctgaaaagccctgtacacaatcggttgttgattaggcatatggatgctaagtttgacaacctgatgtgaaagtttggcaaatggcagtgaatgaacaatggcatatgcttccgttgcaccacggaagttcatcttggcatattgagccggctcatcaattccgattttattgccggactcttgtttgcactcgacataacaatgtcctggccctttaaaagggtacttgagtgcgtatttaatatttgctttgttaccatatgcaaacagtacattatggtgtactcggtaacgcagcagaatataaggattatacggcacgacatgtgagttgtcgtatatcaggccgtttacctctaattgggcaccaccatcagttggtgaaggacggaaatacattgcgggcctgtccgggcgcaaatcgtacatttcgagtaaggagatgggaacccaatattgcaccgcccgtaaattgggtcgctaggaccacaacatctgtccctgcatctgtgcagttgcatatgcattgtttcgcggatttcgtcgatgcatttttgcaatgggtgtgtcggcatcattgtgcggtaacgatggaatatgcgcccatatatattggtgaataacataaggaattgcatccagggctgncggcgagcacaatgtgagcatgagggcccgcccccccncgcccttcagagcacgacaaatatttcaacaaaaatttttaaaaattgactagagcaatcgaacgctaacggacgacctaatggaaaaaaatccccgaaggagagaatttaattaaatccattccttcgggggaccgtgccgggtgccgcggggtaagcagtgctggttcgtttcatcacggcaccgaaccttttggctagtcagcaatcgttgcttaacttgccagatcggacgggtgcgcatgattccactgttccaagcaccccaccaaaagcaaaacgatataaccaaaatataaggaaaaattttttaaaaaattttttctccattcttcgacctgca

SEQ ID NO: 43002 - DNA, 1604 bp, Heterodera glycines
tgaaaagggcgtttcttctcgagagccctcatttgtcatttgacaaaagtcttgagtttcactaagcgggagagagaggagagatcagctgttttagaccaagcaaaacatcccccagacaaaagccgggaaaagcacgggcggttgcgagttcgcccacgcggacgccatcgaagatttatgcggtgctgctttggtgggcaacgcggcgcagtcgcgcagcagcacagccgagggcgatgtgcgcgagctgtacgaattgggacgacgccgtcgcgcctgtccgtactttgccagccgcgcggcgcttggcctttgccaattggtgttggtcccgtacaacattttgctgcacaaatcgacgcgagacgcgtggcggtaaggaaaaagcgcatctggcgaaaaaatcaattctctcgaatttaatccctttttgggatattgtttttgaaattttaaaagcatcgctaattatggcacttcgtaaaggcataaattttcgaatcaggctgaatttgcgcgacaatgtgctgatcgttgacgaggcgcacaatctgttgcagacattggcctccatccacgctgtaattttcatttggcaaagtgatcggcggaattggaatgaatttactttgtagataccgaccaatgccgggattagggggtcgagatcaatttgatagcactttgggcaaagtgaacggaattggaatggattttactggagagatttcggcagtgccgggattaggggtcgggatcaattttaaagcattcagattcgttggtctttcttgatcagcagttttactgttgactctttctttgcctttgtgtcaaccaatgattctcccaccgatccaaggtggagctgagcacgggccaactcagtctctgctccgcgcttatcacgactatttggagcgcttccgaaagcgggctttcaccgcgaaaccttcgccacattcgccaattgcattcgcttacggtcgctgtgtacaatttggccacttcgacggcaaaggaggaggacggcggtgccgaggagagagtgctcactctgacccaatttatggccaaagtgcgctagggggagggccaaattggggggggggggtcgatcaccgatacttaaatccgaattggattgattcccttttgaatagccttccatcgctcccattaggtccattccttcccccattagtcgcgtaattatcgacgattgtcccaaattcgcctttctttgtttaagtctccgctgtttcagttgggctccgcctcggacattgacctgttccgtctgctcgactacctggatcagtcgaaactttgcagaaagttgcgcgactttcgtcttcggcactccgcccgagggcattcccagccgaccgtcgcttcttccgagcaaagaaatggtgccgtgggactcaaatctcacaggggccgaagtgggcaaaagctaaagcagcgccaaacagcgaaaaaggaaatgccgaggggaaattctgcctcggaaaacattccgccatctgcgaatgagcacggtgaagctgcgacgccggcggacaccaattcaacaccgctttaccaattgcgggagt

SEQ ID NO: 43003 - DNA, 1062 bp, Heterodera glycines
  unsure (1)..(1062): unsure at all n locations
gagatataaaaaaatcgtctagaataattatctcaacannttgtcgggaaagtgaataaaatttcagttgcaataggcatattggcacaatacataaatgtagagcaggctcaaaatagaggaaataccaaagattaaaaaattcgtgtttatggcccactctgctttggctggacataactcgccagagagtggagatagaccctttgttgatacatttgaaaatgtagagctcggctagcgcattcgaataacacaaaatttgttttcatttgcccccaaacaatccgcttatgacgggccgaaagaaaattcacaaaaatttggcaccggaaaaactccatttttttatgggccagcataataaagtaaacccaaaatgtaagggaatttaaattggtcatgtgagatgtttagttttttatttgacccatccgttttctgggaaaaaacttttcgagaaaagctgaaaaattttccaattgcatcagaagcagactcaaattcttcaacaacataatgtaaaaaatattacgcaagaaattatttttagatcctttttagaaatgctgcataaatttttattgtaaatagtcacaaacaaactttttttcactcccaatatctgccagttatcatacaaaaaggcaatagttaagcactgagatataaaaaaatcgtctagaataattatctaaacaatttgtcgggaaagctgtataaattctgggaaaaaacttttcaagaaaagctgaaaaattttcaatcgcatcagaagcagcctcaaattcttcaacaacataatgtaaaaaatattacgcaagaaattatttttagatcctttttagaaatgctgcataaatttttattgtaaatagtcacaaaaaaacttttttttactcccaatatctaccagttatcatacaaaaaggcaatagttaagctttgagatataaaaaaatcgtctagaataattatctcaacaatttgtcgggaaagttgaataaatttcagttgcaataggaatattggcacattacataaatgcagagcaggcacaaa

SEQ ID NO: 43004 - DNA, 819 bp, Heterodera glycines
tgcacgtctcactgttcatcctgatcagggctttgctcgtcttttcccaggtccgatcaacgataaaattgtgtttttattagggactgatcaattcaatttatgatgatcaaaaaactaattaatttatcatgagtgatcagaaaactgtttaatcatatataatttaactatgagtcacaaaatgaaaagaatttgtgatctgtataaaattaacaaccaagccattttacagggtgttatgttcccggccatgcattgtctctggtcaaactgggcacctccgcttgaaagaggttgcaaaatatttaaaaatttgtttcaatttttcctaaaaaattaaaattgatcgcccgaagtgcagaaaagtgccctgaggcgaatttcagcaaattttaaccttctatttttttataaaattaaattcaatttcattatatcatcctgggctgcgaaacctggcctcactaggccgatcttttgaaaatttttgataaatttcttccactttcctcaaaaattaaattcaaattcgaaatatttccgccggagtgaaaaaaaagtgccgccaatgggtcgaactttaaaattttgacgaaataattattgaccaattaagagtgcttcccattaattaaggtcttctcacgggtgtcagctatgcaggtgcacaaattggcaatgtgctggtgatgccattgtccggtgtgctttgtcggcacggctttgacggcggatggccctccattttttatttgcttggcattgccggactgtgctggtgcctgttgtgggcactgaccgtggcaaatacacccc

SEQ ID NO: 43005 - DNA, 1186 bp, Heterodera glycines
ttggcattttcatcatctcttcttgtttattggcattttttatggcacaacatttcttatcttttcctcgtcttttcgtttcttgtggcatttccctatggcacaacatgacacacattagtgtctcacacgaaagtcacagaacaaaccactaatgttttatcaaaagcatgacacacattagtgtctcacactaaagtcacagaacaaaccaaagatatgcatttctatttcattaaaagttcaaataacattaagcataagcataattatttcacgtaaagaacacaaaaacaaaataaacaaacaaacaaacaacaaccactaaatcaaactcaaacaatatacttataaattttttcgtttacaaaaaacaaatttatataacaaataacttaataaactatgaacatagataaaaaaagcaaataaataggaacaattttaagaatgtttattgcaaaacaaattgaaaaatcaaaaccaaacatattcatttttcaaataatattttaacgcaaaaaccaaacattcttttttttgaattcatttttaacgcaaaacaaatacaaaacgccacgccacattcaaaaactggaactgacaaacactcaactttattatataggatttttaaaaaattaatttttagtttggtgcctttttaagatttttgttattaaatttgattaatttttaaaaaattaaatgaaatacttttaataatttatgcttcagatattgtggctttgacaaaacaaatttgaaaatatttttatgggttttgggcctcgcaattttcgccttaaaagttgaaaaaagtcataaaacccaaagaataaaatataaaataaaaatgcatgaagaagcctctaacagtgtgaaatacttttgtcattttaaggtcatttcgagtgagcagaaaaaagctatttgacttaaattccgagccctatgaaacaagagaatcacaaaactcattagagcatcaaattctttatttagtaaaagataaaagaaagttcgacagcgaattgttgaggggactatcacttcctcctttttgtttgtccatctcggctaatttctgtagtttctccacttttttgaagcgtcggcgaccaaaagacaaaacattttggaccccatagaggtactaaaagataaatttggaaggcatccataa

SEQ ID NO: 43006 - DNA, 797 bp, Heterodera glycines
  unsure (1)..(797): unsure at all n locations
cgtcagtagaaaatgcgtcagtgaaaattttattgtcacaaagcgaggtcacgaccacgaatccagtaccctttttggcctattccgaatcccggacctgaattcgaacaaaaagtcgaaagcccaaactttcgaatttagcatttttggttcaaaaacgccataaatgatctcttattgaaggattgatgggtttcagtttgtttccgtgtatttaaactgattttgaagaaaaaccctaatctcgaaaattttggctttcgactttttgttcgaatttgggttcggggtttgaaattcagaacaaggtcttatagaagtgtatttttatattacaatactaatgctacagaactttatactaaaatatttgtatcactgacgcattttctactgatgcattttccactgacgcattttccggtcacgctgaagaaaataagaaaagaaaattatttttcaccaaaatgagcgatataaacccaattactgccaactaaataaaatgaacaaagtgaggaaaatgaaaatagggatttgatcaaataggtcgagaatgaaaacagactcaaattatcaccagaaaattaaagaaaacattaagcaacaaggaaaacatcaatggaaaaacagagtcaaaattgagaagcaaattggaaaaattttaggctaaagtcgccataaaatatacaaatggaaattatttaataagatgaaaaagaattttgtgaggtcaaaaaagaatgaattcattttgatatttgatgaattnannatttatatgaccaaggcaaaca

SEQ ID NO: 43007 - DNA, 1055 bp, Heterodera glycines
  unsure (1)..(1055): unsure at all n locations
acccgcactgcgcgtggcatcacgcgcggtgccgaccatggcaacagtgagttgatgtgatcactcaaaaaatgccatcagtttaaacaattcttggccccccaacaaattggcagttgatcataagaaagtcgactaatgtccttgaaaaaggactttgaatcagttatccttgaaaaaatgatttccaaccgaaatagactggagttcttgattagtttttgatcttgaaaatcgaaatagaaatttatattgatcaattttgatcgaaattttatgaattaagagcagaaaaaaatattttgaccattttttgtatcggaaaaccaaaaatgacgacttttggtcgaatttatgtcggaagaacggcattttcgatcgacttttttgttttacggattttttgagataaaaattcacattgacagacaacaggtttctcgagcaatcccgatttcgagaccaattattgacctgatttatgccttcattgggattctcgatcagtttttgatggccaatgtttaaggatcaaatccatggacggggagcagccggtgcaagacgtactgggacgaaaaacggtggaggaactgtgtcggggcaaagagacaacaacggcacaaaacgcagcagtgccacaaacgttcaaagcagtgggcacaacgaaagaaacaaatgaaaagggtaaaaaatgccaaatttggcggaacattttggcaaaagcggaaaatgacaataacttttgaattgtatttgtatcaagtttattttttatttttaactggcagtcgaatttaaagggctttatgttacgaaaatttaaaatggtagaagcggcaattgaaaaattggaaaaatgccaaaaaaaaatgcaaaaattaatgaaaattctcgcaaaaatagcagaatggcatatggttggaaattctctgaggcagaaaaatgaattaaaaaatggaaaaaaatgccataaaaatatgaaaatgctaaaaatttgaaaaatgccaaaaatgcctanaaaaatttgtaatttttttcagctggcgccaaca

SEQ ID NO: 43008 - DNA, 481 bp, Heterodera glycines
gcggtcatcgatttggccaataggtgttggttgaaccatctgatgaagtcctgcattgttgccggcacttcctcaggtggcatcggctcgaagtctccgacggtcatttcgatggtgcgcaagcagccggcccgggtgtcgcgtcagcccattacttccaagtacagttcgaagaaggtctgcaaaaagtgttgcatttccactgcacggcatgtgaagccaactgattcactttgagcgtgaactgcttgacttggaaggcgggcttctgcagggcttgtaacagcttggcgtcatcggcgagtaatggatgtcgtcgtcttcctcctcctcctccgcttcagcttccacgtcgattgcttctgcttcggcttcttcgacatttgaacggcgaagatgccgcgccgctctcggacttgcttctgtcctgctgctccattttcggcatttttgctgcttgaattcgtcattttaatgtgct

SEQ ID NO: 43009 - DNA, 1107 bp, Heterodera glycines
tgtcttcaaaaatggtccgaaattacaaataatgatttctttattttttaatttgatcgaaaattttgcgaatttaattttatgttaatcaatataaatttaaatttttttagaaaaaatttccaaaaccttcctttccccaagaaatgttgaaaaataataatgaaaatttcgaaatggaaagctaacaaaaaaattaaactataaaatcaaaatctttgttcccatccgaatttatttttgcgtcttcttccatactaagaagcttcacaaaattcttatcagttatactaaattgattattgttttttaatgaaaaaatcactgtttaatatgaacatttgaaaatgaagaatttccgtggctctgatgataagatttttcaaaaattgagttccgcccgaaagacggaattcaaaattaatttaattttacttttgaattttttaataaataaattttattatcgaaaatgccatttccttctctttcgtttggtgtcccgggattcccattggccaaaacattccccctcactttgtaaatgtttgttgggatggacccataaaacattgctgcccccgaggggccaatgctttagcaaattgttgccaatttttggtgtccccgaggggcggacggggggggggctaattgcgatcaatcttatggcccgggggatgttctgtggtgtttgtttatggatattagatggatatgttatttaaaatgtgttcaaccctttttttatacaattattggggaacaatttttgaatttttttgggggggaaaaatccttaaacttttcaggaaattaattttattaaaaaattaaaaaggaaaaaaggaaaaaaataaaaattggaaaattttaaatttattaattttttagagtgtatttttgtaatgtcgaaacaaaattcgaaaatcgatttggagaatagttttttatttttttactccaaataataaaaaaaaattggcaagttgcgacacaacgccaaaaacttcctggattggtcgtcccgttgagaagtgactgacactcaattccccccccccccccccgagggacggacggagagggcgggggggggggggggga

SEQ ID NO: 43010 - DNA, 1330 bp, Heterodera glycines
  unsure (1)..(1330): unsure at all n locations
aaaaagatgatgtaaagtgccctgctgttttgtaataaataagtgcgagttattataaattagtgcgatttaaaattttttacaaaacataagattttccttcacattcatttaaaatttcattgaagaaaataacgataaaatattcacatttatataataaataatcagtggtttgataaaaggtgcttaaaaaatcacaactaataaacttaaaaaatgaaggtagatgacaagatgtaaattaaaaatatttttaattatttttatcaaaatttaatttaatttaaatagaatttcattttttccgagaaaatcaactaatttgcttataatgataaaaactattgtcgagatatttattaaaaaatttatactaacaaaagaaaggactaaaataaaaatatagcctgcaaaattaaaaaaaaatttcattaggcttcaaaaaagttatggccaaaaatgtttgaaaaccaggtccctgggtacttttggcgataactttgctcaaacttggtcaaattttttgaaatttaggtgagctaatagagaaatgttagggctatcgaatataccaaaattgttaaatttggtttacttagagaaaagttatggacaattggaaattttcatttgatgattttttatataacgccctttttgatggcttttatataacgacatagcaccccaaaaaaacagataaaggaaatgcaaaaagagaaaggaaagagaaacatagcaagggagagagaaaaagataaagggaagggaaacagagtaaggagaaagaaaaaaagataaaggaaggagaaggaaaacagagaaaaggaaagagaaaaaagagaagcagagtaaagagaaagaaaaagagataaaggaaggagaaggaaaacagagaaaaaaacagagaaaggaaagagaaaaaagtaaagggaagagaagcagaataaagagaaagagataaaggaaggggaaggaaaacagagaaaaggaaagagaaaaaagtaaagggaagaaaaagagcaaggggaagagaaacagagaaaaggaaagagaaacagagaaaggaaagagaaaaaagtaaagggaagaaaaagagcaaggggaagagaaacagagaaaaggaaagagaaaaaagtaaagggaagacatttttcttccgtagggtatgttagcggaccgccattagcggatcaatggaaatagcaatttaacttatcaattatttttcaaaaaaattaggggcataaaattttaaaaactatgtaaaacataaaatattcaattgtaaaaatttatttattccaaaaaannattaatcaacaaa

SEQ ID NO: 43011 - DNA, 1111 bp, Heterodera glycines
aaaaagagatagccatttttctgagaattaattcacaatttccgcaactcttgcggtatggaaaaaattttgaagaggctctgcggaacggattagcatcggggttacgagatagaaaattgtcctaaaaagagatagccatttttctgagaattaattcacaatttccgcaactcttgcggtaatggaaaaaattttgaagaggctctgcggaacggattagcatcggggttacgagatagaaaattgtcctaaaaagagatagccatttttctgagaattaattcacaatttccgcaactcttgcggtaatggaaaaaattttgaagaggctctgcggaacggattagcatcggggttacgagatagaaaattgtcctaaaaagagatagccatttttctgagaattaattcacaatttccgcaactcttgcggtaatggaaaaaattttgaagaggctctgcggaacggattagcatcggggttacgagatagaaaattgtcctaaaaagagatagccatttttctgagaattaattcacaatttccgcaactcttgcggtaatggaaaaaattttgaagaggctctgcggaacggattagcatcggggttacgagatagaaaattgtcctaaaaagagatagccatttttctgagaattaattcacaatttccgcaactcttgcggtaatggaaaaaattttgaagaggctctgcggaacggattagcatcggggttacgagatagaaaattgtcctaaaaagagatagccatttttctgagaattaattcacaatttccgcaactcttgcggtaatggaaaaaattttgaagaggctctgcggaacggattagcatcggggttacgagatagaaaattgtcctaaaaagagatagccatttttctgagaattaattcacaatttccgcagctcttgcggtaatggaaaaaattttgaagaggctctgcggaacggattagcatcggggttacgagatagaaaattgtcctaaaaagagatagccatttttctgagaattatttcacatttccgcaactcttgcggtaatggaaaaaattttgaagaggctctgcggaacggattag

SEQ ID NO: 43012 - DNA, 1551 bp, Heterodera glycines
  unsure (1)..(1551): unsure at all n locations
cactcaattataaataatctgccaaatcttggtgattgtaaaacaggggccgaggttaacatttgttttagcttttctagcgcctcgttctgttcttttccccaattttcttcaattttaccctcaaatttatcctgagttaatgtttgaagtggccgagcaatgtgcgcaaaattttttataaagcgccgaaaataggtaagtgccccaagtaacgattttaattccgttagcgttttcggtggcctaaaattctgcactgcttttacttgttttgggtccattcgaactcctttttcgcttaataggaacccaagatatttgatttctgccattccccaaaaacatttctcgattttaagttttagtccgacatctctcagaagtttcagaaaattttcgatatcgaccaagtgcatttcttcagtttcgctcccaattataatatcatccaaatatattagcatggcagcggtcaatctcctacgtaatgaattcattactcgttgaaaagtgtcaggtgctgctgttaatccanatggcatggttataaattcgtatattcccaaatgtgaaatgaacgctgttttctcatatcttcctttgccattggaatctgcataaagccctgttgcatatccatgcatgtataaaactttttggctcccattaggtctagtaattcttgaatgtttggcagatggaaaacacgtttttttgtcattttattaagtgcccgatagtcaactgcaaatctccacgatttcttatcagcttttgggaccatgactatcggagatgaatactctgattcagattcccttatgatgttttggtccaacatcattttgatttgtctctcaatttctttttgtgtttcaggtgggtaacgataaggtctgaagtgaaatggtagggaccctggtacaaggtcaattcggtgaacaatagggccgttgtaaagtccaattttaccgtcatcaccgacgaatgcctcagaatatttatcaacgatattttttagcgaaatttgtcccgaattactcagtttcgtcccctcaagacatattcttttagacggagggcgattcaatcccggttttgggagagtaggaagtttggtactccatctcacctctggcggaatataatctttaggagagatttcatcacctggtaacgcatttatttgaattggttctaagtcagccaaatgtgaattcccataaattttaactggtgctttccccgcattcattagctgtaaaattacgtttttgctttctcccggtgcaaccaaagttcgacccactataattccagggtattggtgttgcactccttttaccaagaaattttgttcactcgggaaaacttcgtttacccgagccatgacaatattttcagtccagggttcaaaaatttcggtcttttccattgttattcgtaacgggntttgggatggttctgcacccacaactgataattaatgttggtccaaaacttcctcctaaccngaactttctttttctgcccacgaaatttatgcct

SEQ ID NO: 43013 - DNA, 722 bp, Heterodera glycines
  unsure (1)..(722): unsure at all n locations
gtccgcgaagnnggaaacaccggccaaagcgaattcaaagattgttgttgttgttttacatttgttcgtaggtagcagaaaaagagcaaatcaaccgcgaaaggtcatgccaattcgggattagagaggaatgaaagggaaagtgtcggacagcgaatggaaaacagccgaaattcataaacaatttatgctgtcttaattgattttaactgttcactctcattatctgttattaactttaggcgattccgaccgcgaccgtttttgggaccacgaattgttcggcccggtggtcgcttcagtggcggcaattgagcgcggaaaatgtgcggaactctgtgacgatttcacgacgcccgtcactgacggaaaacgctttaggagagcggaaaaagcgaaatcggagagaaaggtgaaaaaagtcaaatgaagatgcacttttgaactgtttatgttcagaaagggcccgccgtcatttacagttggcgttctcacaatccttcggccgttgaaacgcctttgggcgaatgccaatgcgatctcagtgctgcagcacgatccgagtcagcttcggatcgttcgccggcttcttgatctgaccaaattattgccgatttcgacccggcgaatatttattcaaaaaccgaaagccaagaaccgaatgaatataaaaaaaaacgatatcaattattatcccctgttatttgttatatactaattaa

SEQ ID NO: 43014 - DNA, 975 bp, Heterodera glycines
cattgcttaattgctcaccttcctgtttcgggattcggttcggatctgagcattaagtaaataaacattattaattgataaattcattataattaatagacaatagaatttatcaaatgaacgggatggggcttcacgatcaatttaggaaaagaaatcatcgttttagtttgcattaaaatttatcattttaaaatagtcatcgggctcagccttttttcgaatggcttaaaataaaattataaaaattatttttatttttgggtttacctttgctctttccttttttgccggggtcgttcatacagtcgcagaaaatctccatgattgagaggagcagcacacacttcagtagaatggccatgtctggtgttgattcctttgcttcaaatgttgattgaattatgatattcttgcctttcctttctgattaaataagggaactttgccacgttgccaaacgtggcattttgcctaattctttcggctgtgtgcgtcttccttttgtgttatttcatttttttctatacccctttcatttatttctgtttccattatatgcaaaatgctattactttttttctctgccatataaatttcatagaatacaataaaaactataatttttttttgtcttcaccccacattatgcctattttcattgttggcttttagcaattgccggccttctccccccccccacaatgccattgcctgccttctcccttctcccatgtttataatgacagcagagggacgacgaaaatatgacaaaacgtcatacaatattaacgcatgtattgatttacgaattttttaatattttacatgtaattaaataataaaataaattgtaaagtatagaaaaaaagttttacgacttttccctgaaatggcccaaatttggcgtaacaaaaacctaggttcaaactttgaagacttttatcttttttctgcgctagatacaattttgaa

SEQ ID NO: 43015 - DNA, 1053 bp, Heterodera glycines
  unsure (1)..(1053): unsure at all n locations
tgccgtccgccctctacccatccaaagttctccttcttgtcatcatcggcactttaaaacccaaccgtgccactagtaccagcagcactcatctttcccagcggagaaatgtgccaacttagtccgggacggttcacttttggctggcctttttcttaaaaaaagcacgcaaaaattttgtaaaatttgaagccaaccaattaaaatttttttatttctttaaaaattaattgttgttaattttcaatgaacttcttccattcaactttcctataaactcaaattttcgattccccctcagccgcccatcggtcggtcccttttgtacaatttgtttccccgaggggatgcaaaaatttcattttttcgttcaaatgcttgtggcttttcttggcctcattgtttttacgaatttagctaaaaaaatgattggtcccccgagggcacaaatactaaatggtgaacaaacatgccatggaatcctgttgaaactttcaagtttttctcgtcttcattatgccaacaatattaggtcagggtagaaaattttattagataacagggatgtaagccgatgtcttcaaatttttttccacaacaaattttgtctcataaaaatctgtttcgttttgcatttgcttttttactccccgtcattttcacccccatccatcacccccgcccaaaaatgaagtcattcccgcctccccggagggagcttttgaaattttattccaggggaaggggtggcgcaaaaagcatacaactgcggattcatcacggcccatttgtctctgtgccgctttttggttggtttttgttagccatccttcgcagtcagcgtttttgcaatttgtcctctgctcctccgntcccccccccgcccccaacgcacactaaaatgaacacacaaaaaaaaatgtcccaaatgagtgccgcgcatcgcccgtttggtgaatgatgtcgtgtcgcggcacttccgctgctaatttgcccganaaaaagttggcatcacggacactactcatcccatccatcactcatctannagtg

SEQ ID NO: 43016 - DNA, 1000 bp, Heterodera glycines
  unsure (1)..(1000): unsure at all n locations
aaacaatgacagtggctgtcatcagttgttatgctctatttatgattttcgggccgtttgagtatatgtgaggtatggacggtccaaaaaaatggctatctctttttttggcaatctggtaatagaaatctctttggaaacaatgacagtggctgtcatcagttgttatgctctaaaaatgattttcgggccgtttgagtatatgtgaggtatggacggtccaaaaaaatggctatctctttttttggcaatctggtaatagaaatctctttggaaacaatgacagtggctgtcatcagttgttatgctctaaaaatgattttcgggccgtttgagtatatgtgaggtatggacggtccaaaaaaatggctatctctttttttggcaatctggtaatagaaatctctttggaaacaatgacagtggctgtcatcagttgttatgctctaaaaatgattttcgggccgtttgagtatatgtgaggtatggacggtccaaaaaaatggctatctctttttttggcaatctggtaatagaaatctctttggaaacaatgacagtggctgtcatcagttgttatgctctaaaaatgattttcgggccgtttgagtatatgtgaggtatggacggtccaaaaaaatggctatctctttttttggcaatctggtaatagaaatctctttggaaacaatgacagtggctgtcatcagttgttatgctctaaaaatgattttcgggccgtttgagtatatgtgaggtatggacggtccaaaaaaatggctatctctttttttggcaatctggtaatagaaatctctttggaaacaatgacagtggctgtcatcagttgttatgctctaaaaatgattntccggccgtttgagtatatgtgagggtatggacggtccaaaaaatggctatctctttttttggcaatctggtaatagaaatctctttggnaaacatgacagtggctgtcatcagttggtatgctctaaaa

SEQ ID NO: 43017 - DNA, 991 bp, Heterodera glycines
  unsure (1)..(991): unsure at all n locations
atggccaattccacgcgcgcggcnccacccaacgccaaagttttggaggcaaaggccgcctgaacagtgctcacgtgttcgctgttgaacttaaatttaagaaaaagccgacaggaaagagtccatcttcggactaagaatcaaatgaccatcacattcatttctacaaacaatcggagaaaattgagttgttgagttactttgtcttcggtgtaacggaccatcagcgatgttttgccgacggcgccttcgcccaacaaaacgactttaaatgctctgattgtctcttccattccattcggttgggatcagcaggaagttctcagtctttgttgttactttcaattcgtgataaatttgaaaaaataaaataaacgaacggaactaaaaagggcaaaaaaatgaaataaataaaaaaaagatatttaacattttggaaagtgttcataagtagagaccggcgcgggattttgcggggtcccagtccgcaatcccgcattttttggaaaatgcgagattaatcccgcgggatcccgtcccgcaaagaattttgaattccaatcccgcaacgggatccgcaaatttgactttttgtgcgggattctgcgggattttcattgatttttttttgaaacttttaaagaacagaatgccaaaattttgaatgaatttattagagaccggtaaaaaaaaatttccgggagcgggatcgggagttcaaaattttacgggacgggagtcccgaacgggaatcccgttaaaatcccgctcccgttaaaatcccgtccatttttaacgggagtcccatttttaacgggagtcccgggcgggagcgagagtaattcgaaaatttaattaaaaacacaaaaatatttttaatacacaaatttgaaggacaatccttttattcgattcagaaaaattataatatgcaaaaagttgaaataaaaaaacagattttagggtcgaaaatcagaaaaattttttcaaa

SEQ ID NO: 43018 - DNA, 1803 bp, Heterodera glycines
  unsure (1)..(1803): unsure at all n locations
gtagtaattaatgaatgataaatacantttttcccaccctttggattattcaatttcaatttcgaaagaaatagtttccgattaaaaattcccccgcccttttattacgttttattgcgtttgggtccctcttctgctgttgtcctccttttccgtgccattgtcgtgtctccaaatgggccactttggcctcgtaaatgcgtcgattgcccgcattcactggcccccaatgcaattgcggtggcgcaaccgttcgcgcagttcgtccagccgaagcatggcgaattggtgccgaagtgcgtccagcaaagcctcgtcagagtggcgttgcacagcatcaccctcatcatcatcaccatcgcttggctcaccatctctacaaactcggaaaattcttaaattattggagccgcgtttccgtaagcaaaagggtctcccctacagttgccataaaacaaaagtgccaatttttccactttctttaaaattccccctcccctccaccatttccgctctttgatcgtcttcatccttctcgtcaccgttgttgttgttgctgtcctcctctcgtgctgttcgccatgtctccagcctggccacgttcagttcgtcgtccgtcgttgtggtccccgtggtgttgtcatccgtcagaaatgcctcccttaacagacttgacgtggtttcggtcggagtaggacaaaacgtcgtcggacgaatttttggaccataacttttttctttctcaaccaaattaaacattcttgatattattcgaaagcatttaaaaaacgctattaaactgcaaatttccccgatttcgatcgtttaaaatgccaggaaccccattttcccctcattttttcgagttttgaaccgttttaaatgcttttccgcgcccaattttccgcttttctatcgttcccagcacctaagaaaacctataaaagtgtggcaatcatgcttttgggtaatgtattattttttgaagtgagtcaaacaccctattagtgctttgctgtgccgagaaccggcaggcaatggatggctttcaatctgcaagaaattagattggcaatatgtggttgtaaaaaacttttgggtaatgaattattttttgaagtgtgtcaaacaccgtattagtgctttgctgtgccgagaaccggcaggcaatggctttaaatctgcaagaaattaaattggcaataagtggttgtaaaaaacttgtgtaaggaattattttttgaagtgaatcaaacaccctattagtgctttgctgtgccgagaaccggcaggcaatggatggctttcaatctgcaagaaattagattggcaatatgtggttgtaaacaacttttgggtatggaattattttttgaagtgagtcaaacaccctattagtgctttgctgtgccgagaaccggcaggcaatggatggctttcaatctgcaagaaattagattggcaatatgtggttgtaaaaaacttttgggtatggaattattttttgaagtgagtcaaacaccctattagtgctttgctgtgccgagaaccggcaggcaatggatagctttaaatctgcaagaaattagattggcaataagtggttgtaaaaaacttttgggtaatgaattattttttgaagtgagtcaaacaccctattggtgctttgctgtgccgagaaccggtatgcaatggatggctctcaatctgcaagaaattagattggcaatatgtggttgtaaaaaacttttgggtaatgaattattttttgaagtgagtcaaacaccgtattagtgctttgct

SEQ ID NO: 43019 - DNA, 1513 bp, Heterodera glycines
  unsure (1)..(1513): unsure at all n locations
ggaccaaggccaagaagttctgccgcaatgagttcaacttgaccggactgtgcaatcgtgcttcatgtccgctggccaacagccaatacgcaacagtccgagaagagaacggtgggccatcaaaagcgaattgacgaaatgagagaaagtgatttgttggttgattaaggcgtgtgtttcctttttatgaaagtggccgaacggagtcatttcccgggcaaactttgggagaaggtgaagctgcacagaaatttggccaaggccgttgaacagatcagcacgcatttgctgcattggagtgaatacgtccgcaaaaagtgcaaagcgcggcttatgcgccaccaccaatgtctgaacagaatgcggaagatggagctgaggggacgcactgcgaaagtcatcccattgcaggtgacaaaataaaaggaaagggaagcgaaaaacggcggaaaaattggaaattcagaggaaaatcgaacggagggaacgccgcagggaggaaaaagcattggccgcggcaaaattggacaatgccatcgaaagggaactgctgcagaggctgaagaagggcacctacgggagcatgtacaaattcagtgacaagacaattgacaaagcgatggaaagggtggacgagtcggagcaaagtgaggaggaagaagtggaatatgagacggagacaacgcgggagaagcagcgacagttcgtggaagactttgacgagtcggaggagggggaagacatcgaagactattagagagcgaaaagagaaaaaaaagaagagacactttttgttgttattttgcgataaagaattactttctcacagcaaaacgaacgccaaagttttagagaaccaatgacagacaatataaaaaagttgtacaaaaaaatttagaaaattgagataacaaaaaatatggtgtatttttaaaatcggtttgttttttggtcaagttaactaaaatggtccagcagagattgactaatgaattaaccattcattttgaacggaaatatcctattggtgattcaaagcaaaaatgcggttgaaaatagaattttatcaaatctaaatcacaaaatcatttggcttttgttgcgtgcatttttgtccgttttgcccccatccaccgcccccaggcgtttccaattccaaaatatcctaaatattcaattcgatcagtggatattccacccctaattcgcttgccccggcttccactttcggcgctgtttttggctcccaaattcacccgcgtcccgtccttccggcaaagtgtgttctttccccgcttcgccgcttctcccccattcagtccatagnggggggaagacgcgtctttcagtgagcagcgacagatggaggactctacggaattggaggtgtcgcgaaatgccatcgccgccacggaatcgtccgtcgccgcccgacccggcacgaaggggtaatcggcgcacaatgaccgggtaacggcgttcccagacttccacatcggtgatccgcgtgttg

SEQ ID NO: 43020 - DNA, 1048 bp, Heterodera glycines
tttattcacctccattattgatagaaaaagcatcagagtgcctaaactaacatgtaaataaaatttggtgcgtttcagaaccctttctgaaaaaatatttatgaattaattttgcaaataaataaaaacgaaagactcagattttcgaaaaatttttttgagccagctagctcggcgctcatttcagtgtaagttagtcctttaccggggagtatccctgcaaagtttggtacgcttctgctcaattagcaaaaaatatgagtgatcgaattttcactaaaaaagttaagcctacattttttggcatatttaaaaagcaattaaaaaatttaataattttcctgcaccgaaggtactcactcggcctcttcgcggcctcgtggtgggccttcgccccccccctcccacgcccttcagagcacgacaaatatttcaacaaaaattttgaaaaattgactagagcaatcgaacgctaacggacgacctaatggaaaaaaatccccgaaggagagaatttaattaaatccattccttcgggggaccgtgccgggtgccgcggggtaagcagtgctggttcgtttcatcacggcaccgaaccttttggctagtcagcaatcgttgcttaacttgccagatcggacgggtgcgcatgactttctgaaaaaaatatttatgaaacaaaaaaatcgattttttcaagtgtccgtttggggtactcaaacatttatggggagcaaaaatccaacgcagaattaaagtacaggctatagggaagctattcccgaaggattcggtctccccataaatctgggcgcatcggttcggggggactgccccgaaaacaaaaaaatcgattttttcaagtgtccgtttggggtactcaaacaattatggggagcaaaaatccaacgcagaattaaagtacaggctatagggaagctattccggaaggattcggtctccccataaatctgggcgcatcggttcggggggactgccccgaaaacaaaaaaatcgattttttcaagtgtccgtttggggtactcaa

SEQ ID NO: 43021 - DNA, 1047 bp, Heterodera glycines
tagataatatttaaaataggttatttctcttccctttagtatccctgcaaagtttggtgcgcttctgatcagtttctgaaaaaaaagttaagcctaaactttttggcctgtttaaaaaggaattaaaaatttttaaaaattttattcatctccctttttgatagaaaaagcatcagagtgcctaaactaacatgtaaataaaatttggtgcgtttcagagcattttctggaaaaaatatttatgaattaattatgcaaaaaataaacaaataatgaactctcttccttaataattttcatgcaccgaggtactcactcggccgcttcgcggcctcgtggtgggccttcgccccccctccgcccttcaaaattttgaaaaaaaaataaaataataggagactcagaattttgaaaattttttataaaaactgatgacaagctaatgtgataaaacaggttaattcttttcctttcagtatccctgcaaagtttggggcgcttctgataagtttctgaaaaaaaagttaagcctaaactttttggcctgtttaaaaaggaattaaaaatttttaaaaatttattcatctccctttttgatagaaaaagcatcagagtgcctaaactagcatgtaaataaaatttggtgcgtttcagagcattttctgaaaaaaatatttatgaattaattatgcaaaaataaataaaaatttctaaaaatttgatcgtccataaataatttgtaattgatcaggggctcaccaaattttgcagggatacgtatcggaacactacaaatgcttactaattttcctagattttttaaacccggtgaaaattttttgcagacaccaccacttttgcacttaaaaaaatttcaaaaaactttaaaaattcatagaaaatttaaattcataggtactactgctaaatcaacgcagagacgcctttccttgacctttttaggcccctgcaaaatctggtgcgcttctgatcactactcgaaaaatgagtgattgaattttcactaaaaagttaagcctaaacttt

SEQ ID NO: 43022 - DNA, 1152 bp, Heterodera glycines
  unsure (1)..(1152): unsure at all n locations
aaaattttcaaaaaatgcaatgcaggatcctgccggatcctgcataaaaatcaaatttgcggatcctgttgcaggattggaattcaaaattatttgcaggacaggaaccggcaggattaatcctgcaaatcctgtattttccaaaatatgcaggattgcggactgggatcctgcaaaatcatgcgcaggatcctgtcctgcgccggtctctaactaaaactcctagaccaataatgttaacttgagccgaaagatgcaattactagaaagaccgaaattaattgttaatttattttaatccaagtttctaagaaatttttattttttacaattggtatcggtaccattttaatccattaagtatattttttaattattttatttgcagtaataattgttgcttaaaatttggaaaaattataaaaagaaaaaattattaacataatgtttttaaagttcctatgtttcagtttcattatttttcaaaatcaatattattttgtttttaatttaaaccaaaggctttatgattttgttacataagaaatttcattttcttctttcttatgatggtaataagattaattttgttatctttagcctaaaattataatttatatttttttaaattaaagatcactattaaaaaaatgtacaaagtaattctgtttttttgaaaaaatcgtttttcaaaattttataaattttctattaactatttggaatttatttccttcttacatttttattaattaatgtatttcaaaaaaatttcgttgtagctttaaatttacttagaaattgagaataaaacaaattttattttagcaacatactactttaatttaaaacaataccaaataaattttattttatttnttttgttgtaaattaaaaacgaaaattttcgaagtggaccgtttttttggcataatttctttttttagagaaaattttacttttattttagagttatattatttgttaattaaatatttatttatttgaaactttaaatatttaagtcttttatttaatttattgatagtgattaaatttcatatatattaaaaggtttcaagtataaagcatttgcagtaactanataattttatcatttacattcttgcaaatgtgaaaacaaatttgggt

SEQ ID NO: 43023 - DNA, 779 bp, Heterodera glycines
  unsure (1)..(779): unsure at all n locations
aattttaaaaaatcgnaattattcaaaattaattttttgtcgcctgtctggngnaagcagttaaaagaagggactgaaacttcncaaattacctgtcacaggagtcgaatctgaattaaatgaaagtttttcatntaaatagaatttnaaaaaaacaggtacagtattttatgtaatgattatcaatntaaggtgcgatattcgaatcaatgcaaaacaaatttaaaaaaaaagcataaaatatttaatgtttttaaaatattattttttctttcttttgtttaaatttgcttatttgttagttacaatattgtaaaatattatacagaaatgaaacaaaagaaaactttaagaaagttggtggaattcattaaattttgaaattttgtgtgggtctctgcttttgaaagtgccattttaatagggatataatataaatgccataattacctgggccagcagaagtcgattgatcaatttctgaataaaacaaagtggttttttttaattgtggtccaaatgctaaaagaagcaactaagatttttgaagaaaataactaaaaggctggcttaactatagtttatgcgcccactcaatttttatgcacccaatcaaatttttcatccgggggccatgtttcggccagctctattgcggtgacctgcgctttaactcaacatgtgggatggcacggcttaatcattgacaaaatcggatattgaagatcgaacggttggcatttttacggaatttaccctaaaacagcaaaaactacgac

SEQ ID NO: 43024 - DNA, 1119 bp, Heterodera glycines
gcttgctaatagctttcttttcgaaaagagaggcgaggaaaaataaaggttgcatccaaatgtaattttgttttacattgaagcatttggatggcttgctgtttacagttggcttagtcttctttgcaagaagcagcacaacttttgtttgggccaacgacccccaaaccattcgaatagcaatcgattgggctgactagactgcatatttgcaggaatagcaatggcaggtctatcttaaaggcctgacgagttatgtttcgacaaacatcctgtacaccataaatcgatttgcaaatttagtcgaactatataaatttttcaaaaaatgattcatcttttttatggttagcgcatatgtctctagctttatagaaacggtccccgaatctgcgaggaactacttttttgagaatttctatagattattattttgcatgaatccttcgcttaaattcccatttatcttataaagtcagattaaattaattaccccgatttgttttagaattggtccaaacacgcttgctaatagcttttcttttcgaaaagagaggcgaggaaaaataaaggttgcatccaaatgtaatttttttttacattgaagcatttggatggcttgctgtttacagttggctaagtcttctttgcaagaagcaacacaacttttgtttgggccaacgaccccaaaccattcgaatagaaatcgattgggctgactagactgcatatttgcaggaatagcaatggcaggtctatcttaaaggcctgacgagttatgtttcgacaaacatcctgtacaccataaatcgatttgcaaatttagtcgaactatataaatttttcaaaaaatgattcatcttttttatggttagcgcatatgtctctagctttatagaaacggtccccgaatctgcgaggaactactttttagagaatttctatagattattattctgcatgaatccttcgcttaaattcccatttatcttataaagtcagattaaattaattactccgatttgttttagaattggtccaaatacgcttgctaatagcttttcttttcgaaaagagaggcgaggaaaaaataaggttgcatccaaatgtaattttttt

SEQ ID NO: 43025 - DNA, 1462 bp, Heterodera glycines
aaaattgtaaaaataactgatttgaagcacttttgcaaaatgtcctgattttcgaccccagaatctgattttttggacccgatgttctgattttgaaaatttttcgatccgagccctggttttgacggttttttaccatccatgggtaatatgtaggatgtaagagctggaattactatgtgctaaaaatctgaaatatgtaataaaaaatatgctaaaatatgtgctaaaaatcaaaaaaaggcttaaaaatttatttaatgaaatagaaattaaccatgtattttattccacaataaaaacatacaatcaagtataaaaatcgatctgttacgaatgttttaatgtgtattttttggctaattaaataatgaataacaagattgccgctaataaattgctagcaagttggaaaataagtattctataattaatagtaggtacaagcgcttggcttcgagaaccggaggggtggaggaaggggataaattcaacaactcgatttttacgggtgtttttatttttcaaaatcaaaaactaggaaggatattttgcaggaaattgagccgttttggccaaaaatgactattttctataatctggtaaaataggtgtccggctgtgcctttatgcgtcggtgaaatattttggaaattttagtgtgctttgataagagaattatttattttcaaaaaatttgtctttttctaaaatttttactttttgggttttggggagagcctttagcccctcagcccgccgccccgatcaaggtcaaaatagttgtgggatatataagtttccctattgcataaaaaccgtcgtgcacataaaaagcaataacgcattattgcttaatatgcacgacattttttatgtaataggtaaactcctctatcccacacctatttagagccctgataaatttgccaaccccatctattccccaacttgctccgtggctgttttggataagccaaaaatctttgtccccttctgtgccaaaccccaagatagttaatgtgtgcattgttttgtcttgtttttttccgcctcttcgcattccttgatgcttgggatgtaaacaaaagtaccattgtactcgtgaaagctgggcggagcaaaaattcctaaaacataggtaattagaaaaaaaatttgtttacaatattatatttcgacatacgtgttacgagtggcaacctttttgctgtcaagaaatccatggcagctttgtacccttgcagggtcccatgctctgacgccttgtacaaaagcccatttttctttgtttgagtgagtgccttctcactcgccactccacacgattgtggttttccagtaattccacttttatattcataaaaagaatatagtggaagtccatcactggtaatgagcctgaaaacatttgtccaaatgaaattgcattataaaataaaaaattttctaatacaaagtc

SEQ ID NO: 43026 - DNA, 850 bp, Heterodera glycines
ttgagtcccggtgattgaaatgctggtgtgttgagtcacagtgattgaaatgcaagagaattgagtcccagtgattgacatgctggagggttgagtcccagtgattggaatgccgaagaaccaggtgatgttaggtcccagtgattggaatgcaagagagattaagtcccagtgattgaaatgctggagggttgagtcccagtgattgaaatgcaagagaattgagtcccagtgattgaaatgctggagggttgagtcccagtgattgaaatgcaggagaatgagtcccggtgattggaatgcataaaaactgagtccgggtgattgaaacgcaggagaatagagtcccagtgattgaagtcctggagaattgagtcccggtgattgaaatgctggtgtgttgagtcccagtgactggaatgctggagagttgagtcccagtgattgaaatgctggagggttgagtcccagtgattgaaatgctggagggttgagtcccagtgattgaaacgcaggagaataaagtcccagtgattgaactcctggagaattgagtcccggtgattgaaatgctggtgagttgagtccgactgattggaaaaagcaaaaaaattgatgccaggcagtgaagtgctggagccagtcgattttaccagtcataatcatacacgacaatcgtactacccagcggggaatgccgaaggaccaggtgaggttaggtcccagtgattggaatgcaagagaattgagtcccagtgattgaaatgctggagggttgagtcccagtgattgaaatgcaagagaattgaatcgcagtgattgaaatgctggagggttgagtccccagtga

SEQ ID NO: 43027 - DNA, 751 bp, Heterodera glycines
cccccccccccgcccttcaaaattttgaaaaaaaaataaaataataggagactcagaattttgaaaattttttataaaaactgatgacaagctaatgtgataaaacaggttaattcttttcctttcagtatccctgcaaagtttggggcgcttctgataagtttctgaaaaaaaagttaagcctaaactttttggcctgtttaaaaaggaattaaaaatttttaaaaatttattcatctccctttttgatagaaaaagcatcagagtgcctaaactagcatgtaaataaaattggtgcgtttcagagcattttctgtaaaaatatttatgaattaattttgtaaaaaaataaataaataatgaaagactcagattttcgaaaatttttttgagccagctagctcggcgctcatttcagtgtaagttagtcctttaccgggtgagtatccctgcaaagtttggtacgcttctgctcaattagcaaaaaatatgagtgatcgaattttcactaaaaaagttaagcctacattttttggcatatttaaaaagcaattaaaaaatttttaaaatttaataattttcctgcaccgaaggtactcactcggcctcttcgcggcctcgtggagggtctaggagacgtctcggctattctgtacgagttttgaacatgactcaaaactcattagcattcattagcctctgatcagtgatcaaatgaatgatttccgtccgtctattcgccctctctccc

SEQ ID NO: 43028 - DNA, 1062 bp, Heterodera glycines
  unsure (1)..(1062): unsure at all n locations
tttttaggaaattttctatctcgtaaccccgatgccattcgttcctgagagcctcttcaaaattttttccattaccgtaagaaaaaactgcggaaattgtgaattaattctcagaaaaatggctatctctttttaagacaattttctatctcgtaaccccgatgctaaatggttatctctttttaggacaattttctatctcgtaaccccgatgctaatccgttccggagagcctcttcaaaattttttccattaccctaagagctgcggaaattgtgaattaattctcagaaaaatggctatctctttttaagacaattttctatctcgtaaccccgatgctaaatggttatctctttttaggacaattttctatctcgtaaccccgatgctaatccgttccggagagcctcttcaaaattttttccattaccctaagagctgcggaaattgtgaattaattctcagaaaaatggctatctctttttaagacaattttctatctcgtaaccccgatgctaaatggttatctctttttaggacaattttctatctcgtaaccccgatgctaatccgttccggagagcctcttcaaaattttttccattaccctaagagctgctgaaattgtgaattaattctcagaaaaatggctatctctttttaggacaattttctatctcgtaaccccaatgctaatccgttcctgagagcctcttcaaaattttttccattaccgtaagagctgcggaaattgtgaattaattctcagaaaaatggttatctctttttaggacaattttctatctcgtaaccccgatgctaatccgttccggagagcctcttcaaaattttttccattaccctaagagctgcagaaattgtgaattaattctcagaaaaatggctatctctttttaggacaattttctatctcgtaaccccgatgctaatccgttcctgagagcctcttcaaaattaattccattaccgtaagaaaaanctgcggaaattgtgaataaagatcagaaaaatggctatctctttttaagacaattttct

SEQ ID NO: 43029 - DNA, 905 bp, Heterodera glycines
tgcccatttacctcctcctcccattcctctcattatacttttaccaccaaattcaatcaattcgcatgttccttaccaaattatcatgcctccttttttttatctgtcatccaatgagaaaatgcaatatgtatgtgcacacaaaaacggaaaagcactgtttgctcattcatttccaggccatgagaatgaagaaaatgaaattaggtaaatttcccaccaccaaatgataaaatggttttcgaataatcaaactcaaacacgaaactcacttttattcccgaaatttacgcgtttgatgagaatgagtggaataatttgcgagttaattaatggattagtaattggtttttttgttgttgggaatgtcagccaattgacgacttgttgatggcaccctggagaagaagctcaatttgggacattgtcgtaatgcagttggtcgatttgttgttgttgattggatgacaatggcatttgcataataattcagagaaattagtgtcaaaattctattttaaattttagagaacattaaattagaaaataagcaatgcattcttttgtctgccatttgaaattttattggccattttgtcattgcatgcgccagttcagtccccaattcacatcctttgggttggggtcgttttcgcgtgggcagagtttttgaacaataacttttttcattttcattgtcaaccaaatccaacaagtagcctgcaaaattatcaaaaacttcgttttcgttctaaaattttatgtccaaaaatgtttataaaaccagtttttgaagttttctggccataactttttgaaccttaacgaaattttttgaaattttgcggattaatagaggactgttagggctatcgaatgatatcatgattattggtggttaaaaa

SEQ ID NO: 43030 - DNA, 914 bp, Heterodera glycines
cggggcagtccccttcctcccatgcgcccagatttatggggagaccgaatccttcgggaatagcttccctaaagcctgtactgtaattctgcgttggatttttgctccccataattgtttgagtaccccaaacggacacttgaaaaaatcgatttttttgttttcggggcagtccccccgaaccgatgcgcccagatttatggggagaccgaatccttcgggaatagcttcgatatacctctactttatttttaccttggatttttgctccccataattgtttgagtaccccaaacggacacttgaaaaaatcgatttttttgttttcggggcagtccccccgaaccgatgcgcccagatttatggggagaccgaatccttcgggattagcttccctatagtctgtactttaattctgcgttggatttttgctccccatacttgtttgagtaccccaaacggacacttgaataaatcgatttttttatttcataaatattttttcagaaagtgctctaaagtgcaccaaattttatttacatgttagtttaggcactctgatgctttttctatcaaaaagggagatggagaaaaatttttttaaaaatttttccttatattttggttatatcgttttgcttttggtggggtgcttggaacagtggaatcatgcgcacccgtccgatctggcaagttaagcaacgattgctgactagccaaaaggttcggtgccgtgatgaaacgaaccagcactgcttaccccgcggcacccggcacggtcccccgaaggaatggatttaattaaattctctccttcgggattttttttcattaggtcgtccgttagcgttcgattgctctagtcaattttcaaatttttgttgaaatatttgtcgtgctctgaagggcggggg

SEQ ID NO: 43031 - DNA, 1013 bp, Heterodera glycines
cttcctttcagtatccctgcaaagtttggtgcgcttctttcagtttctgaaaaaaaagttaagcctaaactttttggcctgtttaaaaaggaattaaaaatttttaaaaattttattcatctttcggggggactgccccgaaaacaaaaaaatcgattttttcaagtgtccgtttggggtactcaaacaattatggggagcaaaaatccaacgcagaattaaagtacaggctatagggaagctattcccgaaagattcggtctccccataaatctgggcgcatcggttcggggggactgccccgaaaacaaaaataaatcgattttttcaagtgtccgtttggggtactcaaacaattatggggagcaaaaatccaacgcagaattaaagtacaggctatagggaagctattcccgaaggattcggtctccccataaatctgggcgcatcggttcagggggactgccccgaaaacccaaaaaaaaattttttggataaaaattatttaaatgaactgactagataatatttaaaataggttatttctcttcctttcagtatccctgcaaagtttggtgcgcttctgatcagtttctgaaaaaaaagttaagcctaaactttttggcctgtttaaaaaggaattaaaaatttttaaaaattttattcatctccctttttgatagaaaaagcatcagagtgcctaaactaacatgtaaataaaatttggtgcgtttcagaaccctttctgaaaaaatatttaagaattaattttgcaaaaaataaataaaaacgaaagactcagattttcgaaaatttttttgagccagctagctcggcgctcatttcagtgtaagttagtcctttaccggggagtatccctgcaaagtttggtacgcttctgctcaattagcaaaaaatatgagtgatcgaattttcactaaaaaagttaagcctacattttttggcatatttaaaaagcaattaaaaaatttttaaaatttaataattttcct

SEQ ID NO: 43032 - DNA, 1306 bp, Heterodera glycines
aaatattgagtgagttgtttattaattaaaataaaatgaaataaaaaaatatataattaattttatcaatacaattcgacacaaagacatatgaattcaattcgagtgggaaacacaccatgaaattaaaaaataacagtttatacacaaataataacaaaataaaaatcaaaaattgattaaattaaagcaaatattaattcattcattcacttagcttattaaatttgatcaattaagtgtaaaataatcaaaatattgttaaccaatgttaaaacatataacaatgagaacaattcaaatataatttgattaaatgccacatatatcgtaacaacagacggatactacagcagattgttttaaaaaaattgatgaagaaagaaaagttcctttgatataaaattatttaaagaaatttaaaaattaaaataggaactttacatatacactttgaaacttaatcatataatttagcaacgattaaattattgaattattgaaataaataaataaataaattttgtttatcttattaatctattattctaatcaatattttggtttgaagaataacaggtacactaactgcactaacagcggcacatgaagtcgcacacatgaattttttataattcatttaaaagacaattaaaaataaatttaaaaaataatttcactaataatgttcttaattgttatattttctttttgaataattgaaaatttaaaatattctttgctaatgtacactcttggattgggttgagagaggaagaaattataaaggatttcaaaatttaagaacataaaataaacacaatagaatattaccaaaaattatgaagtagattcagaacttttttgacggttacataagcatgcctcaaaaaaataatttttttttttcttcatttatttttatttgtaggaaatttaattaattaactcaatttctcttcttttctgtaatatttattgcatcaaaaatagaaaatattaaaaaataaaaaacttaaataaagaatgaggattgagagaagataattaatataatattattatttacataatttgcagaaataaattaattaataaaaatgtgaaaataatattataaacaatatggtgagatttgaaagaagaaaatatttaaagacgcaaaagaataaacttattttcatgtttaattaatatacaaaaaatcaaatcaggaaaaatattaaaatttcatttataagagttttttatataaaatgctgaaattaaaaaaaaaactgatattttatgaatataatttttaaaa

SEQ ID NO: 43033 - DNA, 939 bp, Heterodera glycines
aaaaaaagagatagtgatttttttggattaggccgaagaaataaaaattaccagctattgaaatgcagtggcaagcacagcgagtcgcttaaatgcacaccctttgacacgtaaaatattccaaaaaaagagatagtgattttttctggattaggccggagaaataaaaattaccagctatttgaaatgcagtgggcaagcacagcgagtcgcttaaatgcacaccctttgacacgtaaaatattccaaaaaaagagatagtgattttttctggattaggccggagaaataaaaattaccagctatttgaaatgcagtgggcaagcacagcgagtcgcttaaatgcacaccctttgacacgtaaaatattccaaaaaaagagatagtgattttttctggattaggccggagaaataaatattaccagctatttgaaatgcagtgggcaagcacagcgagtcgcttaaatgcacaccctttgacacgtaaaatattccaaaaaaagagatagtgattttttctggattaggccggagaaataaaaattaccagctatttgaaatgcagtgggcaagcacagcgagtcgcttaaatgcacaccctttgacacgtaaaatattccaaaaaaagagatagtgattttttctggattaggccggagaaataaaaattaccagctatttgaaatgcagtgggcaagcacagcgagtcgctaaaatgcacaccctttgacacgtaaaagagatagtgattttttctggattaggccggagaaataaaaattaccagctatttgaaatgcagtgggcaagcacagcgagtcgcttaaatgcacaccctttgacacgtaaaatattccaaaaaaaagagatagtgattttttctggattaggccggagaaataaaaattaccagctattgaaatgcagtgggcaagca

SEQ ID NO: 43034 - DNA, 968 bp, Heterodera glycines
tccctgataagtcattcattcaactaataatttaaagaagttttaacgtaaaaaataaacgtaagcattctaaaagaaatgcttcatcttcatctcattccatctcaatcatttggatgtgatgcgatgaaaatgaaaaggaaaattttttagcaaaaaaaaattcaaataaaagtttcgaagcgaaattttgaattactgtaaatctacatactttttttttgttaaaaatgtcaaacccctaaaatgtagaaagatctgtgctgttttgtccatgcgcaattgtctagataagatttacaatgagattggagtgattttccgagatttttctggagccttgccacttaacaattaagtggtcacgtttgaaaattgaaaaagaagtcaattccattattcgtgttcaagtccggcgttttgaattcgcaaaaaatattattttcatgttcaacgactcaaaaaaaaacaactaaattttccttccttttaaattcaacgagtaaaaataatcgtgattccccaagtgtaagcatcgtgactccctcccccgcccccatctgtgtatgtaatgaagtggtggtgccttatcatttaattagcattcttttgatcactttgccactcctattcccttattgactccaaattataccacgaaatatgttgtcttgtcattaggattttgttttcaaaattttgaactcatttttcaggaatttgctgtctatttctcttttttcgctatggatccgacaaatcagcccggctggaattgctactactacaagtatgtgcacgagagagagagagaggacgtccaatatcatagtttgacgtccaaaatcatagtttgctattggaaatttgagaggaaaaggggcggggatggaaatggcacggattctggaccgatgtgtgcctgaaattatatggcaacagatgcctaaactaaacgacctcccccc

SEQ ID NO: 43035 - DNA, 1052 bp, Heterodera glycines
  unsure (1)..(1052): unsure at all n locations
ttaaattggtcatgtgagatgtttagttttttatttgacncatccgttttctgggaaaaaacttttcgagaaaagctgaaaaattttccaattgcatcagaagcagactcaaattcttcaacaacataatgtaaaaaatattacgcaagaaattatttttacatcctttttagaaatgctgcataaatttttattgtaaatagtcacaaacaaactttttttcactcccaatatctaccagttatcatacaaaaaggcaatagttaagcactgagatataaaaaaatcgtctagaataattatctaaacaatttgtcgggaaagctgtataaattctgggaaaaaacttttcaagaaaagctgaaaaattttcaatcgcatcagaagcagcctcaaattcttcaacaacataatgtaaaaaatattacgcaagaaattatttttagatcctttttagaaatgctgcataaatttttattgtaaatagtcacaaaaaaacttttttttactcccaatatctaccagttaccaaacaaaaaggcaatagttaagctttgagatataaaaaaatcgtctagaataattatctcaacaatttgtcgggaaagctgaataaatttcagttgcaataggcatattggcacaatacataaatgtagagcaggcacaaaatagaggaaataccaaagattaaaaaattcgtgtttatgccccactctgctttggctggacataactcgccagagagtggagatagaccctttgttgatacatttgaaaatgtagagcccgcctagcgcattcgaataacacaaaatttgttttcatttgcccccaaacaatccgcttatgacgcgccgaaagaaaattcacaaaaatttggcaccggaaaaactgcattttttcatgggccagcataataaagtaaacccaaaatgtaaggaaatttaaattggtcatgagagatgtttagttttttatttgtcccatcctttttctgggaaaaaactattcgagaaaagctgaaaaattttccacttgcatcagaagca

SEQ ID NO: 43036 - DNA, 1139 bp, Heterodera glycines
tcgccattctgacgaagaagatttattttatttttataggatttttatttaaagtagtatactgtatccctaaattggtgcccttggtactgtagccttatagagggattgaaacgggtgaattcatcatttaatttttttcattaccctaaacccattttgtcccctatgaatgccggtgtcatacaactcgtacaaaaggcaactcgtacaatggcttaagcttaggcctaagctttaggctaggccaaggcttacgcttgcttgggcctaggctaagcttaggctttttttttttgtaaaatacgagttgcctttgtaagagttgccattaacccgtttttgtttgtcaataccctaaccccactcttgtccctatgaatcagggctggccgtgattaaatttctaatcacggaaatccgtgagctgtgatcgcggggcttctaaaaaatccgtgacccgtgaaccgtgatcacggcaccccaaaaccccgtgatccgtgattgtatttaaatttaacaaaaaacggaatttaatcgctggaaaaataaatcaaagttttttaaagaaaccaaaccatataggtaacgcttttttttgcggcgtgcttttttcaaaaacttttcgagtacagggggcagaacaggtggtgccgataggcgccgccgggaaaaattttgtacttttaattcgatttgttagcagattttttccaaaaaaaatgaccaaatttactgttttgagccaattttttgaggaaaataaaggactatattttgaacttattgaccaaatctttttttttgattaaatctcttttttttgcggctcgccatttacaaaaacttttgtggtacggatagggtcaggcggtgtgccgataggtgccgccaggaaaaaattgaaatttttagtggaatgtgttaacagattttgtccaaaaaatgtccaatcatttgttaattttgggtttaatgttgttttttaaaaataatgaaaaaaaatttaatgtaagaaaattttctttttaattaaatttcaattaaaattataaaacaaaatataaaaattctcctatcccaatgggaaattgaacccaagggtcaaacaatgaaagacgcaaggcttaatcactagg

SEQ ID NO: 43037 - DNA, 1036 bp, Heterodera glycines
gcgagcgctcagatggcccctggtgtcccttcccctcccccaagggcacgacagctgactcccttccctttgcctcccttccccttctccaataggatttggctttgggttttatttatttttaaatttaatttttttttatttaattttttcaccttctcagatattttttcacctgcccaggggcttacataattattataggtgttttttaaattaacctaaatcttaggaaactggtactgaaatgtccctttccactgggactgaaatggtgggactgaaaaacaaccccgaaaatcttggtgagaactactaataggaaaaaccaaaagacttaaaaaagtaaaattaaaaccaaaataaatatttaattaaaaaataattaactccaagtttcaaccttcgagaaaataaaaatacttcctagtatcctggtcccaagcctattattttgtttttaaaaggaaaaattaaaaatacaatcttattaaaagaataaaatttaaaataaatcacatatttaatagaaataaaaaacaaattatcttaaatgttaaaaaaacataaaacaatatttcaaatattagcagactaaaaaattagtcgtagatattaaaaaatttataaattaaatcgaaaaattatttaaaataatgcaaaaaaaaaataatttgttaataaaactttacatcagttggtttaaatttgtaaaaagtgtcttcataaacaattacgacctactttgccttcttggttttttgaatcagcataaggatggattcaattaaaaaaaataatgtttattgtagagttaaattaaattactaattttttacaaaaattttaaattaatttatgtatcagttgaaaaaattttaacataatactaagaaatattgctttattttaatatttttaatttatttttttatttatcaaaaaacaataaagttttaattgcattctgtccattgaaacggggcggagtcgttatttaaaaaaccatcattttgattttatgataaattattta

SEQ ID NO: 43038 - DNA, 1615 bp, Heterodera glycines
  unsure (1)..(1615): unsure at all n locations
taaaaatgcacagggaaaaaatgctaaaatgccacgaaaaaaagtaattaattaaaatatttcttnttacttaaaatccccatatgaatctcttggttaaatttttttaatattttcttaattttaaaatatttatatatttatttaaaggcaaagttgaaaaatttaaattttttatttggtaaattgaattctttttaaaaaaattgttggcttttcaaaataatgatttatttttttatttaaagacaacattgaaaaattaaaattttttgctaaaattatgcgttattcaaatgagtttatttaaatatggtttcttttcaaattttatttatttgttacagtgttatcaatgccaatgtcgcaaccactcaaactattcagctgaaattcagcggtgccaaagacccgattgccacgttcagtggagtcgataacagcgacccgcaaaattaccatatgatcatcaaaacgtgtgttttgaagggcaatgtgtgccagaaagggtcagagaattaattacattaaataatttatttatttttaacacatttatttattattaataaatgaaatgatgttaaaatatttttaaatcatttttttataaaaaataaaaaaatatttaatgaattatatttaatggatttatttattaaaggaggtgtcaattaaataagcataaaatttattagtcaattaaataagcataaaatttattagtcaattaaataagcataaaatttattagtcaattaaataagcataaaatttattagtcaattaaataagcataaaatttattagtcaattaaataagcataaaatttattcgtcaattaaataagcataaaatgtataattatatgaatgcatttattgtttttataatattacggcataattaatatattttttaataattaaattatataaaaaatcgaaattatactaatttattaaaaagcaacaatattttaatgaaaggcaaaaattaaaaataaataaatatttatatgaaaaccattacaaaattcaaaattttttgttagggtgaccttctgttttgtcggcaaaatggacccaagcgtggcgacaaagggtggccgtttcagtcttgaaaattacaagcaaaacaattcaattgcgacgagttgtgagcaacagctgcaacaatcgggtggaagcgaaacattggccatagggaaggtgctgcacggcttcaacatcgcatttgctgaggacaagctgttgttgacgtcatcgaccagccagaaaaggtatacggtaaagtcgactgtaattgacggtatttttagcaggcccgtccgtatacaaaaaaatttgagaaggcaccctgagctttttttttttaccttcgggtcaaaatttttttctccaatgttatttttaaaattttactgcaccagggccaaaaagtagaaatttgtagcggttttgcgccaaaaaatgactattttttggtgcgaaatctctcaatttttcgagttttgaactgtttcaaaaaccggttttttggcatttccgcaactcgcgacatattttcccatgcttagctccttgagacgaatcgatcggtatatcatttgac

SEQ ID NO: 43039 - DNA, 966 bp, Heterodera glycines
aaaattttggaaaaacgcctatctctttttctgctcaatattctatacaattccaaccccatttacggaataatagcgccaaccctaatttttccggaacggaatttctttctgggcgagtttgattgtgaaaattttggaaaaacgcctatctctttttctgctcaacactctagacaattccaaccccatttacggaataatagcgccaaccctaatttttccggaacggaatttctttctgggcgagtttgattgtgaaaattttggaaaaacgcctatctctttttctgctcaacactctagacaattccaaccccatttacggaataatagcgccaaccctaatttttccggaatttctttctgggcgagtttgattgtgaaaattttggaaaaacgcctatctctttttctgctcaacactctagacaattccaaccccatttacggaataatagcgccaaccctaatttttccggaacggaatttctttctgggcgagtttgattgtgaaaattttggaaaaacgcctatctctttttctgctcaacactctagacaattccaaccccatttacggaataatagcgccaaccctaatttttccggaatttctttctgggcgagtttgattgtgaaaattttggaaaaacgcctatctctttttctgctcaacactctagacaattccaattccaataccataggattacctataagttgtatgattttgcatattttttctgcgcattgaagaaaggggctcaaaaatagcatttctgcattaaaattttttgatgccaaccccatttacggaaaaaaaacttggcaactctagttttactgctgttttctataaaaatgagaagtacagaaaagcatctctacatttgtttcccacttctacacattttttgcttttatgaattatctttaaggtatttatttcttactatttttcct

SEQ ID NO: 43040 - DNA, 1452 bp, Heterodera glycines
  unsure (1)..(1452): unsure at all n locations
ttttcgtgataataatagctgatttttacagaatagcagattaacaaaaatgaatgatctgtggtctgataattagctgtttttttacagaaaattaccgaaatgagtgatctgatcgcgtgcagcgcaacaacaaaaatcaactggtggtaggaggggataattataataataatagcccagcagttggaaagaaggtgataaactgatggatatcattatatccccgacgcggcaggcggaacaatgtgacgccaatgtgtaagtaacagtacccaaaaactaaaaacaggaaatcgcgtcgatattcatcattgatcagttggttgtccacccattagaaggacgggctgtcgattgggtcagactgactgatcagagtgatcgctgactggtctgatcacagagtgatcgcgccactgttcgtgttcaaaaacctgccgtcgccagttgttcagccccagcagaactcatttaacggaaagagacaaattaatgatttatctttttttggacatttgngtgttctattagccaatttgagtgtttatatcatttgcgcaaaaaattgtgtgttttctgtccaaatgatcacaaatgtcagtccaaatggtaccaaattttggggtttctgtccaaatggaaaaaattttgtatttctgtcccaaattgtgtgtaaaaaactaatacaaaatcctctcataaattgcaaaaaatcagctaaaaatttcaaaacttttctcataggttttggtgtccaattgtcaaatgttagctaactgaccatttggttactacccccaaaattatccacgtccaattaagctttatcccttaattttttgtgccattttttaatggcatggaaaatcaaattgcttaaacattgtgatgaatgaatacgcgtgtgttatgcatgcaaaaatgcttcttgctgcgcaatttgaacagctaatatcagttccccgaaaaaagccccaaattgatcggaaaatcgcagtcgtcgcccccggcggtgcttttgccccacccaaatcgcttctctatgctttgttgtgcactataattgctgctgctccagcagcagaagcgccaagaaaacttgcttattcaaaaaagcatcagataagcagcagcagaaaaaaaaagccatcagtcagaaaaaatttgggtaaggggggggggcgactcataaattaattaattagtttggaatcgtaaaattgttttgtgactagcgccactgccgccgctgttgttgatcaaacagcgaacagtagtgaatgtggtgagagataggagcagataaatgataggatgacatagtcgaaaaatgcacaggaaaatcttggtcatttatcaatatttgggtcgggaatggtgttgatctaagcatgaatcaagcccaaagtgatcaagtgaccaagcagagcgcatgatcattccgaaaaa

SEQ ID NO: 43041 - DNA, 966 bp, Heterodera glycines
aaaagggccatcgtttcgggcgggaggccagcaaaattcagctccgtctcaggagacaaaccgacggccggaggcgaaaatgtgcaatgacccggccatggttcgggtaaaatattagcgaatgtcccgaaatgacaactaattattgtggtagaaaatgttggaagaagcgaagacaatggtcgaccaactcgtcgaagtcggctcggtccacgccgcttactacggatgttcggcggagtaccaattccaaatgggcgaccacgaccgttactatgaagaggttggagttttgttcatttttaattgaaaatgcttcaaaaacccattaggcccttcattatctcggctgtgaagacattaacgtgaaattgagcgcggaacagaagcgacaacaagccgagaaaataagcatttcggcactccttggcgaaaacgtgtacaactttggcgagctggtcagttgttcataaactaattcgttttgccattccctctgcttcacttataaaattcgggtaaaaccgaatttttcgattgaaataatttttaatggacgaaaaagatttaaaaccggaggagtagcaaaattatgcaaattaattacaattttatgctagctaattcctcagtgatttttcttttttgagttggcccatccaattttgaacgatttgtccgacacgccaaacgcatggcttaacgaacttttgcacgcggtgaacgccggcgattgggacggctttttgaaggtttgtcactgaaatagcaaaaacccggccgttttcttttaagcacgaagagaaattggtcgccgcttattcggaggcggggcgaaaaattgaggcgttggaacggaaattgcgcctccaatgtttgatcgaggtaagtgttgttttgggagataatatatgatggaaaaaccaggccaatatgggtttaaaacgcggaaagtattgttaattt

SEQ ID NO: 43042 - DNA, 985 bp, Heterodera glycines
ggaagtgcgatcgttttgcggcgttcagtcctgttcctttacctttccctcaaaaaggtttatgtttaattttacgttttaacagcttttctatccgcataaattttaaaattttctcttcagtgtaaataatgtctttaaccaaaaagaatggacggaataaaattgcagacaatggaaatggcaaaccaattgaagctggtccaagtggcaactgtgctagggagaatctaatccgattaaactcccttaatccttacatgtaatttttttgtttatacttttttcgaaaatcgttaattattaatttggattttaagaacgtgccctctgtgcaacggttatttggtcgaagcgaccacagttatcgactgcttgcatactttttgcaaatcctgtctgctcaaatattttgaaggtgggcagcatccaattaaaaactaattttcatcgttattgaagattttttgcctttcagataacaatgattgtccaaagtgccataaccaaatccaccagtcccatccgtctcattatgtggcatttgatcggacaatgcaggacattgtgtacaaattggtgccgggcatgcaggcggaggagcagcgacggagggaacaggtccacccgcacggatttttgttttaattagagtgatttgggttacaattttcctggtttatcatggtcctcctttttaaaaatgtctatccttattttttgcccaaataaatcttcaaattccatttgccgttttgcagtttaaaaagcgccaccaacaaatgaaggaggcgcgcgaaatgaatggccgagcagcggaaaaacataatcatcagaacatttcctcctcctcttcagccaccgccgtcgtaccgccgccaaatacaaacgatgaaaattcagcggagggcgctgaacagcgaaagaacgtaatttggcaaccgcggctcttaaaactgagaaaatggacgaaaacggcgacacc

SEQ ID NO: 43043 - DNA, 831 bp, Heterodera glycines
attaattctcagaaaaatggctatctctttttaggatccaccctgtatcttgtaaccccgatgctaatccgttccggagcagcctcttcaaaattttttccattaccctaagagctgcggaaatttttattaattctcagaaaaatggctatctctttttaggacaattttctatctcgtaaccccgatgctaatccgttccggagagcctcttcaaaattttttccattaccgtaagagctgcggaaattgtgaattaattctcagaaaaatggctatctctttttaggacaattttctatctcgtaaccccgatgctaatccgttccggagagcctcttcaaaattttttccttaccctaagagctgcggaaattgtgaattaattctcagaaaaatggctatctctttttaggacaattttctatctcgtaaccccgatgctaatccgttccggagagcctcttcaaaattttttccattaccctaagagctgcggaaattgtgaattaattctcagaaaaatggctatctctttttaggacaattttctatctcgtaaccccgatgctaatccgttccggagagcctcttcaaaattttttccattaccctaagagctgcggaaattgtgaattaattctcagaaaaatggctatctctttttaggacaattttctatctcgtaaccccgatgctaatccgttccggagagcctcttcaaaattttttccattaccctaagagctgcggaaattgttattaattctcagaaaaatgggtatctctttttaagacaaatttctatctcggaaccccgatgctaatccg

SEQ ID NO: 43044 - DNA, 1136 bp, Heterodera glycines
  unsure (1)..(1136): unsure at all n locations
aatgcacaccctttgacacgtaaatattccaaaaaaagagatagtgatttttctggattaggccggagatataaaaattaccagctatttgaaatgcagtgggcaagcacagcgagtcgcttaaatgcacaccctttgacacgtaaaatattccaaaaaaagagatagtgattttttctggattaggccggagaaataaaaattaccagctatttgaaatgcagtgggcaagcacagcgagtcgcttaaatgcacaccctttgacacgtaaaatattccaaaaaaagagatagtgattttttctggattaggccggagaaataaaaattaccagctatttgaaatgcagtgggcaagcacagcgagtcgcttaaatgcacaccctttgacacgtaaaatattccaaaaaaagagatagtgattttttctggattaggccggagaaataaaaattaccagctatttgaaatgcagtgggcaagcacagcgagtcgcttaaatgcacaccctttgacacgtaaaatattccaaaaaaagagatagtgattttttctggattaggccggagaaataaaaattaccagctatttgaaatgcagtgggcaagcacagcgagtcgcttaaatgcacaccctttgacacgtaaaatattccaaaaaaagagatagtgattttttctggattaggccggagaaataaaaattaccagctatttgaaatgcagtgggcaagcacagcgagtcgcttaaatgcacaccctttgacacgtaaaatattccaaaaaaagagatagtgattttttctggattaggccggacaaataaaaattaccagctatttgaaatgcagtgggcaagcacagcgagtcgcttaaatgcacaccctttgacacgtaaaatattccaaaaaaagagatagtgattttttctggattaggccggagaaataaaaattaccagctatttgaaatgcagtgggcaagcacagcgagtcgcttaaatgcacaccctttgacacgtaaaatattccaaaaaaagagatagtgattttttctggattangncggagaaataaaaataccagctatttgaaatgcagtgggcaagcacagcgagtcgcttaatgcacacctttga

SEQ ID NO: 43045 - DNA, 1329 bp, Heterodera glycines
  unsure (1)..(1329): unsure at all n locations
agcataagggggggggggaaattgagccaaaattacattttgtctaacaaaccgaaagaacaaattgatgtaacggtatctcatcgggtgccatttctgaaatacatgaaagttcagtaaaaattactgcaaattgagtccaaggtcgttcgttcgaattccgtttggtctatcgttttacgttaattcgtaaaattcgctcgcatcgtgcgcgtgtcgtctcgcccccttcacaattttcgattggatgtgaaatgtctcggcaacaaacatttttccacgattttcaatgaaaaattccttccttgcacgctcttttgcctcttgactgataaaaacccaatttaagtgagccaaaaaaagacttaagaccgaccacatgtagctttcgaacttcgcaaaagggagcatgcgaagacggagcaagtagtggggcgagactacgggctacggaagaagtccgcgcgtgatccgcaggcggttgactaattggctttatggaagataaaaatagaataatttgatcactctaaatattatgtattaatgaaaaaataatcctatggtctggcaataaatttggaaaaatgggccctagccaaaattgtctacaaaatcgcttttgaaaagattattaaaattttttggcggtcggtttttcattaaaaagttcgaaaacgccgaaaattgttttcggtttttttaaaaattcttttcaatccattaaatttgagttgtttaaaaaaaattaagtaaaaaggggtaaatttttaagaaattctgttaacatatgtggccaaaactccaattttttcccagacggagcctatagacacagccggaccttaactcgttaaaatttccttcgaaaattggccaaattcgcagaatttggacaaattagttaaaaattacactaaattttcataattttggggcggcttttacgcaattttagatcaattttgaaaatcaagtttatttttttgcaaaatctaccagaaaaaataatttaatgatgaaaaaaatcacattaaaaatcaaaaattctcaaaaatcaacattttttatccaacaattctttgattggttttttcgggtaaaatttgaatagaaaagtcggaaagaccgaaaaaaatgaccgctccgatctcaagttaacacaaatcgtctaaaaatatttcagttttcaaaatttaggcaattcgggaatcaaaaaatgaatgaaaaaaggcagaaatttaaaatgatatgggcaaaagaagtgaagcgcttggcttttanatgcaaaaattcggtaggaaaagctacttaatcactcgtaatttg

SEQ ID NO: 43046 - DNA, 578 bp, Heterodera glycines
tttagaatgaggaatatgccatttaaaaatttatcactgttgttataaatgtttaaaacctggacatagtattataaattgtacgaggaataaatatttttgtgataaatgtaatttatacaataactttgtctaaatcatgtcgaacattacgatcaaacttattttaataatattaatttaaataagttatcattaaatagagaaaaaattttaagccttcaatattcccttaaaaattacttttatttctctaaatttattttatttcctttgaatatttactcaagttatagttgtccaaaaatattaaaaattacacaactattttaacattttttgtgttgaagaaggaacatagttcgtaaaatataaaaaataacgaattatgtttcgattattttatcttttctaaataagcatttgtctacaataatacatataccgtattatggctattatggctctaaatgtaatgttcaaattgggctaaacaaaagaactcattctaaaaagccaaacccaatatattatttgttaaatttaagcaaaaataccgaaatgcatcccgcaaaacc

SEQ ID NO: 43047 - DNA, 906 bp, Heterodera glycines
  unsure (1)..(906): unsure at all n locations
cagtagtcaagtcgtatancaagtggattttgcgccccgccttttccaccatggcacacgagtgctacggctttggcaatgcgcgagcaattaagcacgcacatcgggccagatgctggggcatttgtgctgcaccgcaagcggcgcataagtagtgcctcccgacaccggggagcaagaatattgctatcttgcctaggcgggattctgacttagaggcgttcagtcataatccctcagatggtagcttcgcaccattggtctatcgaccaagcacatgaaccaaatgtctgaacctgcggttcctctcgtactaagcaggattactatcatagcaacaggtctttagtagggtaaaactaacctgtctcacgacggtctaaacccagctcacgttccctattggtgggtgaacaatccaacgcttggcgaattctgcttcgcaatgataggaagagccgacatcgaaggatcaaaaagcgacgtcgctatggacgcttggccgccacaagccagttatccctgtggtaacttttctgacacctcttgctggaaactttacacattcaaaaggatcgataagccacgctttcgcggtccgtattcgtactgaaaatcaggatcaagtaagcatttgcctttttgctctacgagaggtttccgtcctctctgagctcgccttaggacacctgcgttacgctttgacagatgtaccgccccagtcaaactccccgcctgacactgtcatcgtcggggggtcgccgggccaccgggtggcccgacttaacaccaaaatggacaccccttgcgggcgcactcccgttttaccgattaagttaggatcgatgaaagtagtggtatttcactggcgccttgcggctcccacttatgctacacctctcatga

SEQ ID NO: 43048 - DNA, 1127 bp, Heterodera glycines
cgttttagaaatagcgtagaaaacagcttcgatatcaagaaaccaagtcaagtccagaaaggaatattttaaaacgatttcgttttgttttggcattatgataccgaataactttcggaaattatggaaacaaaattggagaaattcgaataattttttgactgcaatttttttccttttttgaattgggttcaaaaaaattttaagagaatttttgattattattttgaagtcttgaatttatttgacaaatccaagacttaaaactgggagaagcaaggggctgtggctgggggcctaaaatttgggccacattggagaattaattctgatttctgaaaaagtcccagaaataactattttttctttccatacgttcttgtagagctcgagctgctctttccaatggtcttatcccggtctcgatccgtgccgaactcacaaagttatggagtgaaatgtgaaatattgttttcaccacaaggcattttttctgaaaaccggattcaaaaatctggggtttggtataaccgttttagaaatagcgtagaaaacagcttcgatatcaagaaaccaagtcaagtccagaaaggaatattttaaaacgatttcgttttgttttggcattatgataccgaataactttcggaaattatggaaacaaaattggagaaattcgaataattttttgactgcaatttttttccttttttgaattgggttcaaaaaaattttaagagaatttttgattattaatttgaagtcttgaatttatttgacaaatccaagacttaaaactgggagaagcaaggggctgtggctgggggcctaaaatttgggccacattggagaattaattctgatttctgaaaaagtcccagaaataactattttttctttccataccttcttgtagagctcgagctgctctttccaatggtcttatcccggtctcgatccgtgccgaactcacaaagttatggagtgaaatgtgaaatattgttttcaccacaaggcattttttctgaaaaccggattcaaaaatctggggtttggtataaccgttttagaaatagcgtagaaaacagcttcgatatcaagaaaccaagtcaagtccagaaaggaat

SEQ ID NO: 43049 - DNA, 934 bp, Heterodera glycines
cgttggatttttgctccccataattgtttgagtaccccatacggacacttgaaaaaatcgatttttttgttttcggggcagtccccccgaaccgatgcgcccagatttatggggagaccgaatccttcgggaatagcttccctatagcctgtactttaattctgcgttggatttttgctccccataaatgtttgagtaccccaaacggacacttgaaaaaatcgatttttttgtttcataaatatttttttcagaaagtgctctaaagcgcaccaaattttatttacaacttaattttagcactctgatgctttagtatcaaaaaggaagatggagaaaaaattttttaaaaaatttttccttatattttggttatatcgttttgcttttggtggggtgcttggaacagtggaatcatgcgcacccgtccgatctggcaagttaagcaacgattgctgactagccaaaaggttcggtgccgtgatgaaacgaaccagcactgcttaccccgcggcacccggcacggtcccccgaaggaatggatttaattaaattctctccttcggggatttttttccattaggtcgtccgttagcgttcgattgctctagtcaatttttcaaaatttttgttgaaatatttgtcgtgctctgaagggcgtgggagggggggggggggggaaggccccccacgaggcccggaatgaggccgagtgagtaccttcggtgcaggaaaattattaaattttaaaaattttttaattgctttttaaatatgccaaaaaatgtaggcttaacttttttagtgaaaattcgatcactcatattttttgctatttgagcagaagcgcaccaaactttgcagggatactccccggtaaaaggactaacttacactgaaatgagcgccgagctagctggatcaaaaaaatttt

SEQ ID NO: 43050 - DNA, 1274 bp, Heterodera glycines
ggttatatcgttttgcttttggtggggtgcttgcaacagtggcatcatgcgcacccgtccgatctggcaagttaagccacgattactgactagccaaaaggttcggtgtccgtgatgaaacgaacctactctgcttacaccgcggcacccgtcacggtcccccgaaggaatggatttaattaaattctctccttcggggatttttttccattaggtcgtccgttagcgttcgattgctctagtcaatctttcaaaatttttgttgaaatatttgtcgtgctctgaagggcgtgggaggggggggggggggggcgaagcccccaccacgaggccgcgaagaggccgagtgagtaccttcggtgcaggaaaattattaaattttaaaaattttttaattgctttttaaatatgccaaaaaatgtaggcttaacttttttagtgaaaattcgatcactcatattttttgctaattgagcagaagcgtaccaaactttgcagggatactccccggtaaaggactaacttacactgaaatgagcgccgagctagctggctcaaaaaaattttcgaaaatctgagtctttcgtttttatttattttttgcaaaattaattcttaaatattttttcagaaagggttctgaaacgcaccaaattttatttacatgttagtttaggcactctgatgctttttctatcaaaaagggagatgaataaaatttttaaaaatttttaattcctttttaaacaggccaaaaagtttaggcttaacttttttttcagaaactgatcagaagcgcaccaaactttgcagggatactgaaaggaagagaaataacctattttaaatattatctagtcagttcatttaaataatttttatccaaaaaatttttttttgggttttcggggcagtccccctgaaccgatgcgcccagatttatggggagaccgaatccttccggaatagcttcactatagcctgtactttaattctgcgttggatttttgctccccataattgtttgagtaccccaaacggacacttgaaaaaatcgatttatttttgttttcggggcagtccccccgaaccgatgcgcccagatttatggggagaccgaatccttcgggaatagcttccctatagcctgtactttaattctgcgttggatttttgctccccataattgtttgagtaccccaaacggacacttgaaaaaatcgatttttttgttaacggggcagtccccccgaaccgatgcgcccagatttatg

SEQ ID NO: 43051 - DNA, 923 bp, Heterodera glycines
gctttgaaaaaaataattggcgtataaaattgtcattttcctatttcaacagataagtagcatgccattggatagcattttttatgggctttccaatgataccatatttgcatttgtgacataaacatttatttgatttattttaccatattcacaatttgatcaaaatataggtggtcaaaagtgttgtcccatttcattttttggcacaaatatcaatatttagcatgggaaaaaataatattattcctactccaataaaggaggcagttttgcaagcatgtttaaatggaaagcatgatgggacaacacttatgaccatgactgtagtaaagaaaagcgcatggtatttttttagtttcagagcacaacacacataaacttaaatttttgtttttagaaatttaattgattttttgatccacaaaaattttaatgaaaatttattataaaataaaattttgtaatatttattaattttctctttatagaaaaaattcaacaattttcacttacattgactgtgagcatcctgtctaattttgtacataaaattgggaccaaaattggcatcaattacgatgcctggttcggacagtaaaacacgcggaaacaaatccaattcagtaacatataaatgatggacggtcgcttaaaaaattatgtgaaaactcgatttttaaagtttcgtggttttataacgaatttttctcccattttttgtgtaaatgcttcccacgatgtcaaattctttccgattccaataatgtccccctgatcaaaagtggcaaagccggactgtccgccgaatttgtgcccgcgaattgtgccattggaataataaatatacgaagcattggccttttaatgtgacgagagaagaaattctccactgcactcgattctcttaaaattttgtgaac

SEQ ID NO: 43052 - DNA, 1476 bp, Heterodera glycines
ctcgtcaggagttgattttatcaaaaaatcgtctaacagtttttttgtagagaactttaagcccaatctaatgtgctttatctcatgtttttatcttaaatttaaaaaaagttataaaattaattgtgattttgaaactcaaaaccaaaggggggaccccatggttttgcatttcatgaaaaatttttttgctcctaaattagccaaaatgcatttttatggcctaatttatggtgctgaagacgaatatatactttatttttggtttcagactttttggaaggtggttacaaatttttgaaaaatcgtctaaatttgagccccggaaaatccagtcaaatttcgaaaattcataactctcttcgtttttgatcaaatttagtggaatgtagtttgaaaaatagcaaaaaattaggagaattttatgagattcatttggaatttctatcttccaaaataaaaaagttattccagaatttctggaaaaattcgatttttcagaaaaaaattaagaactcggttatgaaaaagtattttataaaaataatatactcaaaaaatccgcaattttttgctctattttataaattttattttagctttttatcacttttttgaaaaaagttatagaaataaaagtgattttggaatttgggaccacaggggtgtgaccatgatttttgagtggaaaatttttttcaccaaaaatcttccaaaaatatgattttaggggttatttgggccgctgatcacgaatatgtaatcagattttactttagacatggttaagacctcagaatcccagtgttattggggattctgaggggtgggagcgcccgtcctgaggccgcgaagcggccgaatatccccaaaaaaattaaaatacgggcgcgaagcccgtcctgaggccgcgaagcggccgaatgtccccaaaaaaattaaaaaacgggcgcgaagcgcccgtactgaggccgcgaagcggccaaatgtccccaaaaaattaaaaaacgggcgcgaagcgcccgtcctgaggccgcgaagcggccgaatgttcttaacaaaattaaaaacgggcgcgaagcgcccgtcctgaggccgcgaagcggcctaatgttccccacaaaattaaaaaacgggcgcgaagcgcccgtcctgaggccgcgaagcggccgaatatccccaaaaaaattaaaatacgggcgcgaagcccgtcctgaggccgcgaagcggccgaatgtccccaaaaaaattaaaaaacgggcgcgaagcgcccgtactgaggccgcgaagcggccaaatgtccccaaaaaataaaaaaacgggcgcgaagcgcccgtcctgaggccgcgaagcggccgaatgttcttaacaaaaatatgatcgggcgcgaagcgcccgtcctgaggccgcgaaacggcccaatgttccccacaaaagtagaaaacgggcgagaagcgctcttcctgaggtctcgaa

SEQ ID NO: 43053 - DNA, 930 bp, Heterodera glycines
tttttggactcacagcccgtggcattcgctttggccatgccttcccccccccccacccctccctcaaattcactgaccaaaacgtgcggaaaactcgcgccctcgcggcttccgtccccattccattgttcgaagtcgtccaagtggatatctccgttaagcgtccctttcgactgataatttgggtaaaaagtgtgtgccaaaatgtttgatccgtccgcgcccgccccgtcaaatttgtgcgcgtctccgtgctctccgaccgcccataaaatggtaatgtccgcttccgcctccgtcggcgcctcttcaaaaaacagcgaaagactctgaaaaagaaagacatttgtatgaaacttcttaaatttcaatattaactcacttccaatgcgttaattttcacctgtgaagaccaaagactgaatgctttgtgcacaatttttctgaaaatgaaatcgatcggtaattaaattctgtaataaattaatccctttcccgtggcaatcacaatcaattcaaacaaatccgatacatttagccaaatctttggttacggccctctctttaaaatacaacaatttctctctcaatcttcgatcacttttgcctttgatcacttctcttttgtctctttgtcctttgatcccccctcttttccccccttttccatgctcttctcttccacctgatttcttctctgctcatgtcgggcgtgtaattgtggatgaaccacttaagatgaagctcattgttccggactttgtcctcccatcgtgatatataaactgaaggaaatggtcaattcattcatttgaagagaattaattccgaagggccaatttttggacattaaacaaaagggggagcgaattgattatcaaaagacggtcaaatgggaaacggacgcaaaagttcgtcttgaaaaaaatg

SEQ ID NO: 43054 - DNA, 581 bp, Heterodera glycines
  unsure (1)..(581): unsure at all n locations
catgtactagtaatantttttgaaattaaaaacagaccacttcaaatcgtggagatggcagtcaaatttcaagcgtgcaatgtctttgacaatgttcgaggtcagataggccaggccaatttcaaccctaaaaaacagtcaaaatcaatttcatattttgaaaaaagagtatggaaatgaatgaactctcccaaaacaaacaaacctcaattggaatggagaggacggcgttgtcaagcagtggtcatagcccacaaaaacactttgcaaatggacatgcatatttgcctaacataaggaaattagttgttttttcgtttttaaattgtgtttttttttaaacttttttcaaaaaaattccatttgcccactcccccgccaagaaatcgaataaaatgcttaattgtaagaccatcagtacatcccccagcccatcaatacacacttcaacttttggcagcacatagcccggcactccttcatagtcgggcaccgtgaaaaagttggcaaattgggacacccaaaagaagcgagtgctggcaaatgggcgcaaatggatgagcaaattgcgcatcccaaag

SEQ ID NO: 43055 - DNA, 1059 bp, Heterodera glycines
tttaaaacaacaagcgttggcattttttcaggttaagtttgtcctttacaatggagaaggcctgcaaaatttggagagattatatcgattttagtgcgctaggttcgatgaaactttttaaaatataagcctaaactttttggcctgtttaaaaaggaattaaaaatttttaaaaattttattcatccttttgatagaaaaagcatcagagagccttatttaacttttaattaacatttggtgcgtttcagagcagtttctgaaaaaatatttatgaattgattttgctaaaaaaataaaatagtgaagctttaaaaattaataaaaaattttaaattcagaattactggagtaagcatcatagcagtgcttttccttgtctttttgatgctctcgcaaaatctggttcgcttctgaccagtttataaaaaaaaagttaagcctaaaatttttcgcatatttaaaaagcaattaaaaatttttagatttttattcatctccctttttgatagtgaaagcatctgagtgcctaaaataacttgtaaataaaatttggtgcgtttcagagcagtttgtgaaaaaatatttatgaattaattttgctaaaaaaataaaatagtgaagctttaaaaattaataaaaaattttaaattcagaattactggagtaagcatcatagcagtgcttttccttgtctttttgatgccctcgcaaaatctggttcgcttctgatcagtttataaaaaaaaagttaagcctaaaatttttcgcaaatttaaaaagcaattaaaaatttttagattttttattcatctccctttttgatagtgaaagcatcagagagccttatttaacttttaattaacatttggtgcgtttcagagcacgttctaaaaaatatttatgaattaattttgcaaaataataaataattaatgaaaaagtcagaatttcgaaaaattttaaaaacaacaagcgttagcattttttcaggttaagttagtcctttacaatggagaaaactcgcaaaattggagagattatatcgattttagtgcg

SEQ ID NO: 43056 - DNA, 869 bp, Heterodera glycines
  unsure (1)..(869): unsure at all n locations
atggtagtgccacacacntttgtgttccatgagcggtcttcaatcgcttgctatgatagtcatagtaggtgggcatgccctccaatgtgatggctttgggccggaaggttaaaaacacgtgtagggggtgacctatgcgcgtttttggctctccaaaaatggcccaaatcatcgctcaggagaggggtcatgcccgatttttttttgggtggccattttctttcattttcgatcaaatcttattgttttcagttttcataaaataaaataatcaaaatcaattttagaaaaaatgagtcagttttctgatgattcccaaccccccgtgcttgatggtccttattcccctgttggtgatggtggggccgaattgatggatgatgcgcctccgctggaagacgtcatgaaacgcctaccaatctccgttagtctttgcgaaaatgtcttaaaattttctattttaattttgcgaggtcttttcaggtcgagccatcggacaacaatgagcgcaaagtccaaaaggagccgtcgattacccatgaattggacgctgagttattcaacggcaacggatttgcatgtctctccgcagcacaggctgaagctggacggttcaaaggtgtggttataaacacaagatttttaataaaatttaaaatttttattgaattttttgatttatgttgtgtaaaattatttcttaaattaactattgtacattttgaacaaaatattttaaatgagccgtttagcgtttcgatttattggccagtttttgatgagcatttcgttcggcgcagttttcccagaggatatattgcgcaacctcttaccatgtgccttgcctatgcggttgaaggagctgagtc

SEQ ID NO: 43057 - DNA, 1529 bp, Heterodera glycines
  unsure (1)..(1529): unsure at all n locations
caattgggtgaaaaaatggaacatattaaacaatattatcaactcaaagaacaaaatcaaagaatacaaaattgccgaaattttaaacattccaaaaaactcattacgcaaatacaaaagcaaaatttggcattcaacctaaagaaaaattgctataattaggataaacgatattatgacaagattatttagtggaaaaatcacaattaaaaaagaaaaaaaatgcgaaaatttcaaatttttttttgagaatttgtttttttttcaatattttaatttatataaaaaaagtttaaatttaaacattaaaatcattgatgaatttttaaaaataaatattattcaatgttatttgggtggtgcatagaattagcattttgttctgtgagtgtcaataaatttcagtaattggttaattttttaattgatgcatcgacctaataatttaatttttaatgcattttaatttaaattaattggttttaataaaatctaattttttaaatttaatatgcacaatccaataatataaactaattgaatttaattanaattaaattctaacccattttttctattttacctttcccatggcgagcccatccaatgaaagttggccttccccaacaataaatgccaatgtcgtcctcaccttggcacaaattttcggacaacggaatctgttctttgtcctcaaagcctggacagttccacagagagtcttaaatttcaaaaaataaataaaattaaatttggcattaaaattttttaattttcccactttggccttgtgtacatttgggcgccggcattacaaatgggtaagtgtcgttgttgcgccgaaaaaagcgccaaaatgcgccgtcatcatagcccatggtacggcacgcggtgcccgtgtcaatgctggtccaatttgtcatttgggtacagacggaacgccaacggtcccgaaagcgaatctaatcaaaaaaaaaatttcaaaaaatgtattatgcatttttcaaattaattttaaatgataaaaaggcgttacgaaattaaaaatttaatttttttttttttttttgttacttaattacaatttctaattttttggaacaaaaagatgaaaaaatcatttaagaatcattttagtggtaaacgaaaaaaatttttattagttttttttagactgtaacattcatagttaatttcgaaaaattccaaaattgatcaaatcttgatgacaatgaaaataattctgaaaaatacgctttttttatttttgagcaaaatcttcttttttttttgtaaaatttcagctcaattagacaattattttaaatggctttaaaatgtaaacctcgtattttttatttttaattcaaatgttttttttataaaaaaaacatttttaattgaaaacgaacttttattanatttcgtaaattattttttgaaaaaaaatattaaagaaatttgcctgcagacggcttggcctgacgggtgggaccgtcaattagccgtaattctggcaatttgctatc

SEQ ID NO: 43058 - DNA, 1261 bp, Heterodera glycines
  unsure (1)..(1261): unsure at all n locations
aatattaaacaattaatataatttattttgaaaatgtcatttctaaatttaatctgaatttacgaagaatttatttataattataattttaattataatttaaatcaattttaatgtaaggaaacgacatcatttcccgtaagtccaataattatttatttttaattaccctttaattacatataaattatttttatatagcaaattatacggtgccaagaagtcgtcgacttcaaccaaatcaattttttgctgaaaattgaagaaaatttttcaagaattcggagctcacccacccaattgtcaaatgcttacatcaaccaattcacttcactggaacacttaatcaattgcagtgaaaatttgttggcaaaggcacacaaattttcggtgaataaaaattaaaattttcaaaaaataaattattaaatttaagacacttccaccgttgccatggcagggcgaaagggtccaagagttggtccaaaaagatggctttttttcgactgaaaaaccaatgtatcgcattttggaccattttttgtctgccggattgttcaaatcaattcctggaatggcatcattatgtccagatgataaggtttattattaataaacggcacaaacgaaccgagaacataaaaaactaccaaagcactaaaaaatccaaaataaattattttaaatttgcaaagcctagattttcttcctaattagagcttcattaaagattgatttacgcctaattgccaccactcattcaataatgataaattaattattattattttttgcccaaatttaaagtttaggcaactttatttcgcgcacttgccataccgttgtgcggcttcatatccgcctacttttcaattcagcaacagtcggacacggtgatccggccaaacgggctgatgccgttttggtatatgaatgtgccgcgctacacatttgatcagaatgtgaaaatgttcatcacaaatatgtactgcaatgcattgaagccgttcaagcaattgcagatgaaccgtgaggagtttgtgctgttgttggccatcctgatcacacaaacttgtgagtttttttaaaatttattttttcatttcaatcaatttgatgcaatgtctgaaaatatttggtctttactttatatctgatcagatgtttgcaatcgaactttggcgttcaaaccaataatagttcanatcagtaaaaatttcttggngattagaatttttcataatttttgaacaaattttca

SEQ ID NO: 43059 - DNA, 1417 bp, Heterodera glycines
tgaaatgatgcggcgtgagaagaaaaagttgctgggaacgtcgacgtgcaggacccactggcctttgtcattccagcaacgttacgcgaaaaacgtggcgaagacatcgtcttgtatgacagtcgcaatgtcaggcaaggcgaaaaggacgttgtccttattttcggcagtgttaaggtacattttttggctataaaattctgtttgttattggcattcctttagactctgaacattttgcgccaatgtggcacgtggcacctcgatggaactttcaaatgtgctccagcgatgtgggagcagtgcttcgtcattggtgcttcagtgcatcagaggatgtgcatcagcatgtggtgtctcctgcctggaaaacagcgacgctactacgaagaagcactgaattcggcatcggctcaccggcaccatcaactcttacgtggccaaccactgtgagtccacgggagcagcttgttcaatattcgttgagcccgctaccgactttgacagctccttcaggcagaatctttaatcaatcatccgtttaaatttaataaaaaaattcagttccagcgtgggaggacgaaatcgttcgtgcgccacattttccaattccgctttggaacatgcactcacaggcaacatctgccctcgctcgtacaaacaacggactggaggcaactcatcttcattttatggtctttaatttattaaaaacaaattgaaaagaaacatttagaaaggcctctgtcaccaccccgccctctcggacttcatttgtggggttaatgaaagcatcgacagacaggtggacgctgcccgatctgctcgccatttcattcacaagcgacacaaacgatacatcctccaggatgctgtcattatgcgaattttggcggaggcgtcgtacaacagcaatggtgaaattagtgatcttatgacggcgctcggtctccaaaattgaaggatatgcgggaaaattgaaggatttcgagaattttgatgattcaattgtccacgttccgtaaagaattttattgaatgtttaataaaattatttttcttaatatgtgaagctgagggagtgtctatagagagaattcggatggcataggaaccctaaaacttgttcgaattttgatcagcactctttttaggagctttgaattttttttttttgcaattttatgtttatatttgggtccagggttaggaaatgggttatataaatgtcgtattcgtattcagcgacccctaacaccttaatttagacccattttccggctttttaatagctttttcgagttttggacacttcgtgggtttttactcttttggacatttcgtggcttggacaatacgtggcttggacatttcgtggctttgacatttcgtggcttggacattttgtgggtcagcg

SEQ ID NO: 43060 - DNA, 1048 bp, Heterodera glycines
gtttgaggtacttggcgtgtcctgcccataatatctgtggcatggaataaattttggaactgcgctgcctaacggcggtgcttaaagtgcgctaaaaatgatcaaatgattatcaatttttatttttcttaattccaaaatgaattcgaaacgcaaaaatttaatcataattcatgtggtaaaaaatgcatttaaaaataaaaaaaattcttgaatttgcttctgaattttttaattttacatagaaaattactttttcgaaaattttgcacaaataagaggcgaagaaattcaacgaaatttttattaggactttgatttaaaatgttgagaggtttaacaaatttgtacactgaatgttggatcgtcaacaccaatgagaaatgactaacagaaaagagggagaaaagggcgtcgttggctttggaaaaatagcctataataaaggagagactagcagacgatgagtgagagaaaaatagtggtaaaaattgtaaactgctgcattggcagagtcagagaggggtcacaaagagttcgcacagcatcgaatatttccttcattttgggcgtcattcttccccactgcacttctttcttcggtttaattacccaagtttgaggtacttggcgtgtcctgcccataatatctgtggcatggaataaattttggaactgcgctgcctaacggcggtgcttaaagtgcgctaaaaatgatcaaatgattatcaatttttatttttcttaattccaaaatgaattcgaaacgcaaaaatttaatcataattcatgtggtaaaaaatgcatttaaaaataaaaaaaattcttgaatttgcttctgaattttttaattttaaatagtaaattactttttcgaaaattttgcacaaataagaggcgaagaaattcaacgaaatttttattaggattttgatttaaaatgttgagaggtttaacaaatttgtacagtgaatgttggatcgtcaacaccaatgagaaatgcctagtaaggaaagagggagaaaagggcgttgttggcttggaaaaa

SEQ ID NO: 43061 - DNA, 1473 bp, Heterodera glycines
tgtactgctcgtagttgatgtgcctggtcttcactgtctacgctgcttctgttgtcgttcccacagtgtccaccatcgccacttccgacgacgctgttgacggtgcagcggatgacgtcattgtcgtcgacgatgccgttgcccggcgtcgttccctcgtgccgccgccgctgcaactgttcctgctgttcgcgtcctcctccggaatgcttggcagcgggccggccggctcagcactgcccatgccggcgtccgaccgcttgcgcggtgtccgctggccgacggttggtgacgacgcggaggaggaagaggaggactgaccagcagaattggtgccatcgccgccgccggcagcagtgccacaatttgcatcaccgccttaaaaattaatgatgcaaaaaactcatgggttcatggcaaaagcatattcaacttggaggaatggcttataaaaattttaaagcgctagatttatattaattccacgcggatctttttgggggtgcaattcatttccctcttccccgccgttttccattttttactaagaaatttcctaagaatttttttacgaaaaatttgtaggtttgaaaatttttcggggggaaacaacctgctccgctttttgcagtcggatgaaaaaacattttcaggcaagcggattcggacccaaggcggaccaacacaaacaaatggggatgtgacaaaatcgcgccacaatataacccacccggcaattcataataggcttaggctcaagccttattttgtttaattggacgagtttcctttagtattaggaagcgagtaaatgaattttttagccgaatatttattttaatttcggcgacaagattttggagtcgaaaggaggactcaagcttttcaaattccgttcgagttcggcggctggggcgcacccgattttgtgtcaattgaacgcattcattgaccaaatccgtgccgtgccatgccgtcactcaccctctaaaagcgtggtggtggcggcggcagtggtctgctgctgttcagcgtgttcatcgccgccccgatctccctcgtctccttcatcacaaccagggcattttgccgttgttgtgtggtggtggtgccgtggccggtgccgcgggtggggtggcgtcggtggcgatgtcctcgtccggtcgctgttcatgtcattgccgccgttgccctcctcctcatcaccagcatcgtcgtcttcctgctcctcctcctcgtcgtcgtactgacaattaaaatgtttcaaaatactaatcgggtacaccccaaaatttcgccgcgacttaatttcgccgaagaaatttttgaaaaaaatttgttttttagcgatttttttttaaaaattttcgaaaaacttactagtttgccataaatttcaaaaaaatttttctaaattttttcttgaaattttcttataaaaattctaagatttttttcttaaaaaatttctaa

SEQ ID NO: 43062 - DNA, 938 bp, Heterodera glycines
tgatcgaattttcactaaaaaagttaagcctacattctctttgcatatttaaaaagcaattaaaaaattttaaaatttaataattttcctgcaccgaaggtactcactcggcctcttcgcggcctcgtggtgggccttcgcccccccccctcccacgcccttcagagcacgacaaatatttcaacaaaaattttgaaaaattgactagagcaatcgaacgctaacggacgacctaatggaaaaaaatccccgaaggagagaatttaattaaatccattccttcgggggaccgtgccgggtgccgcggggtaagcagtgctggttcgtttcatcacggcaccgaaccttttggctagtcagcaatcgttgcttaacttgccagatcggacgggtgcgcatgactttctgaaaaaaatatttatgaaacaaaaaaatcgattttttcaagtgtccgtttggggtactcaaacatttatggggagcaaaaatccaacgcagaattaaagtacaggctatagggaagctattcccgaaggattcggtctccccataaatctgggcgcatcggttcggggggactgccccgaaaacaaaaaaatcgattttttcaagtgtccgtttggggtactcaaacaattatggggagcaaaaatccaacgcagaattaaagtacaggctatagggaagctattccggaaggattcggtctccccatacatctgggcgcatcggttcggggggactgccccgaaaacaaaaaaatcgattttttcaagtgtccgtttgtggtactcaaacaattatggggagcaaaaatccaacgcagaattaaagtacaggctattgggaagctactcccgaaggattcggtctccccataaatcagggcgcatcgggttctgggggactgccccgaaaacataaaaaatcaatttttt

SEQ ID NO: 43063 - DNA, 929 bp, Heterodera glycines
agcgtgagagggagggcggtgcgcaatcgccatttaatttctcagagaatttttaaatttatcttatatccaagaaaaatgactatctcttattttgagaaattttatacgttacaaatgctctcgagcatgataggaagtgcggtgcgcaatcgcccatttaatttcacagagaatttttaaatttatcttatatccaagaaaaatgactatctcttattttgagaaattttatacgttacaaaagcgctcgagcatgagagggagggcggtgcgcaatcgccatttaatttcacagagaatttttaaatttatcttatatccaagaaaaatgactatctcttattttgagaaattttatacgttacaaaagcgctcgagcgtgagagggagggcggtgcgcaatcgccatttaatttctcagagaatttttaaatttatcttatatccaagaaaaatgactatctcttattttgagaaattttatacgttacaaatgctctcgagcatgataggaagtgcggtgcgcaatcgccatttaatttcacagagaatttttaaatttatcttatatccaagaaaaatgactatctcttattttgagaaattttatacgtacaaatgctctcgagcatgataggaagtgcggtgcgcaatcgccatttaatttcacagagaatttttaaatttatcttatatccaagaaaaatgactatctcttattttgagaaattttatacgttacaaaagcgctcgagcgtgagagggagggcggtgcgcaatcgccatttaatttctcagagaatttttaaatttatcttatatccaagaaaaatgactatctcttattttgagaaattttatacgttacaaatgctctcgagcatgataggaagtgcggtgcgcaatcgccatttaattcacagaga

SEQ ID NO: 43064 - DNA, 1000 bp, Heterodera glycines
  unsure (1)..(1000): unsure at all n locations
ccaaaaaaaatccaaccatttaaaaatctataaaaatttaaaaatgagattcatgcgagattttctggaatagctaataggggncctagttaagctgtaaaaanaatttggggcgatttgaaagagaatagaaagaaccaggttcgatgaagttttggtaagccaaaaaaaatgcaaacatttaaaaatctataaaaaatttaaaaatgagaattcatgcgagattttctggaaataagcttaatagggcctagttaagctgtaaaaaaaatttggggcgatttgaaagagaatagaaagaaccaggttcgatgaagttttggtaagccaaaaaaaaaaatccaaacatttaaaaatctataaaaaaaataaaaatgagaattcatgcgagattttctggaaataagcttaatagggcctagttaagctgtaaaaaaaatttggggcgatttgaaagagaatagaaagaaccaggttcgatgaagttttggtaagccaaaaaaaatccaaatatttaaaaatctataaaaaatttaaaaatgagaattcatgcgagattttctggaaataagcttaatagggcctagttaagctgtaaaaaaaatttggggcgatttgaaagagaatagaaagaaccaggttcgatgaagttttgttaagccaaaaaaaaatccaaacatttaaaaatctataaaaaatttaaaaatgagaattcatgcgagattttctggaaataagcttaattgggcctagttaagctgtaaaaaaaatttggggcgatttgaaagagaatagaaagaaccaggttcgatgaagttttggtaagccaaaaaaaatccaaacatttaaaaatctataaagaatttaaaaatgagaattcatgcgagattttctggaataagctttattgggcctagttaagctggtaaaaaaatttggggcgatttgaaagagaatagaaagaaccaggttcgatgaagttttgttaaggccaaaaaaa

SEQ ID NO: 43065 - DNA, 1278 bp, Heterodera glycines
tgtagtagacaaattactcaaaagcaaccgaatctttctttcattcgttggctttaagtgttatttattagcatgtataattttaaaaatggataagtttcaaataaaataagttgtaaccacaaaggctcacaaaatagctgttctttatcgaacagaatcaagaatggaaaatttatttgcttattagaaaaaaactcctacggtaatttgatgaaaaacgaccaattagcaaaaaataatgctcgatttaaaaaataaataaatattatcaaaaaatgtaatttatttatatatattaatttttcaatgactgtcaatttatgaaatatatttattgaagaaaatttcatttatcccgaggaataatggtcggaggctctaatgaatgaatagccttaggcaatgaatggccatcatatttatttatttgtaaaaatgggtagtgaaaagaaaaaatgtgtcggctgttgtggtgacaccactgccgccatttgtccgtcccccgaggggccatcgatcgacgagcgccgtctccggcgccaatgctcctccgcctcctcaaattttgctgtgtgtgctttgctgaccttcacataattcagtcccaatcaattggtaatagggatagtgttatatgttcctaaatattccaaatatgcaatacgcactaaaattgctagaatatacattaaaaacccaaaaaatgcccaaatatatactaaaattagaaatttagttacaaaaatatgtaaaaaaatgcgtaaagatataaaattgtcaaaaatataattaaaacaatggttaaataacgtattttagatttttgttttttgaaatttatggacgtaaaattgtgtgtattatcttcgaatttttaattttaacacatttgaccacgtaccaaccaaagaaaaatcatcaaatcgttcccggtgatttcgcaatctatgaaaatttatagcattgtaataatagtcgttgaactcgaatttgattgttaatgatgttgaaaaattttaattaatagagggaaaacagggttgagaaaattgtattaataaaaatttataaatttaacaaaagttaaccataaaaaaatatgaacctttcaaaaattaattatattataacttaagtcctcggatcaggattttaaccaaaagtacgaaaattatgtttttcaaccgattcttaaaaagtgtaaagtgattttagataccaaaattattttagtttcaaaatttttatgtgttcatatatgaaacacgaattcag

SEQ ID NO: 43066 - DNA, 1127 bp, Heterodera glycines
aaaaaaaataaaaatggggtttagggaccccggaaacactcccatcggaagcaagttcccccctttgctgtaccccttaacagttggggaaccaatgccggaaaattgcttaaaaaagaaaccaaacaaattctccattttttactcccgttgccaaccgaagggtacattggggcaatggatgtggggctaccgtatcagttattaaaatttttgtttttcaaaaaggatactaaaactgggatacccccattcagagactagtcaaaaaaaataataataggcttggactactatactaattagaaattttagaatgtgtctgttaaatgcaaaactgttgtgaaaaattgttataactcctttcagagaagagatagaaaaaaaataaaaatagggttagagagcccgtgaacagctgcatcggatgcaagtgccgccgttgctgtacgcctaacagttggtgagcaatgacggaaaattgcttaaaaaagaaaccaaacaaactcatcaattgttagctcccgttggcaaaccgaagggtacattggggcaatggatgttgggctaccgtatcagttattaaaatttttgtttttcaaaaaggatactaaaactgggataaccccattcagagactagtcaaaaaaaataataataggcttggactactatactaattagaaattttagaatgtgtctgttaaatgcaaaactgttgtgaaaaattgttataactcctttcagagaagagatagaaaaaaaataaaaatagggttagagagcccgtgaacagctgcatcggatgcaagtgccgccgttgctgtacgcctaacagttggtgagcaatgacggaaaattgcttaaaaaagaaaccaaacaaactcatcaattgttagctcccgttgacaaaccgaagggtacattggggcaatggatgttgggctaccgtatcagttattaaaatttttgtttttcaaaaaggatactaaaactgggataaccccattcagagacaagtcaaaaaaaataataataggcttggactactatactaattagaaattttagaatgtgtctgttaaatgcaaaactgttgtgaaaaattgttataactcctttcagag

SEQ ID NO: 43067 - DNA, 998 bp, Heterodera glycines
  unsure (1)..(998): unsure at all n locations
taaagttttgtgtgtttcagagcactttctgaaaaaatacttatgaattaattttgcaaaaaataaataattaatgaaaaagtcagaatttcgaaaaattttaaaaacaacaagcgttggcattttttcaggttaagttagtcctttacaatggagaaggcctgcaaaatttggagagattatatcgattttagtgcgctaggttcgatgaaactttttaaaatataagcctaaactttttggcctgtttaaaaaggaattaaaaatttttaaaaattttattcatctcccttttgatagaaaaagcatcagagagccttatttaactttaaattaacatttggtgcgtttcagagcagtttctgaaaaaatatttatgaattaattttgctaaaaaaataaaatagtgaagctttaaaaattaataaaaaattttaaattcagaattactggagttagcatcatagcagtgcttttccttgtctttttgatgctctcgcaaaatctggttcgcttctgatcagtttataaaaaaaaagttaagcctaaagtttttcgcatatttaaaaagcaattaaaaatttttagatttttattcatctccctttttgatagtgaaagcatctgagtgcctaaaataacttgtaaataaaatttggtgcgtttcagagcagtttgtgaaaaaatatttatgaattaattttgctaaaaaaataaaatagtgaagctttaaaaattaataaaaaattttaaattcagaattactggagttagcatcatagcagtgcttttccttgtctttttgatgccctcgcaaaatctggttcgcttctgatcagtttataaaaaaaaagttaagcctaaagtttttcgctcgtttaaaaagcaattanaaatttttagatttttattcatctccctttttgatagtgaaagcatctgagtgcctaaactaaccctgtaataaagttttgtgtgtttcagagcacgttctaaaa

SEQ ID NO: 43068 - DNA, 330 bp, Heterodera glycines
aaaatttctaagttcgcaaatttaaaaaaaaaaaaattctcccaggaaacggcgggggggggggggggaaatgaagtgccctcgtcccccacccccacgccctctttcccctctcctcctccgacttcttctgatcgtcctcgctccctcctacgctcttttggtcatccgcccgccccttttctcgcctgctctccgtccgcctcgtccactttgttcagcaacaacaccaccggctttcggaccagcgcccggtcgtactgctccatctcgcggttgagcagtgccatcatttccaggggcgaacagtgtgtatttgatacaaaaaat

SEQ ID NO: 43069 - DNA, 1083 bp, Heterodera glycines
caccgaccctagggaagagaaaagtcggggatcgagcatttgtcaggatggctggagaaatttttaaaatgtcggggagcaacaaccctcttcgggagtaaattttcgtaaaagtcgaaaaaataaatttttctaaaaagaaaatttagaaattcatttgaagactctcatactatttgagtgcatttgataatatcgcaattccccgaatcgggtcggggtttaaccttcaaccctaattttctagcaaaaaaatgcattgccaatggaaagcaaaaggcaatttagccatttagaagatggccgttggtctatggcctattttgttcagccgtgatggacgaccacacaaaaaagtgtccgtcggtggattttgtgttgtcaggcggtggtgatgtgatgatgatgatgatgataccatcctccgccgcccctcctcctcctttctctcgtcctctactcctagtttttttcttgcccctcattcctttttttacgtttcgccaattcccttttccttttcctctctgccctgtgctatttcgtgcactgtctctcgtcggaggaaaggtgaaattggagagagagatggacggaatggacaatcaattgcagcattgccaactccatcccattagcatcattaatttgatagtgttgctgctgctgtttaatgacaaccactttatacaacagcaattagcagtctgatgtaaatggcatttgcaaaactaaatgatcagcatggcacgtctgagacagacgcgccgagatcgagacgagaataaggatgttatgtccaaaattcaaaaaccaagttttcaagtcaaaagcagacggaggtgagcggaaggttcagcgaatcgcgagaaagctaaggggagggggaccgtaaatcatcacagcagtaacagcggatgaaaggccaactgccgacagtgaagttgaggaaaactgtcagctgcttgtagagtggctcttaaaaggcagggctcgtaggtgtccttatttctttgatttgtgcctaatttggagaggacgaaatcatagaaatttcaaatctcccggcgaatttccaaaata

SEQ ID NO: 43070 - DNA, 763 bp, Heterodera glycines
aggggttcgacaaacccctccccccaccttgtcgctggcgccagtaaccatacagcgagttgatgctcaattctctcaagcaccaatccgagtttgtcacccctcccccctcccattctcgtcctcctttggcgctgatcggatcggtcagcagcatcagacccatcagaacgaacggcaaaaaagggtgcgcttccctttacgacaagcgaacggagtgagcagagagagaaagggacgagagcggtgaagaggagcgggaaccaatcccgcctcagcttggcccaccccaaccccaagcgcgcggcggaaataaaaagattggcgacaataatggatttctcaaaactaacaaaaaaagagataaactgttgtttagccatctaatatattaattttgcaatgtgtatgtgcgttggggccaggccgttttcgtacgagcacatattttttgactataacttttttattttccaaccaaatccaacgatcttgatatcattcgagagcccttaagatgctctattgcctgcaaaattccaaaaaaattttgttcagtttaaaaaaaagttcgagccaaaaaagttggaaaatctggttttttgaattcttctggctataacttttttgaaccttaaccaaaaacttgtgctcgtacgaaaacggcccgtacgaaaacgaccccgacccatgtgtgttgtgggtgtgcgtgtgtgacacaaatgttttgaattatttattgagacgattgttttagagatta

SEQ ID NO: 43071 - DNA, 1003 bp, Heterodera glycines
tgcttctgatcagcttcattgcatgtcacttgcttccgatttgcctgtctccccgttctcatccgccactgatcagcccttttttatccatccgaccaaaggcgcctatggcacttcaattttgttcaacaaccattccgatcaaatggcaccaattcccgatcactctacgatgcttgatccgtcggctacatcattcattaatcaaccattgtgatggcagatggataaatggataagcataaatgacaaaatatactacaatacagtgcaaattgatataattaatctcgagactcacggaacttgactcaattacgaattacgaaaaatacggcattgctcagaattttttaaatggcccctgaaacttagggcatggtttcgaaaaccgagaaatttttcttgccaatttactctcattcaaaaatcggctttaaattgagtataaaaaaatcgccggaattccacgaaattgtcggataaaaattaattaccgagtctcgagcatcaaatttttcatttattaatttaatttttgttgtttagataagaaagagctggtcattcattcaaaatgccttttgaaaaaaattttcaataaaaataaaataaaattttgataacattttatggcctttgggaggagggatgatgattattatatttattaattaccattgtttgtgaaattcaacaatcgatagttttgacgaagcactttgacacgtcaaatttgccgcatttaatagccaggcaaattagtggatggggggggcggactcgggtaatcgctaattttcaaatattaattttcgtaaataaagcaattaatcgccgattttcaagcaaaattggcactcacattccaaaactatgttttgtgttttgaaattttgaccgctgggatttttcagataataaaaaaacaattaaaaaaaaccctgaaaatccggcaggccaaaaatccagattctacacctgtcggtcgcgcaaaaacgcg

SEQ ID NO: 43072 - DNA, 931 bp, Heterodera glycines
  unsure (1)..(931): unsure at all n locations
tgcgtttcagagcactttctgaaaaaatacttatgccccccctgtgcaaaaaataaataagtaatgaaaaagtcagaactttgaaaaattttaaaaacaacaagcgttggcattttttcaggttaagttagtcctttacaatggagaaggcctgcaaaatttggagagattatatcgattttagtgcgctaggttcgatgaaactttttaaaatataagcctaaactttttggcctgtttaaaaaggaattaaaaatttttaaaaattttattcatctcccttttgatagaaaaagcatcagagagccttatttaacttttaattaacatttggtgcgtttcagagcagtttctgaaaaaatatttatgaattgattttgctaaaaaaataaaatagtgaagctttaaaaattaataaaaaattttaaattcagaattactggagttagcatcatagcagtgcttttccttgtctttttgatgctctcgcaaaatctggttcgcttctgaccagtttataaaaaaaaagttaagcctaaaatttttcgcatatttaaaaagcaattaaaaatttttagattttttattcatctccctttttgatagtgaaagcatctgagtgcctaaaataacttgcaaataaaatttggtgcgtttcagagcagtttctgaaaaaaatatttatgaattaattatgcaaaaaacaaataaataatgaactctcttccttaataattttcctgcaccgaagctacaccactcggcctcttcgcggcctcgtggtgggcctncncttcaaggctcccacgcgcgtcagagcacgacaaatatttcaacaaaaattgggaaatcatgtttcccacttctttcaacaaggggtaatattttggaaagaccttttttccccaataaacttggcaaaacccatttt

SEQ ID NO: 43073 - DNA, 920 bp, Heterodera glycines
atgtttccaagggttttagggatcgctgatcacgaatccgacatccttttcgaacaattccgaaccccggacccgaattcaaacagaaagtcgaaaactcaaattttcctatttcagatgattttttcaagttttgtttaaatacacgggaacgaactactaggtcgttgcataaaaagggcgctttttcaaaaagtgggaaaatttgggattttttggccataacttttttaaaaattgtttgagtgcattaaaattgacgccattcaattcatctcgttattctgcatcagatgatattaaatttattagaatttgttacacttttaataaagttacactcaattttctggttatggccaagtccctaattttggcaccaaatttcattggcccatggctgacaggagaacaacttataggacatgctacgtcacccgtcttattccctggaccctatagacttaatttatggctaaattatttctcgcaaaaattccttatagggtaggctctttaaagaatatggcaaggtcgtggatccagtgaaaattacctaggttcaaagaatggcacagaattttacaaaaagggcattgttaaactcccatctcggcggcaaaaggttgtagacagtcagggcaattactttgttaagtagctttttgatcggctttgttatgattgttatttttcattttttgttcataaatttttttccttcaaaaagcgcccttttttatgcaacgacctagtaattatttgaaaaatttttattactttttcaaaaatgcattgaccatcaattggttggatacaatcactttcaatcgcttatttaaagctgttaagacgatcagggattgaaaaaaacctaattttgaacccgttatttttggacaaaagcgcaaatgtcgggg

SEQ ID NO: 43074 - DNA, 975 bp, Heterodera glycines
  unsure (1)..(975): unsure at all n locations
tttccgaaatttcctccccatggtccgccgccgcccatccccccgccgtacggcgaaccgtacattccgcctaaacagacaaaagaattatttacataaatattctgaaatgttggcacttttaaattgaatttcatttcaattttcaaaaagccttttttcgaatgatttaaattaaaatgtttgtccatttaaatttggcatgtaattaattaataattgcttaataaaaactcacgtctggcgcgcagagcagcaggttcattgtcaactctctcttcttgcgcggttatcagtggggaaaaagcgcacaaaacgaccaaaagaaaggcaatgataaaacggagaggcgacatcttgagagtaattagtgcgagggtattaaaaggtaattaagtcaattatggctgtgtgagttttggggaccctcttttatagtgtggccttcttcttctaatgtgctactgatcttcggtttgtgccagtttttcttcctttttttctttcctctttagtaaatttttttcagtttgacaaacaaattaattagggagactaatcagcgctaattggcaaatcggcgcacaaaaatcagtggtgaaacatatttgtttattaaatttaattttgtcgtacaattaatcgaaggtgttcttcaaacttgctgctggtgaaagtgaatcacttgcgcaagtttagtgacttcacaataaaataattattcttccccttttgggcaacaaaacaaaaatttaattgcccatcatttgtaaaaataattaatgcaataaaagaaaataaaattaatttctccatgtttcctcaagctaatttttaatattagtggatagagctgagaaatggcaaatataaagggaaattatagaatttcacttatgttaaaattatttcaaaccatagttntaaaaataaagttatttncttaangttattttaaattaattatcttttacc

SEQ ID NO: 43075 - DNA, 1136 bp, Heterodera glycines
  unsure (1)..(1136): unsure at all n locations
tcaaaataattataaagctgattttcttagtcaatttatagttgtcagaatttagacagtctttatggcagtatttatcatgatttagaatttcatttttntaataatgtgnacataaattgttattgtatttttttgtcagaaacatttattattatttatatcattttcaatttagttgtgaattgttaaatttatttttatttctaatcaacaaaaaattatttgtgtttaatttttaaatattttatattttttattgttttattttttcttgtagcttctgatgaactaaattaatttttaagtcgttttaattaattaatagttaacgttaaaagaaataattattcaaatggatcaaattggaaaaatgtttatttattgaaaagtttctgttcctcaaatctccactctatcccgtgaccggaaaatgcgcttgcaaaaatatgcacgaaaaatgtccaaatattcatttggatattttgacagccttggttataaccttataataaaatgagttacagttttaaagtataataaaaaatatttattatcaattcctttaaaatattctttgttctgttgttatttttaggattatttcctcttataaattatttttaaactcttttttgttttttaaaactaaaatttttacgaatttgttatttttaattataatttacaaaatattcttaaatatttaaaacatttattttctattataataaatatcgaacatttatttttttttgtgtgtttttataattaataaattttgaaaaaaattacattttaattattcattttgactttgtttactatatcaattgtctgatctcgattattcgccatggcatccttttatttttggcttcaatcctttaaaataataaaatgattaattagttttaaatccatgtccactagtaaccattagtatcagggaagtgaacacctttaaattaattaattattttatttaatctttatgtgtttaaaaaaacttatattgtcaaccaaattatttttttaatttgttataaaatttattaatttatggtatgtttggataactagggattggtttggtaactttaaatttttccctttttgaaaaaatttttagacac

SEQ ID NO: 43076 - DNA, 110 bp, Heterodera glycines
tgcgcgaatttagtgaaccccggcatctcggaaatttttcccacatttgcagagatgtcggggcccggaagttaatcaatcaaaaaattacccgcaattagcacaccccc

SEQ ID NO: 43077 - DNA, 1228 bp, Heterodera glycines
  unsure (1)..(1228): unsure at all n locations
tctacttcatctgctactcgccaattcagcttttcttatgcaggtccaattcttaatacatcaccccaaatagttagctaattactcgttaattatgcccctctctctctacccctgcaggggtctcttcaacttgtccatccatccncccctacgaattcgtccttctgatgaatgccttggccattctttgctccgcttgtaaccctttgctgtacactctcttctccagtcgtttccgcgcgcgaattggtcatttgttgtgcctttgctgcgacattttctatcgccgcaacaataagtgaaacgccaagaaaaatagacaaattgacaatccaatgaatggacgaagcgaaaagtgaagaaagaaaggcacgaataaaacatttagcatttaatatttttgctcgttttggtagggataatccaatttattttttcattcacaattcactcaaaaggatgtcagcaaccaatttattggcaacagtcaatgggaattggtaaaatatcgtacaaagaaaataaagaacagaatctttctaattatactgactctaatttgtgggtccgttgttatacactcatcgaaccgggcgattaattgtggaaaagcgaaaagtttttgatttgtaacaaatggaccggcaaatagcattaaattatacatttataaatgactaatgaggggaaatgttcattttttgaggagtgggaattttgctcaacaataatcgaagaatcattttttctttttggaataaaacatttgcacgaaattcggagaaagaaatgtgggagaaaggggggggggggggggagaagcaccggcaaaaagacaaacaatccaattttgagacggagctcaaagttgaaaaatgccattcatcagcctttttgggagacagcgaaacgaaaggaaaggcaaagcgacagaaaaagggagggaaagtgatggaggacaaatcgaaggacggacggagtgatcgtcgacggaaaaggcattcgctggtcaaaaaattccatgtttgcgtcttcgtctcctccgttcctttcgctgtattcagaaaacgtcgccgggcggtgggccattgccatcctaaaaaagggggaagtgaatggtcattatttccaaaggttttgttgaaaaatgaattcttggattggaattgcatcggaccaaaccaatatttattgctattacccaatgtttcggtatnttttctta

SEQ ID NO: 43078 - DNA, 1267 bp, Heterodera glycines
  unsure (1)..(1267): unsure at all n locations
aacatgacttcaattacggacaggaatccgtaccccgtaattacggggggttggaaagcgccgtaatgggtgcacaccatttccccnccgcccgtatcatctctccacaaaaatnttctatacaaacttgtaaaattttttaaaaaatggacaattttttaacaatttttagaaactttttttttgagaaattggtattcaccaccataaaactgaaaatttaaaaaattcttcatgcaattttctgtttgaaaattttttcgggagatggggaggagggtgaacgagctggcccccgccgtaattgcgcacccaacccctttgctgttccacacacccaccatttccatgcgcggtgatggtggtgtcgccgtcattcgcctcctcctcctcctgcccatcgtcgtcgtcgtcgccgccctttttgccattggtgttggtggtgatgccattttggaagagttttgccgtcgtcgtcgctgtcgccaatttgttgttgccaccaccattcatcgggctggtgccaccgccaccattcaccgccgctgcttcctcctcctcatatccgtcatcgtccacatcccgaaagcccatccgtgccatgcccgcgcaaatgatgtcctccgctgacgacgaggcggaggtggacgagccgaatgagtccaggaaggacatggtcgccgcgtgcgacgcttccaacgcggccagtgggggcgaaggcgccgctttgctttggttattattggtggtggtggtggtgccgtttttctgccgcttttcccacatttggtccgtgaaaatcaactgtttctgatgctgaaaatttgagggaaaatatggtacaaattttttttgttgttgttggtgaaagtgaaatgccatacatttttaagggtgactaaaaatttaattttgttaatttctaaaacagaaaaatgagttttttggcacactatttcttggttgttccttggcaccgaaaatcttttccaaatggattttaccaccaaaacttgagtgccgtgagagaaactaacgaaatttttattaaggggggggggatatgccaacaaatgcattcataaatttttttaaaatttatttgttaaaattctacccatggcaaaagtagagcaccgttcaccaacttctcattcacctaaaaaaatttaaaaaataatgtaacaaatactgtttttaatataccctcaattccgcatgatcaatcagaatttggatcacaattcgggcaatgttattctgaaaa

SEQ ID NO: 43079 - DNA, 821 bp, Heterodera glycines
ttgtacctcttgtaatctctgttgtacctcttctgatcactgttgtacctttttaatcacttttgtacctcttttatcaattttgtacctcttttatcacttttgtgcctcttcatcaaatttgtacctcttctaatcactgttgtaccacttctaatcactgttgtacctcttatcaaatttgtacctcttcaatctctgttgtacctcttctaatcactgttgcacctcttctaatcacttttgtacctcttttatcacttttgtacctcttttatcacttttgtacctcttcatcaaatttgtacctcttctaatctctgttgtacctcttctgatcactgttgcacctcttctaatcacttttgtacctcttttatcacttttgtacctcttttatcacttttgtacctcttcatcaaatttgtacctcttctaatctctgttgtacctcttctgatcactgttgtacctcttatcaaatttgtacctcttcaatctctgttgtacctcttctaatcactgttgcacctcttctaatcactgttgtacctcttttatcacttttgcacctcttttaatcacttttgtacctcttcaatcactgttgtacctcttctaatgactgttgtacctcttctaatcactgttatacctcttctaatcactgttgtacctcttttatcacttttgtacctcttctaatcacttttgtacctcttcatcaaatttgtacctcttctaatctctgttgtacctcttctgatcactgttgtacctcttatcaaatttgtacctcttcaatctctgttgtaactctt

SEQ ID NO: 43080 - DNA, 1662 bp, Heterodera glycines
  unsure (1)..(1662): unsure at all n locations
taagtcacttctatacgtggataatttgttgttgttggccgatgccccagccgaagccgaacaaaaggccatcgaagcgcaagaaatttttcagaggcaaaaatgcgcctccgagaatttgtcgcggccaaacctgaacttctgacgaaaattccagaagaggattgcctctctgaagacgagccatcggtgcttggtctgaaatggattttacagtcggacgatttgtccctgccatttcccgaagtaccaaacccagcggtacttactcggaggatagttttgaaaactatcgcatcgtttttcgaccccctagggttatgctccccctgtttagtgggggcaaaaatttatttccagagcttatgggaccagtcccgcggttgggaccagcccatagaaaattccgaaaaacgtgcatgggatttgatcagaagtcagtggagtgatcaaacaattttgatcccaaggaatacgccccgcacaaaaaatggggctattcaattacatgttttttcagatgcttcacccaatgtttttgcgacggcggtatatctgagagcggaaatagagggtcatgtaattaactccctcatttacgcccgttctcgccttaaacccaaaaggatgggtgaaaatcagcccgacgggctcacaattccccgtttggaactcttaggggttctgatcgggaccagggcagccaaattcgtccaatcacatttattttatgacatagaaagtgtccatctctggacggattccaaaattgttttagcatggatttctagcacagaaaaacaaccagtttttgtgtcaaatcgcatacgtgaaatccgaacaaatcgttcagttaattttcactatgttcgttccgctgaaaaccctgccgacctggcaacccacccgaccagtccaaatgagctccgatccgccaaaatatggtggaaaggacccgaatggttagaaaaaccagcaaacctttggccagacgaattgacggcaattctgccaccggaggaaagttcagcgcctgatcccgttgtggtcgccgttgtgaaaattgggccagaaattttcgaattcgaccgattcggttcttggcgaaaacttctcggcactgctttcttcgttttacgattcctgtccaaaatagggaaaagcaaacaactgttccccaacatgagaaattccgattttttggaccccgaaaaccaaaaattcgttttaaattggttattcaaacaaattcagaggggaatgctcccccccccgtcccgacttatcttgacacagacggtttgattaggctcaaatcacggctctgtggaattggagataaagattttgagcatccagtttttgtgccgacggattcgtgggttcttgtcctgctcataaggcactcgcacatccgcttgcttcatgcgggtgtggactccaccctcaccgattttctgtccaaattttggtgtaaaagggcgagacgtacggtcccgtaaatcataaatgaatgcccggtgtgcaaaaaagaccgagcggntaaatttggtctgccaccgatgccgcctcttcctaaatcacggacacgacccgtcttccgtttttgagcaaatcggggatcgactttttagggcccaactctctataaaatgactaacg

SEQ ID NO: 43081 - DNA, 1471 bp, Heterodera glycines
  unsure (1)..(1471): unsure at all n locations
acgcataaaaagcgtgaatggttgtaagtgaagtgcgcaattgccaaattaaaagaccttgtgacagccacgcttattgatcagaataaaaaaagagaaaaaagaaattgccagaaatacaaatatgtatataagccttccttcatcactagggctggaaatttaagtcactaaaaatcttcaaaaagtcgactaaaaaagtcataaaaaatcgccaaaaagtcataaaaaggcaaaaaagtcacgaaaaattgaaaaaagtcctgagaaaatagccaaaaagtcacaaaaaaaatccaaaaaaacacgtaaaaatgcaaaaaaggcgaaagttaaaaaaaatccaatttttaataatttatagaataacattttgatcgtatttttagacacttaattttataaataggtcctaaaataggcataaaaaagagattcttccaacaattaagaaaaaattctccaggcttcattgcctttttatcgatcgaaattttatttttcggaattttcttcgctaaaattcaaattttgcctcaaaaagtcaaaaaaatctcgaaaaaagtcgcaaaaactcgaaagtcataaaaatcgcaaaaagtgtaaaaaagtcaaaaaaagtcacaaaaaaatgcatgttagaagcttcaaacaaagtttagaacactttttaagtcattttaaggccatttagagttagcaaaaaaaatcatttgacttaaattcccagccctagtaataaccttacatttctttcaatattgtttattcctagattttaaatttagttgtacccattaatgcacattgggaggcaaattacattcattatccatatgattttccttaaaatgatttaatgaaattcatattttggaaagtgttatcaatacaataaagcatcaaaagaattttttaaattattaatttatattttggcattttttaaaattattttgaagcaaagcttcatttttttattaaatcttaaaaatcttctatttatctaatgaataatattagaatagttgaaaatgatcctcctcacagttcactgataaacttttcgtaagaatttgaaatatttttttggtttttaatcaatagttaattattaaataaatatttaatttaatttttctattaccattgttagttttaattaaagaaattttataaaattatttatcacttgtaattttaatacgtcacgtaaaaagatgagggaatttttgatatcaagaaatgaatttgttcatttttctttggttttgtaaaatcttctgatttttccagaaatctaatctatttgattatattcagtaacttcttaacttanattgtcataattcatcttatgcgccttttatttgcttctaattaagattattcaaaanattttgtttttcatttcaattaagcatttgtaaaatctttccagcttactaatatttttcatatcaaaaaaaac

SEQ ID NO: 43082 - DNA, 1001 bp, Heterodera glycines
aaaaaatcgatttttcaagtgttcgtttggggtactcaaacaattatggggagcaaaaatccaacgcagaattaaagtacaggctatagggaagctatccccgaaggattcggtctccccataaatctgggcgcatcggttcggggggactgccccgaaaacaaaaaaatcgattttttcaagtgtccgtttggggtactcaaacaattatggggagcaaaaatccaacgcagaattaaagtacaggctatagggaagctattcccgaaggattcggtctccccataaatctgggcgcatcggttcggggggactgccccgaaaacaaaaaaatcgattttttcaagtgtccgtttggggtactcaaacaattatggggagcaaaaatccaacgcagaattaaagtacaggctatagggaagctactcccgaaggattcggtctccccataaatctgggcgcatcggttcggggggactgccccgaaaacaaaaaaatcgattttttcaagtgtccgtttggggtactcaaacaattatggggagcaaaaatccaacgcagaattaaagtacaggctatagggaagctactcccgaaggattcggtctccccataaatctgggcgcatcggttcggggggactgccccgaaaacaaaaaaaatcgattttttcaagtgtccgtttggggtactcaaacaattatggggagcaaaaatccaacgcagaattaaagtacaggctatagggaagctactacccgaaggattcggtctccccataaatctgggcgcatcggttcggggggactgccccgaaaacaaaaaaatcgattttttcaagtgtccgtttggggtactcaaacaattatggggagcaaaaatccaacgcagaattaaagtacagactatagggaagctattcccgaaggattcggtctccccataaatctgggcgcatcggttcggggggactgccccgaaaacaaaaaaatcgatttttt

SEQ ID NO: 43083 - DNA, 1497 bp, Heterodera glycines
  unsure (1)..(1497): unsure at all n locations
gaaaaaatcgatttatttttgttttcggggcagtccccctgaaccgatgcgcccagatttatggggagaccgaatccttcgggaatagcttccctatagtctgtactttaattctgcgttggatttttgctccccataattgtttgagtaccccaaacggacacttgaaaaaatcgatttttttgttttcggggcagtccccccgaaccgatgcgcccagatttatggggagaccgaatccttccggaatagcttccctatagcctgtactttaattctgcgttggatttttgctccccataattgtttgagtaccccaaacggacacttgaaaaaatcgatttttttgttttcggggcagtccccccgaaccgatgcgcccagatttatggggagaccgaatccttcgggagtagcttccctatagcctgtactttaattctgcgttggatttttgctccccataattgtttgagtaccccaaacggacacttgaaaaaatcgatttttttgttttcggggcagtccccccgaaccgatgcgcccagatttatggggagaccgaatccttcgggagtagcttccctatagcctgtactttaattctgcgttggatttttgctccccataattgtttgagtaccccaaacggacacttgaaaaaatcgatttttttgttttcggggcagtccccccgaaccgatgcgcccagatttatggggagaccgaatccttccggaatagcttccctatagcctgtactttaattctgcgttggatttttgctccccataattgtttgagtaccccaaacggacacttgaaaaaatcgatttttttgttttcggggtatttttttcagaaccgatgcgcccagatctaaagcgcaccaaattttatttacaacttaattttagcactctgatgctttagtatcaaaaaggaagatggagaaaaaaatttttaaaaaatttttccttatattttggttatatcgttttgcttttggtggggtgcttggaacagtggaatcatgcgcacccgtccgatctggcaagttaagcaacgattgctgactagccaaaaggttcggtgccgtgatgaaacgaaccagcactgcttaccccgcggcacccggcacggtcccccgaaggaatggatttaattaaattctctccttcggggatttttttccattaggtcgtccgttagcgttcaattgctctagtcaatttttaaaaatttttgttgaaatatttgtcgtgctctgaagggcggggnggggggggggcccataattgtttgagtaccccaaacggacacttgaaaaaatcgatttttttgttttcggggcagtctccccgagccgatgcgcccagatttatggggagaccgaatccttcgggaatagcttccctatagcctgtactttaattctgcgttggatttttgctccccataaatgtttgagtaccccaaacggactgttgaaaaaat

SEQ ID NO: 43084 - DNA, 964 bp, Heterodera glycines
  unsure (1)..(964): unsure at all n locations
ctaactggcggttgtaccgcaaaatctcngccgccgattcccccggggcggcacatttcgggcagcgagattccggcggtttttattttgtccagaactgactgactaggttttgaaacaatttttataagatttgatctccttgtgtaatagtgccagaatttattggggttttgatagttaaatagttcgagaacgagaacaaaaaaataagttttcttgagttgaaaatcgagtctcgcactcccctaatctttacagtagaccaattccccaatgtttacagtagaccaatttccctgttgttgcaacttggactaaactaaacaagcaaaaaaatgggcaaacgttttggaaattttgactaatttaacttatcattcattaaaatttcaaaaaaaatttcaggcggagcctacggcaccacgggaccccattataccatttttgttgaaattttaactccaaaatagcaaaatttgtctttttttgaaaaaccgctacaaattcctgcttttgcgccccggcggtgaaaattttgaaaaataaccgttgagaaaacaatttttttgcccattcgattgccttccctgaaatttttgaaatttttttctggatacaggccggaatgaagaagccctttgtaataattcagcttaaatattttttcatttaaataccgcgccactttttcgctgctccttccccacttttctgtcatttccacccatttatcccacaaattccttgaattattagttaactaaatgggcgccacaacaaacaaaaaaatccattaaacttaatgccgcttttttcggcaccagtggtgcgcccccccccctcgtcatttgataattgattcctaaacattttcattaaaagataaattgccacgcttttttagtgtgagacagacgacgggaagatgaaaatcactttagggcaaataattaatttcatt

SEQ ID NO: 43085 - DNA, 1498 bp, Heterodera glycines
cagtccgacgaatggcatccaggcgaagacttgatttccctggtcgaagagtcgacgagcgcccggtcgcgggtaacgtcggtcgatctcctcgtagaagccataactgaaaggggaaaaaattgaagattaaaatgaaaaaaacaaaactcacgctttgttgatgttggagcattcgtggttcccgcgcagcagcatgaagttcgatgggtacttgatctgaaattcaattttgggggtaaaatgttgtcaatccctgaaaaccacaccttgtagcagaagagaaggatgattgtctccatcgagtgtgctcctctgtcgacgtagtcgcccaagaacatgtactgctgctccggcggggggccatgcgttgtgaagatcctctgcagatccgagaattgtccgtggatgtctccgacgacgacgaccggcgggcggatcctgacgagcgtcggctgcatccggaagacgtccgtggccgccttgcagagttgtttgagttcctcgtcggtgatctgtgcaaaaaatgaaaatttgattaattgctttaaaacattccaaaatttgtggtccacctcatccgtgaagcgttgaagaggcggctgcgtgacttttctgatgatcgcatccacaaatctgcttgactggccatctccttgcacaagtactgatgccgttgtcgaaggacgacgagattgccccgccgctgccgccgcctttgcatcgaaacagtattcctcctttgccattgttgcaccagggcacgtccgttcgtgagattaaatgttgtagtcgaaggacaattcaataagtaattgtgggaaataaatattaaaattgtgagggcaaagagcgaaaatttcttacttttatacactttatttctcttttttgaactttttaaaggtaatcgttacttttaatggtaccccaaaaaataaaaaaatatataaacgcgggttttatgcgattctgcgttgatttaaaatgcttttgtaaatgtttccgaaattaactatttttttttttttgtttcttcttttattaaaacgatattgttttttgatgaatgatgcttacctaaaaatgaactgacaatttgactaaaattcctaacttccatctacacaggctgaggctgttacaccggaaaacaacccaaccttcgacagttattaaaagccaaacgctctcatcaataattaaaactaacaatttttcgagaatccgttcttttggctgtgtgttaatttgttcacttttccttaaaaaccgtttgttgttcctccgtttgtttatttgtttttaattaagaacaaagttcaaaaactaatctttcgctacaatgaattcggtcaattttccgcttcctcagcagaattatggtggacttaaacttccgctggtgagcgttcatttattgtttataccccctcccctcacatttttttatttccaaggtttgcgtgacgccattcggaaacatttccattctgat

SEQ ID NO: 43086 - DNA, 998 bp, Heterodera glycines
tcatataaatgccgaacaagaacttgagcacaatttttgcaaaatcgggcaccaaatggagcgggggcctgtgttaaaattagaaaaaaaacttcaaaaaaatttccaatttttcacatgctgtccggctcgacgaggccaaacagcgagaaaaacagcatttccaaggtttggctgggcgatgccaaacgcatcagttcggcactgtcctcgtccaccggttggtaggcgggctgaaaacaaattgaaattcaataccgtattcctaaaatatagcccgcccgcccctaaattagtgcccccccccaaaaaataaagaagccgcacttttgagggaggttgaaaaatagagcccacgggggttctatttagagaaataatctttagaaaatttttatttccaaattattttttcctgaaattttcttataaaacttgaacaatttctaaattaaaaaaattaacttttttttccggatggaaaatggatacgggttgggtctctgcattaatgttgaagggttatcctagtcaattttggatattacttgtgaaatggaagtgacgagtaggagagagccgcgaagctttagaaatggaatgacattatcaggagtctgggcgtagaatttttattttaattgtgactatgtgtgtaagtaacggacacaatgacatcaatgtcccccacctgtacaccatcagataatacacatggccgcccaatttgaccgcgtggaaggcccagcccaaccatctgccggccaatgagaagacgatccgcgcggagggacctgtgccgacggagtgaattcagatttagaattgtaaatttgtggcattgagtatctactgctcgagagagttgggtggatggagtaaagagaagcttttggtgttggctcctgtcttgggtttgacaagatgcccgcccacatacactgagttgtttatctctatccaactctctctcattgatttagggtctcacatttact

SEQ ID NO: 43087 - DNA, 1499 bp, Heterodera glycines
  unsure (1)..(1499): unsure at all n locations
aacgcggaaactctgagcacttccgtaanaatatcctataacaaaaataattactggtcaaaatattnatatataatccaatattattacgattntaattagccgatgcggcagtcgtccncaacgttttggcgcccatggcattcgtttgccgtttgatttttgctggtaattcgttacatttccttatggtttcttntaattttgaatctntagcctatttttgtgttctgccgattttctaggcaatttccatggcatcgtttggccaaaatttgaaagtaaaagaaagaagaagcccaggacaaactaaattaataaatttttgtaattttctatgcctttttaataatttgaatttaatgcattaaaaaaccaataaagatttatttattatttgttttttgtagaatattatgtcaaaagcctaaattcaaatttacatcaatccatgaaaatgataacctaatccgccggaaaaatatttaaattttgctgaaatttccagtgaaaaatggatttgaatttaagaaatttattgtatataattcagaatatttaaaaatggtaatagtgagaatcacaaaaaattcctaatcaccacaaaaatgagcttattaatacaatttaattttatcgagcaaaccaaaggcacattagtgctcttatatggtgccaaaaacaaacaaataaaaatgatcaaataaaaaatacaaaatgaataccgtaataaaaatgaataaaaataaatcaaatgttaaaaattcacaggtgattaaaatttagtgtatatgtggcacagaaaatttcctactcagaactcattgcttttactaaacccctgaattcctttgccttattaatttgcaccgctaccactggacggttattccagtttcttactatcctatgaaaaaaattattttgtgttttggccgtgtggcgctttactcgcaaaagtaaaggccgcctgcgcctttctgagaaaaagaaattttgttcagcctctatgctggtgaaccctttaataattttaaaagctgttgtcaaatcattaatttttcttctttcttctaatttatgtaaacccgcgattttaagtctttccacatattttttgtacacaaatccacattttcgaaaaacttttcttgtgaaaaatttttgtacccgttcaattttgtcaatgtctttttttaaatttgggttccaaacttcggtatcgtattctaattgaggtcgtacaaaagttttataagctgctgttagagtctttatttccctgcttttcaacactctcaaaatctgaaagcttctaagatatgcgtttcgtataattttgcttatgtgttctgaaaaattaagtttcgagtcaattataatgcccaagtcacgtacactttccgattctgaaatcttttttgagttaatataatattcttttttcttgttatttttccccaaataaagaacaaaacatttttcagttgaaatttcta

SEQ ID NO: 43088 - DNA, 1176 bp, Heterodera glycines
tgctcccttcactctttccccgcccccgggacatcgaatccgattttgataattttaaaatcgagaaattcagtgacaaataatcattacaaacacttttccattttttcgctcatcgtcaggcggaatcgcgaagcagagacatcgttcatcgaagaaggagaaattgcatttgacgatcaatcgtgctcaaattgttcacaaacgaagagattgaaaaagtccgcaaatttttgcatgaacaattccaatccgacaaaatcaggtgccccggggcaaaaaacaacaccgaaaatggcacctcttttcgatatgaaaatagttttttaaaaaccattcaattttagaggtattctgcagggctctggcggtcagttgcgcgtcaaattcaaaacattgcaaccgatggtgtaccaatcgaaagaacattgccgagttttatttgcacaactcgaggcggtcgaatcaaacacgtaaaaatgggggaagcgaatatttgaaaaatagcgggtgccggggtaaatttattgaaatttgacaaactttcaacgccccgccccttcacattttaggaaaacggaagtgtgaaaatgattgaaaagttaattttgttttttttcagtctccaacttttggccaatacgctcgacgacgcattgacaaaagccgaattggtaaagaaacgtcaaagcgaagatgtgttactgcacatgaccgttctgaacactaaatacttggtaagtggggggggggagagagtaagcagggagagagagacagataaaaggaagagagaaacgaggaggggaaagggattaattgtgagaaggaatgcgagtgagagagagtggtagagacaggaagagacatgggggagagacaaacagccaacaaagagagagacaaagggaaaagagacgcattggagaaaagcgaaaagaaaaggccgtccctttcttcagggctggcagggatggaagaaaacgacgctcaatgtcacccaattgttggaaaagtatggacaattaaactttgacccaatcaacgtcgaggaggttagtggaatggttaaaaaacgatcgaaatttgttcgacctgttccatttccaccggcaccgccggacaaaaaaaaaagaaagatttctggagaaatgttttttgcttttgctttttcat

SEQ ID NO: 43089 - DNA, 1298 bp, Heterodera glycines
  unsure (1)..(1298): unsure at all n locations
aaaaaactgaaaaattaggggtgcaaaataatttaaaaaaattttatttctcataatttaccggttgtttttgcaattcaaaatcaaaatttcntcaagttttcggcagtgaaactcacagttgacccactcgcgcacccattcagatttggatttaattttaggcaatcaaatttttttccgaagggatattcaaatcggaaaatatttgacgaaaaatggcaaaatatgcaaaaatctgaaaatatgcataaaaaatggcaaaatatgcatgcaatatgcagaaaaacccaaaatatgcaaataaaagtcccgatttttatacgcaaacacaaaaaagaaagtgttttcctactatttagagcatggagaagccaggaaaaaaaaagcatttgcatatttttggcagccctgatcgtcactttacgcctaatggtccccgccctttcagtacgatcatttcatcgtttttatttgttccggcgcttcgccaacggtcgacgattttagtgccttcgtcggggaccgacttcggcacgaattgctcgcatttgtggaaaatcctttggcccaatatatccgattttgccatgtgtttccaaaggaaattttaacagaaaattgcacaaaacaaagtgaagcggaacagacaaagcaagggaaaatatttaaataaagtaaataaatattttaagttgcgaaaagcattgggtggtcggaattttaccaaaaacgacaaatggcggctgttttaaaggcaaattgagggcgaaattgaagaaaaagaatatgtgcaataaaatattaaatgattttaaatatccagctttaatggaaattcattcggaatatgtggagggaagggaaaaactgagccaatggtaaaaaaggcaaaaaaaaaatgaaaaaaaaatgtttaaggttcgacgcgaatttttaatgcataaattaatcgaaggaaaagaaaaaatgaacgaatgaactgattgattaattgcctctcttttcaatgttttgagctaattattattattaattgtgtgtaattagtgagtaaattgcgcacaaaatgttcgtgcatttatttgttaaagcaataattcccatttaatttctactgttgatttgtgaagcattcattcattagccgagtatataaaaacacaatgtctatttgtaatttgggcatattccgcccctccccttctctcttctctccccctccccttatctcactccctcttcccttctctcttctctccccctccccttatctcactccctctccccttctctct

SEQ ID NO: 43090 - DNA, 1094 bp, Heterodera glycines
  unsure (1)..(1094): unsure at all n locations
ggcccattttncgggaacatggatttttcctgggcctggattttttgtccaggaaattcaggttttttcaaaatgttaaactctaaatttttgaactcctcctcccaattcaatgctccataacttggcaaagaaacaaccaataaaatgctcttctgttcattcaatagcccaaaggaaaaagcttaaaattctgaaaccagtatttttcaacaaaaaataatttttttttttttttgtaaatgcaaagctaattaaaaaaccctatagggttagagttatccaaatgtccatgaatgttcaatatatgattgcactctgggccaaattatgtaacattgaagagaaaaatgtgagaatattctattaaccacttgccctaaaaattcaatttttcatagggtatgcaagcaagcctcaatttttttttttcaaaaaattttccaacgcgaaagttcgtgcaggctctcatgcaggcttccgctgctgatccctcctccaacacctccggcgcccatttcctgcgcatcaattgcgttactccaatcggtgctcatcggttgaatggggctgaccggactgatcggagagctaatattttcaaaaaaaataaaaaatttgttttaaaattttgtaacaaaatgtaagcctttatacattttacatagtcccggattgtgtcataaaaataaaagttaagataaatttaaaaaaaactgcttttccgaacatttttggcacaaatttattgtttttttttgaaactcaacgtaattttttgaaattttacaggctaatagagagcacaagttacttgttatgaatataaataataaaaatttggttggattcgaacaaatgagaaaggacacttaaccaaaaaactgggccatcgcccatttggccctttccgacataggccaccacacttttggacatgtaatttaggcatttctttataaaaattcaataaatttatacttacgaaaattggtcatcatttgaaccgccggataatcttcttcatttgacgacatcattaacaccaaaaaaagaaagcagaaattaaactgtgtcaaatcctaaattttaaa

SEQ ID NO: 43091 - DNA, 794 bp, Heterodera glycines
  unsure (1)..(794): unsure at all n locations
tccgactgctatgacaagtaccacgacggagaaaagaagtgccatatgaaaatgttctctgagcggaccctcctcttcgtcctccgtcggcggaatggccgaaaagcgcggcttttcacttgggctgggcacagtgaaagtttgctggaaatgagttggtgccgaagtgtcggccaatgaatgatgccgagaaatggacggcgttggggtggcggagtcggaagggtggcgaacgatttggtggtccgtctcctccgccgggggcgtcattccggacccctttaaccgattggctaatgaatgacgaaccctaaatgcgttaatagcccattcaccccaatgtcgtcctcgtcgtccgggttgaaaaggtctccgctgccctcctccaactcgtgctggcccatctccgactctttctccgcaccattcgctgttttttgtgttgtgccgcaaaaaattgggagaagaagaaaaaagagaaagaaaattgggaggaaacggagggaatttgaggaggaaaaacggaccattggcggaaaataattccttaaaatgaattatattaactgaaaattatttgaaaatggaaatatttttaaaaattaaataaaattaaatgaaataaaatgaaacgaatattttaagttaaaatattgtgaaaagggaaaaattttgttttgttcgtaaataaacgcataaaatggtagcgtaaaaaatgagcaaaagaaagaaagtcattttttatgggaaggaaacgnaaaaggcacagaaatcaattgaaagtcgcggagatg

SEQ ID NO: 43092 - DNA, 681 bp, Heterodera glycines
  unsure (1)..(681): unsure at all n locations
ttccttttttatttccattcgcttaatttgcatttgttaatcgtaattccnctaaaattcaaatgttcttttcccaccggattggggttctttttccagatttcccattttttgccccctctttgtcctaatcatcgtatttcttcggcaaattcaaaataactgccaaacaaaatgtttagcagggaaaacttcatttgaaattgctggaacattgcattatgtccagtatcaacaattggaagattttagctctaatctttccaaaaaacaaatcggtcattcaaattggctgaattggaattttgattggaaggccacactttggtccttaattggcctccaatcatccatcacatttctaatgattgttggtgtaggcattatttgcctcatcatcttcattaaaatttcacccttctatagactttggaaattaatttcctggtctctgatgagaagagagcacaatcttgtcacagtattgttaatactgtacttggcggggggaggatccttcggatgtggtaatgcgaaatcacgtctcatcttccccaccacgaaaaaattcttcaaacatgagtcatcacgaactcacactcacacgaatgattcatcgaaaattttcaattcaaagtctaatcacgtgatttacgtgatggatgattgtataaaagggtg

SEQ ID NO: 43093 - DNA, 910 bp, Heterodera glycines
aagtaaaaattataaaaaatgaaattgaaatacaaaaaaatgactatgatattctcttggtgatgtgggaattggctgaggaattcggacttggcaagtgaatataatttaaaaataatataacaaataaattggggtaaacccaactcatccatagctcatccatgcataaaaatgccatgaccaaaaccgctcaacgtaaaaattctacgatcaagacctcataaaaaatgccaagacaaaaatgccacgacggcgacccgcgtcgtgttgtggatgagttgggcgtgacacaactaaattaattattttatatatgtattaaaaataaattttaaataatcgacaaaaaaaacatttgcacagattttgcaaatatttgtgaagctggaaaaagttataaaaaagaatataacaatgccaatttaattcagaagggattatataatttaaaaagttattccataatgactgcaaagttttatttgggttcagttataaatcaatttccaattagcacatatgaacaacagttaggcaagggttttatggcttacaaagaattatatgacaaaatggacaaaaaaaaagatgatgccaaattcaacaaaaagtatgctaaagtgccgaaaaacaatgctgaagagatgaagccgttgccggacccatgtgagcaggcaaagctcaaatggaagaagaattgaagaagttgaaagacgaacattgaaattgagaggagctttttcggtgctatgtttttataaaaaaaagcatcgaaaaaggcgtaataaaaaaacgatcaaaagaaaatttttaacaaaaaatgacccataactttgctcaaaagcaaccaaattttaaattaataatttcattcgatagataatttgtttcctaatagcctacaaaa

SEQ ID NO: 43094 - DNA, 1146 bp, Heterodera glycines
  unsure (1)..(1146): unsure at all n locations
cggctacgatgtctaaatttgactctcacttttctgttagccaaaaaaattactatctatttttcaactacttttaatatgacaaatcgaatatggaatatgccaacgccccatatatccacatgattagacttagctcgattttttcggctacgatgtctaaatttgactctcaattttctgtttgcctcaaaaaatgactatcaatttttcaactatttttatacgataaatctaaaatggaatatgccaacgacccatatatccacatgattagacttagctcgattttttcggctacgatgtctaaatttgactctcaattttctgttagccaaaaaaattactatctatttttcaactatttttaatatgacaaatctaaaatggaatatgccaacgacccatatatccacatgattagacttagctcgattttttcggctacgatgtctaaatttggctctcaattttctgttagccaaaaaaattactatctatttttcaactatttttaatatgacaaatcgaatatggaatatgccaacgccccatatatccacatgattagacttagctcgattttttcggctacgatgtctaaatttgactctcaattttctgttagccaaaaaaattactatctatttttcaactatttttatacgataatacgataaatctaaaatggaatatgcaaacgacccatatatccacatgattagacttagctcgattttttcggctacgatgtctaaatttgactctcaattttctgtttgcctcaaaaaatgactatcaatttttcaactatttttatacgataaatctaaaatggaatatgccaacgacccatatatccacatgattagacttagctcgattttttcggctacgatgtctaaatttgactctcaattttctgttagccaaaaaaattactatctatttttcaactatttttaatatgacaaatctaaaatggaatatgccaacgacccatatatccacatgattagacttagctcgattttttcggctacgatgtctaaatttgactctncattnntctgtagccaaaaaaattactatctattttttcactatttttaatatgacaaatcgaatatggaatatgccaacgcc

SEQ ID NO: 43095 - DNA, 1558 bp, Heterodera glycines
tcaaatccaaccatatttttttctttttatttcgtcctatgagatggcccaaaccaacaataatcatcttaaacatgcttttgctctttttttggtcaccgcttttgtcattttaatcgccgtcgttttggcggaaaaaagtgtcaccaattcggacagtgccactgccgcaaaggtaagtggaaaagagaaaatgtgccttatgtggagcctataaaagtttaaaacacggttaaacagcctaaatttgcatattattgaacaaaaaaaaaagttcacatcacttttcaataagttcactttttgtggtgcgctttttaaaaacttttgatgaacagagggggggggggggggtgccgataggcgccgccggagaaaaacttgaaaattgctgatattttaattgattttgtccaaataatgatcaaaattttgcgattttgagtaaattatgagaaaattaaagatattgggtccaaatgtaaaatttgagaagtttatgcaatttgtcattagtagagaccgactaaaaggcaccaaaaaccgtgaacaaggcactataataggcaccaaaaaataattgaaaaacgcacaaaaatcccgaaaaaggcaagctttttaaaaatttattaaggatttttagggaaaaaaacacgaaatttaatcgaaaaaattaattttgatcatttaaatgattaatatcggaactaatgcccagaaaaaaagatatatgactaaaaagtcagtctttatgaattttctggttatgtaaaactattttttttgttgttgtaaatttgccaaaatcaaataaaaaaaaggtttttcaagtttaaatcctttcaaaaaaacaatttaaacactttccgtaaacttttttcaattgtttggcatcagaaggcctataaaaggttgtttttggtttgtttttttgctctaggacatatgatacccaattctgaaaaatgaacaattcacccgatacgtaaaaacagggtccgttctttccaatttcgtggataaatatttaattgttgaggggatattgatggattttctttcctttattgaattgtttcaattaaaaaacaacaaaaaaatcattaaggatattcaacggatggaaaaattacagaaagcacaggaatatgtggacaaattgaacgaagcgcaaaattattggactgttcgtccgattttatctatcaccgcaaaattatttttaaaattatttatttatttaaggccgtcgttcacaaaaattttgtaattatggacagaaagccatttaaaaaaatggcgaatgggccaattgaaacaccaaaacagcagaaaaaaacgcagcagagaaaggctaatgtaaattatattttagcaattaaatttaaaaaatagaaaaatgacaaattaaaaatttttaattccgaagttttggcgttagaattggggtctgggattattgtacgatccttgcccattataaggtttattttttttgcaaatgttctgttacagaagtcggcatcggcacttccgtctaaatttgatgcgcgaaaac

SEQ ID NO: 43096 - DNA, 1218 bp, Heterodera glycines
  unsure (1)..(1218): unsure at all n locations
ttaaaaattctctgtgaaattaatggcgattgcgcacgccctccctctcacgctcgagcgcttttgtaacgtataaaatttctcaaaataagagatagtcattttctnggatataagataaattaaaaattctctgtgaaataaatggcgattgcgcaccgcacttcctatcatgctcgagagcatttgtaacgtataaaatttctcaaaataagagatagtcatttttcttggatataagataaatttaaaaattctctgagaaattaaatggcgattgcgcaccgccctccctctcacgctcgagcgcttttgtaacgtataaaatttctcaaaataagagatagtcatttttcttggatataagataaatttaaaaattctctgtgaaattaaatggcgattgcgcaccgcacttcctatcatgctcgagagcatttgtaacgtataaaatttctcaaaataagagatagtcatttttcttggatataagataaatttaaaaattctctgtgaaattaaatggcgattgcgcaccgccctccctctcacgctcgagcgcttttgtaacgtataaaatttctcaaaataagagatagtcatttttcttggatataagataaatttaaaaattctctgagaaattaaatggcgattgcgcaccgcactccctatcatgctcgagagcttttgtaacgtataaaatttctcaaaagaagagatagtcatttttcttggatataagataaatttaaaaattctctgagaaattaaatggcgattgcgcaccgccctccctctcacgctcgagcgcttttgtaacgtataaaatttctcaaaataagagatagtcatttttcttggatataagataaatttaaaaattctctgtgaaattaaatggcgattgcgcaccgcacttcctatcatgctcgagagcttttataacgtataaaatttctcaaaataagagatagtcatttttcttggatataagataaatttaaaaattctctgagaaattaaatggcgattgcgcaccgccctccctctcacgctcgagcgcttttgtaacgtataaaatttctcaaaataagagatagtcatttttcttggatataagataaatttaaaaattctctgtgaaataaatggcgattgcgcaccgcacttcctatcatgctcgagagcatttgtaacgtataaaatttctcaaaa

SEQ ID NO: 43097 - DNA, 196 bp, Heterodera glycines
cccgcggcggacgggcgggaccatccccccgcggcggacgcggtgcatcaccgcgcggcgcacgcggaccatctccgcgcggtccccgcggaccatccccacgcggcggcctcgagccctccgggcggggggtgcgcggaccttcgctgcgcggtccgcggccctcaccacggggtgcagcgccaaactccccgga

SEQ ID NO: 43098 - DNA, 824 bp, Heterodera glycines
agatgggtggtccgtgtgtagcagagggcgaggcgcttgggcagatgaagcgcgagctcaccgaccgacggatcatcgagttcgttgcgggaggccccaagaactacggcatccgccacactgcgggggaaggctccgaagagcgcgccaacctcaagatccgcagattccgcctgtccaacactgcgcaacaactgctcacctttgaggcgatgaaagacctgacgctagccacgtacaacattgacggaccaatgtgagttttcaacatatcattttgattatagatcacatattaaattgaattttagcgatgatgccttggacaatgacgacctttacgtgtacggaggcggcgaacatcgtgccataagcgtcaatttcccgcaaattgatcgcaatgtgtacgccgatctctacacgcatgaggcccacaaagactacaggcccttctatgccaaggggcgcgttcggcctgggatgcagacgcgcccctttggctatgtggaggatgatggacagccgaacggaggacaacggacgccggacgcatcgacgatagagaaattttttggaacaagatcccacacagcccggacactctgggtggttctgatgttgtgatgttattttatttatttattttttattttcatttaatttgatatttattgtttatgtttaaattgtacaaaatattgtgaccaataaatcatttacgaaaatagtcaggtacaatattagataaattggtaaatgactggtgcaaaatatcaagagactttgcctcagtgacaatgaccttcctcgaaatataaattagg

SEQ ID NO: 43099 - DNA, 1117 bp, Heterodera glycines
ggtaatttttttttgtccggcctatcccagaaaaaatcactatttcttttttgggaatattttacgtgtaaaagggtgggcatttaagggactcgctgtgcttgcccacgcatttcaaatagcgggtatttttatttctccggcttaatccagaaaaaatcactatctctttttttggaatattttacgtgtcaaagggtgtgcatttaagcgactcgctgtgcttgcccactgcatttcaaatagctggtaatttttatttctccggcctaatccagaaaaaatcactatctctttttttggaatattttacgtgtcaaagggtgtgcatttaagcgactcgctgtgcttgcccactgcatttcaaatagctggtaatttttatttgtccggcctaatccagaaaaaatcactatctctttttttggaatattttacgtgtcaaagggtgtgcatttaagcgactcgctgtgcttgcccactgcatttcaaatagctggtaatttttatttctccggcctaatccagaaaaaatcactatctctttttttttggaatattttacgtgtcaaagggtgtgcatttaagcgactcgctgtgcttgcccactgcatttcaaataggtggtaatttttatttctccggcctaatccagaaaaaatcactatctctttttttggaatattttacgtgtcaaagggtgtgcatttaagcgactcgctgtgcttgcccactgcatttcaaatagctggtaatttttatttctccggcctaatccagaaaaaatcactatctctttttttggaatattttacgtgtcaaagggtgtgcatttaagcgactcgctgtgcttgcccactgcatttcaaatagctggtaatttttatttctccggtctaatccagaaaaaatcactatctctttttttggaatattttacgtgtcaaagggtgtgcatttaagcgactcgctgtgcttgcccactgcatttcatatagctggtaatttttatttctccggtctaatccagaaaaatcactatctctttttttggatattttacgtgtcaaagggtgtgcatttaagcgactcgctgtgcttgcccactgcatttcaa

SEQ ID NO: 43100 - DNA, 1055 bp, Heterodera glycines
tttaatctggtcgcgtattggagcatcccgtgaggggtcttttgcactctgtcccccccccccctcctccctttcccttttctctgctcatttttatttacgcccctccggcgaacaaaacattggtgaaagagatttccttccgtgcactgtccccttccccccccccccccgacaaatgcccataaaaaattgggcactcttcgaattggccgccaattgtcccgccaaaattggggtaacagaatttgaaccattccaagagaattttcagttttttttattttattcttttcttgccaaaaatggtcgacgttccggctgattttgctgttctgctaaactccgcgccgccaattagccgaattgagtcaaacaaaatgcattggctgcgaaaacggcaacagacaaatgcgacggcattgcaacgcggcatcgatcagattggccaactcgcgacggaggtgcgaaaaattggaacaaaattagggacaaagaaagaatttaatacttaagtgagtgggaaaaataaattgagttaaaaaattataaaataaaaaatatttttccattttaataaatctcttaaaatatgaattttatttgccgaatccaaaaattaattagtgccatttaatgatcatttttctttcttcctaagagtcgaggtttgaagcgtccggtgaccagttttgcgcgttttgcggattctcccgacgaacaggcgctgtatttgctgtgggaaccgctcacttcggaccaaccgacggcaaacggagggccgtcctcacggatttatggatatttaaaagtgaaattaacaaataaagaactgtgcaattaaccataataattgtttaatgctgctgaattgatggcttatttattaaaaaaacaattttctcattgagcaaaggtcgtccgggaccgacgattgtatttggtggacggagaagggcgacagttcgtcacgacggtgagttaaattgtttcattttaaatttattttaattattttaaatcaatttttaaaatatttttgggcctctctcctt

SEQ ID NO: 43101 - DNA, 975 bp, Heterodera glycines
  unsure (1)..(975): unsure at all n locations
tctttccatttcagccccatgataaaatattttcttgcttgacatgcgtcccaatcggtgctcgtcgccgctctccgagttcagtcggctcatccgccgctgtccgctgttcggctcactaactcccccgtaaaaaagtgccgtgacggcggtaccaagcgcaacagcaaccagaccgagattctgaacgagtggagattttggatgttgaaaagtccgacaagaaatcaattttgcttgtgggtcgaacccgaaaattggccaaatcggacggtttgattttgctggtgtccttgtcttgggccaaaaacagaaagagacaggcaaacacgaacagattggctgccacggtgaaaccgtaccgataggaagtcattgactgaaaagggatggctaaaatgacattgctctcattaattgcttttccgctgaccattcgcgtatgctcggagttggacagctcgggaatcattgccaagtgcgaaatttggacagcggcccagccaaattggaaaagcataatgggcggaatgaaccaaagaaggcgcagaaaaggcagccaatggcagagcaaacaaccggagaaaatcagcgggaaggaaagagtgacacaaacggtgccgaaaacgcaaaggttgaaataggaaatggaaaaatgccaaaccaacctatgatatgccacgactttcgtcgcccaaaacggcgtaaaatgccgggcagaagggacaaatcgctgagcattccaaccaacggagtggacacggcgtcagtcacctggcggaaaatggcgaaatgtttttgtccgtctacatttgcagtttttccatggaatattcattgattgtcagtccgtgtttgcctgtccaatgaacatgagcagaccagcttgccaacttagcagcaggacgaccttctcaagaaaatcagcagataggtgaaccacatcgatgcgcacaaatcgntgtaaaaatgacc

SEQ ID NO: 43102 - DNA, 367 bp, Heterodera glycines
tgaccgttcaacagacaatgatacgattgtcaatttatcgttttcgacatttcttctgtttgtttatgtctgcaacatgtataaatttcgtctgtttgcacccgtggttcagtggtataaacgtttggttgtagcatgcatcgcgctccattaccaagggggacaacaccgttggcaacactgcttttcaattgaaagcacacacgtgcgctcatttgtaaaattgataagaaatgctgccaacgcagttcactctccaggaaaaaaaaaatttttttttttgatttcgataaaattttgtaaataaaatacttggcaaataaggacagcgaaaagtttgttcctacccaccacccccaccgctgac

SEQ ID NO: 43103 - DNA, 847 bp, Heterodera glycines
  unsure (1)..(847): unsure at all n locations
aattagacaatttacgactgctttancctcatttttttccattgcaagaaaaataaaataatattttctaaataactctgtttccggactcaccgcgaggaggtagcagaattttgagcccatactaaccacaacacaatagacaaatcacaatacattttaatatgtacagtacaccctttccaatttttatttaaaacgcctttcccaagggccaacgggaacagaaattcatcaagggcattcaaaaagttaaaggcgactttactgtctaattgcgtacagcaacaaaatgccgaggtcatcttttctgtttcttagagtccgtaattagagttaatttttaaaatattattttatttttcttgcaatggaattaactctagctaaagcagtcgtaaatttgtctaatttgagataaatttttaaatattttttttgttttaataaaatccccaaatgtcggatccccaaatgtcgtgtgcccaaatgtcgggttccccaaatgtcgggtccccaaatgtcgggatcaccatgaaatgatttagaatgatattatgacaaaagtcagatttatttaatgataaatttctaagatttatataaatcatttaattttgcggcgttttttaaatggcaataaacatgcatcggtcgacaaattcccaattttttcgcaatttttctttcaattttattccaaattttaggcgaatatttccttcttttcttaattccttcttttatcgcatcaaatttatgaacaatttcgcattttttctgaccatcaaattgaacattctgatcattgtgaattgcatcggccaaatttaattcattttgatca

SEQ ID NO: 43104 - DNA, 984 bp, Heterodera glycines
ggggcagttccccggaacagagcccccaaatttatggggagccgaatccttcgggaaaaacttccccttagtttgttctttaattctgcggttggatttttgttccccataaatgtttgagtcccccaaacggccacttaaaaaaatcgattttttgtttttgggggcaatccccccgacccgatgcgcccagatttatggggagccggatcctttcgggaatagcttccctatagtctgtactttaattctgcgttggattaaaatttttcataaatgtttgagtaccccaaacggacacttgaaaaaatcgattttttttgttttcggggcagtccccccgaaccgatgcgcccagatttatggggagaccgaatccttcgggaatagcttccctatagcctgtactttaattctgcgttggatttttgctccccataattgtttgagtaccccaaacggacacttgaaaaaatcgatttttttgttttcggggcagtccccccgaaccgatgcgcccagatttatggggaggccgaatccttcgggaatagcttccctatagcctgtactttaattctgcgttggatttttgctccccataattgtttgagtaccccaaacggactcacttgaaaaaatcgatttttttgttttcggggcagtccccccgaaccgatgcgcccagatttatggggagaccgaatccttcgggaatagcttccctatagtctgtactttaattctgcgttggatttttgctccccataaatgtttgagtaccccaaacggacacttgaaaaaatcgattttttgttttcggggcattccccccgaaccgatgcgcccagatttatggggagaccgaatccctcgggaatagcttccctatagcctgtactttaattctgcgttggatttttgctcccccataaatgtttgagtaccccaaacgcacacttgaaaaaaaggatttttttgttt

SEQ ID NO: 43105 - DNA, 1239 bp, Heterodera glycines
ttttcttttttccatctttttagagttgcatttccaattttcaaaatgccagcaatttcttgatcagtttaagtgggatttccattcttcatttcataataatcatttaatttgctcattttttgttcatcggtgaatcgaattggacctacgaatataataaaatttaattgttaaattactttgaaaaattaaaattaaaatttatcgatttcaatgccaaattcttttttccattttcggaatgtttttatgcgaatgcctttcacaaaatgtttctgttttccatttttggacattcttttaaactcatcaattcgttcaacaaattcttgttttttcatttgataataatgttttagtccattgtttttcggaaataaatccatcatatttcgccattttgtgggtttagagttggttatttttggcaaaaaaactcattgtaaaaaaattaaaaataaacgaaaagtttttagcatttaaaaaataatcaagaaaaaacttcaaaaattttgacttatttaatgggtcgtaattacgaaatatcatgtgaaattatgatgaaattcatggctttcaattctttaatcttatttactaatattttataaattctacttacatatgttcagatacatttattgatcgcatttttgccaatgcttctctatattcattaaaatttaaataaaaattattttctgatgaattaacttagtttttaatataaatatatttaataaaatattaaaaaataattaattaattatttataactttttttagtgatgctttttctcctttttgtatttgtgtttttaattataaacaattcaactgacaaaatattgtcagttaatctgtgtaaaaaattgggccaaatttttctgaaatatttggcgaagaatgggcaaatccacaaatggaagaaaatcaaaatgaattaattaatcagaccgatcagttggattttcagaaaaaatgtcaaattattcacaaatttcatgcaataaaagaaagaattaacaaaaaaaaaaaatattcggaaaaaaattggaataaaatcgaacaaaaaatagcagaaaaattgagaatttgtcgaatgaaaatttataaatggaaaagagaatttggactaaatttaagaaataataaaaattattatcaaatgaaaaaacaagaatttgttgaacgaattgatgagtttaaaagaatgtccaaaaatggaaaaaagaa

SEQ ID NO: 43106 - DNA, 970 bp, Heterodera glycines
cgaaacaacaaagatgctgttttgaacgaataaagggcataggttattttgaagaagtgtcaaagaacatgcagcaataagcctgcaaaatctaataagtggaaaatacctgagtatagaatttattttcagaaagtgtcaacagacttttggaaaaatatatttgcaatttatcaacaattttgagaagtgagttagaaatgataaacttcacgattcaaaccagttttcggtgctctaattaaccgcgataaaaacatccgaatcaattaaatagcttctgagataataaggtttatcataaaatttcatttaaaaataaaccctcaattattggtatgaacgatactttccaaacatgcacgcgttttgcgctcgagctatttatcatcgggcttgtcaatccaaagcgaaacaacaaagatgctgttttgaacgaataaagggcataggttattttgaagaagtgtcaaagaacatgcagcaataagcctgcaaaatctaataagtggaaaatacatgagtatagaatttattttcagaaagtgtcaacagacttttggaaaatatatttgcaatttatcaacaattttgagaagtgagttagaaatgataaacttcacgattcaaatcaattttcgttgctctaattaaccgcgataaaaacattcgaatcaattaaataacttctgagataataaggtttatcataaaatttcaattaaaaataaaccctcaattattggtatgaacgatactttccaaacatgcacacgttttgcgctcgagctatttatcatcgggcttgtcaatccaaagcgaaacaacaaagatgctgttttgaacgaataaagggcataggttattttgaagaagtgtcaaagaacatgcagcaataagcctgcaaatctaataagtggaaaatacatgagtatagaatttattttcagaaagtgtcaacagacttttg

SEQ ID NO: 43107 - DNA, 971 bp, Heterodera glycines
  unsure (1)..(971): unsure at all n locations
ctagagacatatgcgctacccataaaaaagatgaatcatttttgaaaaattantatagttcgactaaatttgcaaatcgatttatggtgtacaggatgtttgtcgaaacataactcgtcaggcctttaagatagacctgccattgctattcctgcaaatattgagtctagtcagcccaatcgattgctattcgaatggtttggggtcgttggcccaaacaaaagtggtgctacttcttgcaaagaagacttagcctactgtaaacagcaagccatccaaatgcttcaatgtaaaaaaaaattacatttggatgcaacctttatttttcctcgcctctcttttcgaaaagaaaagctattagcaagcgtgtttggaccaattctaaaacaaatcggggtaattaatttaatctgactttataagataaatgggaatttaagcgaaggattcatgcaaaataataatctatagaaattctcaaaaaagtagttcctcgcagattcggggaccgtttctataaagctagagacatatgcgctaaccataaaaaagatgaatcattttttgaaaaatttatatagttcgactaaatttgaaaatcgatttatggtgtacaggatgtttgtcgaaacataactcgtcaggcctttaagatagacctgccattgctattcctgcaaatatggagtctagtcagcccaatcgattgctattcgaatggtttggggtcgttggcccaaacaaaagttgtgatgcttcttgcaaagaagacttagccaactgtaaacagcaagccatccaaatgcttcaatgtaaaaaaaaattacatttggatgcaacctttatttttcctcgcctctcttttcgaaaagaaaagctattagcaaacgtgtttggaccaattctaaaacaaatcggggtaattaatttaatctgactttataagataaatgggaatttaagcgaaggat

SEQ ID NO: 43108 - DNA, 1116 bp, Heterodera glycines
  unsure (1)..(1116): unsure at all n locations
taaaaaaagtattagaaatattaaatttaattattatttaaaacttattgctgaaataagaattagtcaaatgaatcaaacttgatattgagaaatagctctacttatccactgctatattatgtatttaaaaaaatctagcaaaaatntaaaaaaaagttgtaacgaaaaaaagttcgtcataatttatactcaatattattgcccctaacattattgaaactcaataaaaaattttgaaatttaattaattgatttatagataaatctttgaactatctaataattggtatggctttaattgaagtttgatcaatgatcattttttttgtatttatataatcttagatttttggtgaccataaaaatatgaaacattgatcgttacttttttcagaaacaaccaaatttaaatttcattatagaattctatttattattgataataattagggctccaatttttaggcaaaaggctatttttttcctgagctccccgtggcctaaaatgcacgaaaaacatgtttttttgggctgttgttaagctacttttcgagttattagtgcctattttctaggcttttatttttagcgcctaaaaaattttgaaagagcctacttttgcctattttggcgttttgccgaaaatttgttagcaaaaatgcaataaaaacaaaaaaaaatacacccctaagaatcgatttttttgaattttaaaaatacacccctaagcagagattcaaaaatttctgaaaataaatccccgaagaaattaaaattttctcaaaaatcgtctttaaaaatttttttaagacaattttttgaatttaaaaaataatgtaactcaatactgaactgacttatttttttaccatttgaataaatttttttcattttacacccctaaatttgagactttttagagcctattttgggggttttttagagcctaaagcctacctattttagcggtttttagtgcctataaattggagccctaataataataataaatttaaacatttctttcattgatacttttttaggttcgcctcattgactttttttggttaggactcaacatggacgtatgacactttctctctctctctctct

SEQ ID NO: 43109 - DNA, 700 bp, Heterodera glycines
atttcggccccaccgattgcgcccgtgccctcccaatgccgggcaggtcggcgatggacagagtgaacggtgccgtcgaagtgttggcattttccgactcaatttcctcctcgtcgcccaagcggattttgttgaccactgacaacgcctcggacaattccttgtccgcatcgccatcactgtcctcatctgttggggtctaaaaatgaaaccaaaaaagggtgaaatgaatgaaaaattgcaatttgagtcgtttacaaattcggaaaggtcccgcttttttgggtataactcctttcataatggtatgaattgaacaatttggtatcgttcatttgccctgtgaattctcaatttataaagcaagagatggaaaaaattcattaaatttcaaaaaagttatggcaaaaaaacaacaattcgtaagactttttttttctttgaaaattttttgccattttttttgaaacttcagttaatgaaatttttcgaaatattttgcagacaaatagaatacccccgtttgagaaccgaatggatttttctcttcagagtttggaggattacagaaaaattaagggctagcaaaagacaccataaataaaaaaggaatttttttcgaaaaaatttctaaattttattgtaaattgcactattttccagggacggtcccaggggggggggggggtacgcggggtac

SEQ ID NO: 43110 - DNA, 1263 bp, Heterodera glycines
  unsure (1)..(1263): unsure at all n locations
aaaaattaaaaatttggttgcctttgagctaagttataaataatttttcatcaaatcatattgatggttttttatagagtagagcgggaccgggaccaaaaccacggacaactgagtaccgaagtcctggttttgaccgggaccgagaccattcccgggtttcccagccaaaaattccctgttttcaacccgaaaaggtcccggttttgcccaaaattcnccggtcccgctcaactctgagttttttaaataacgacttccgccncctatcaaatttgtcagatataaaaaaagtaagaaatgcaaaaaatttttcctatttttcgagtttctaaccagtttcataattgttaaagcaacaatgcaagtaactgctcataaaacaattggccaaattacttttttcaagctcttttatcgagttcaaattttgcctagaaatgatttcaaattcgtcgctgataaaattcggttggctgcagtctcgtactgaatagcagcgactcggcctggcgtgccaattcggcgtaacgaagtgtcgccgccatgttgccgtggttggtgtgcaaatggttcatcaacgtattggtgtaatgttcagacaaatgttgcagtgcgaggcgaccagcatcggacagaccgctaattgctgaacaatttagaaaattgacaaaaattattttactaattattattagggttataagttgtatgcactaaaaaatgccaaattatgcgcataaaatatgcactaaaaatccctcaaatatgcactaaaactccgaaaaatatccaaatatgcactaaaatatgccctaaaaattacccaaaatggcttataaccgtaaaaaatgccaaaaatgcaatttcgaatttgtaaaatttttgtcaaaggtatgttaaaacaaattacatttttctactattgttttcaaaagttcttataaaaaattcaaaattctcgattttcaagggtatgtttttgaaattcccaaaaaagtcgatccgtaggggtgtatttttcgtttttattgcatttttcttatgaaaatttgccaaaaatgaccgaaatatgctctaaaaaacgcaaaatgccaaatctgcatttattctcgaaaacccccaaaatatgcttttatatgcaataaaaaccttcaccaaatcaaaaaattttaacgcagaaatgttatttttgagcccctttcttcatagcatatgcgcagaaaaaatatgcaaaatcatacaatttataaccctatttat

SEQ ID NO: 43111 - DNA, 895 bp, Heterodera glycines
ttcagcttcatctctgccgattgttggctttcggtgttcgatttgcttgcgcctttaaaacttggcctcggaattgcgctgatcagccaccgttttgacttttacgtggacgaacacttcaaaacgcgcaaatgggcattggaaacttttgacattcgaagcaaaattggagaaaatggcacaaaggaaatggaaattgtcaattacaatggaaaatcattaccaacactccgcatcaaacaatgtgccaaaaatattgaaatgctttttttcacggatctgcggaagaattggcctctgaaaatggaagccttcaaagcggtgctttcatttacatatcatttcgtattccttaatcaatttttccatgttttaggcatttgccaatgcttcgtctcccgccaatttcatcgtttccacttggttttattatcttcctgactccgttgtgctcttcgatctgacaaatgaattgactcgggaactattggcattgaaaggaactgacgacagctggcgtcttctgttggtccgttatccaattgcgcgagacgaaagcaaatggacaaaatgggaaaaggaagcgattggctgagaatttcatgatgatcagtggaatcaaattaacatgtatatttacagtgaagacgaaatcgggaacgggtcagtgaatgattattcaaaaaggtaatagtgtactttgtactagagaccggacaactggggtcggagggatcccgagtcgggatcccgactgaatcccgatcccgagcaatcccgaacattttggaaaacgatcgggacggatcccgggtcgggatcccgaccgaatcccgatcccgatcaatgccgaagattttttttcgggatcccgcgggattatcgggatttgctc

SEQ ID NO: 43112 - DNA, 903 bp, Heterodera glycines
cgcacccgttttttattttttgggagaattcggtcgcttcgcggcctcaggacgggcgcttcgcgcccgttttttaattttttgggtggacattcgcccgcttcgcggcctcatgacgggcgcttcgcgcccgttttttaattttttgggggaattcggccgcttcgcggcctcaggacgggcgcttcgcgcccgttttttaattttttgggggaattcggccgcttcgcggcctcaggacgggcgcttcgcgcccgttttttaattttttgcgggacattcggccgcttcgcggcctcgggacgggcgcttcgcgcccgttttttaattttgtggggaacattcggccgcttcgcggcctcaggacgggcgcttcgcgcccgttttttaataaattaaaaaataataaacacggcctgggtccgaacatgccgccccacccctcagaatccccaatcacacagggattctgagctcttaaccatgtctaaagtaaaatatgtttgcatattcgtgatcagcggcccaattaacccctaaaatcatatttttggaagatttttggtgaaaaaaattttccactcaaaaatcatggtcacacccctgtggtcccaaattccaaaatgacttttatttctataacttttttcaaaaaagtgataaaaatgccaaataaaatttataaaatagagcaaaaaattgcggattttttgagtatatcatttttataaaatactttttcagaatggagttaggaatttttttctgaaaaatcgaatttttccagaaattctggaataacttatttatattgaaagataggaattgtaaataaatcccataaaattctcctaatttttttttaaaggcaaactttattccactaaattgaccaaaagcgaa

SEQ ID NO: 43113 - DNA, 1094 bp, Heterodera glycines
aatttttgggttcctaaaaggatttccattatggacactttctattaacaatgccttcacgaccgacgaatctcaccttatccgaagaccaaaagcccggtcaaagacttcagtgtcggcactttttttgtcctctggcatttccgccaagatcattgtgcttgccttttttctaactaaaaactaaataatttaacaaataataataataaatgaataaaaggaaataacgaaattagcaactttttttattttattattgagttatgcagaatctaaatttaaatagtcgtagaaatgactttatacgcattgtcatgggaagaaaatgataaagagccaaaaattaaagaaaacggcagctttcgtctgactaaaatgcctatggcaaattctaaagcaagcaaagtaaagaacataggcagagaatgaagcagatacgcacccgtacaattgacgaaagtgtcaattgttctcggaaatttaaaatgaatggaggtaatgtacaaataaaagagaatgaacacataagacgaaaaggtgataaaataaatccactagaacaagtcatcgtttgagcaatgcgttctaacgctttgatgaagacactgacgaagctgcgcttattggggtggcaccagcaaaatcaccagggattggcagaacagaaatacggtagaagcgcgtgtccaggggaaggttataactgaaaagagaaacaaggcgaagaatcaaagcgacgcctacgcttaaattaccgatttgccgcttttctaatctgacacatttcaatgctctccacaagcacaaacatccagggacggggcattgatgccggagaaaatgcgatggatgaagcatcagtcgactgaatggcgggacgcggtggacgacgaattcccaacttctcgaaactgctgtctttgacaatgtatggcgaattgggaaaggccgagctaaataatgaaagggatttttgaaaagaaatttggattcattcaggaaaaatacttccgtgcagcatatgcattcaattgggaattccaaatgatcaaagcgccacagtcttcatacagctaaaaaaacaattataa

SEQ ID NO: 43114 - DNA, 1371 bp, Heterodera glycines
cagcaagtgaattttgtttacctgctatatgtactattctcaccttataattttgaagctcaataagccacctagccaacttttgatgtgtttctgccttttttaatagaaaagctaatggcttgtgatctgtatgtaattcgatatttgacataaaaatgaacggtttgaattgccgaagcgaaaaaattattgctcctaattcagtctgaacaggaggccaatttctctcagttttagaaagcgttctgctacaataagcaattgcattatagactcggttttcagaatcccattgcattaatgcgcctccctgacccacattagaagcatcacaaaatatgtgaaatggctttgaatagtccggaaatatcagaacaggtttttcagacagaattttcttaattttttcaaaagctttttcttgctcatcagtccaattgaattgcttctctttcctagttaatctcgttaatggttccacaatagttgaaaaattcggaatatgctttctgaaaaagcttgccattcccactacttgccttatttcctttacattggttggattttgcagattaagaattgattcaactttgcttatgcttgaagtatatccatttttgtttacaatataccccagaaaattcatacttgccgaagccaaaatacatttttgtggtttaagttttaaattaaaccttctgaatctttcaaaaacacttttaagagagtctaagtgttcatcaaagtcatcagattttgtgaaaaccaaaatgtcatccacataagcaataacattttcaagacctgttaacacatgtgccacaattgattggactcataaaatacttttggactcataaaagtcgattggactcataaactgcattagagcctaatttttccaaatgtcaacagaaatgccaacaaaaagccaatttaaaaaaatttccattttttttgcgccgctccctttgaaatgcaccgccaaaaatcagtccaccacaaattcacaagacattttttgtgcatgtgttatgttacaacaacaaatgatggacactctctctgcttttcttctgttgttcggcgatgttttttggtcgccgttctttacacttttaaaaataaatgtttgaaaatgtaatttttatttatttttccccatattttttgaaggtcgtcgtcatccatcaaaaaatcatattctctgatcagtcgctcattgaaaacacctctctccacatcttctcagatcatagtaattgctgctgctgcttgtcccgtgcattttgccgaaatttgcgcaatttttttttcgcatgtgtgaaaagctgttggcagttgtgttggttgcacgccacgcgcgcg

SEQ ID NO: 43115 - DNA, 1126 bp, Heterodera glycines
gcatgcgtggcacccgtgctcagttggaacccgagggctttggcgcatgggcatgcgtggcacacgtgagcagttggaatgggcatgcgtggcacccgtgctcagttggaatgggcatgcgtggcacccgtgctcagttggaacccgaggcttggcgaatgggcatgcgtggcacccgtgaacagttggaacccgagggcttggcgaatgggcatgcgtggcacccgtgaacagttggaacccgagggcttggcgaatgggcatgcgtggcacccgtgagcagttggaatgggcatgcgtggcacccgtgagcagttggaacccgagggcttggcttatgggcatgcgtggcacccgtgagcagttggaatgggcatgcgtggcacccgtgagcagttggaacccgagggcttggtttatgggcatgcgtggcacccgtgagccgagttggaatgggcatgcgtggcacccgtgatcagttggaatgggcatgcgtggcacccgtgatcagttggaaaccgagggcttggcgaatgggcatgcgtggcacccgtgctcagttggaatgggcatgcgtggcacccgtgctcagttggaacccgagggcttggcgaatgggcatgcgtggcacccgtgagcagttggaatgggcatgcgtggcacccgtgagcagttggaacccgagggcttggtttatgggcatgcgtggcacccgtgagcagttggaatgggcatgcgtggcacccgtgctcagttggaatgggcatgcgtggcacccgtgctcagttggaacccgagggcttggcgaatgggcatgcgtggcacccgtgacagttggaacccgagggcttggaatgggcatgcgtggcacccgtgaacagttggaacccgagggcttggcgaatgggcatgcgtggcacccgtgagcagttggaatgggcatgcgtggcacccgtgagcagttggaacccgagggcttggcttatgggcatgcgtggcacccgtgagcagttggaatgggcatgcgtggcacccgtgaacagttggaacccgaggcttggcgaatggggatgcgtggcacccgtgaacagttggaacccgagggcttggcgaacgagcatgcgtg

SEQ ID NO: 43116 - DNA, 1383 bp, Heterodera glycines
  unsure (1)..(1383): unsure at all n locations
ttttcaccgggtntaataaatctaggaaaattagtaagcttttgtagtgttccgatacgtatctctgcaaaatttggtgagccgctgatcaattacaaattatttatggacgatcaaattttttgaaatttttttaagtgcaaaagtggtgggtgtcttacagcttaactaggccctattaagcttatttccagaaaatctcgcatgaattctcatttttaaattttttatagatttttaaatgtttggattttttttggcttaccaaaacttcatcgaacctggttctttctattctctttcaaatcgccccaaattttttttacagcttaactaggcccaattaagcttatttccagaaaatctcgcatgaattctcatttttaaattttttatagatttttaaatatttggattttttttggcttaacaaaacttcatcgaacctggttctttctattctctttcaaatcgccccaaattttttttacagcttaactagtcccaattaagcttatttccagaaaatctcgcatgaattctcatttttaaattttttatagatttttaaatatttggatatttttttggcttaccaaaacttcatcgaacctggctctttctattctcattcaaatcgctccaaattttttttacagcttaactagtcccaattaagcttatttccagaaaatctcgcatgaattctcatttttaaattttttatagatttttaaatatttggattttttttggcttaccaaaacttcatcgaacctggttctttctattctcattcaaatcgccccaatttttttttacagcttaactaggccctattaagcttatttccagaaaatctcgcatgaattctcattttaaaaattttttaattgctttttaaatatgccaaaaaatgtaggcttaacttttttagtgaaaattcgatcactcatattttttgctaattgagcagaagcgtaccaaactttgcagggatactccccggtaaaggactaacttacactgaaatgagcgccgagctagctggctcaaaaaaattttcgaaaatctgagtctttcgtttttatttattttttgcaaaattaattcttaaatattttttcagaaagggttctgaaacgcaccaaattttatttacatgttagtttaggcactctgatgctttttctatcaaaaagggagatgaataaaatttttaaaaatttttaattcctttttaaacaggccaaaaagtttaggcttaacttttttttcagaaactgatcagaagcgcaccaaactttgcagggatactgaaaggaagagaaataacctatattaaatattatctagtcagttcatttaaataatttttatcca

SEQ ID NO: 43117 - DNA, 1259 bp, Heterodera glycines
tccttcatttgcattgtctttttcttttcttttggctttctctcgaaatttgtgccatcattttttggcattaattgggtcaataaaatttcagccaaagattctttctcggaaatttgttcttccatttttcttaatgcattttcttcctccgaatttgtgccaattttcgatggcattttgtttgaattttgattttcttctcccaattttgtgccaattttcgatggcattttgtttgaattttgattttcttctcccaattttgtgtcaatttccgatggcattttgtttgaattttgattttcttctcccaattttgtgtcaatttccgatggcattttgtttgaattttgattttcttctcccaattttgtgtcaatttccgatggcattttgtttgaattttgattttcttctcccaattttatgccaattttcgatggcattttgtttgaattttgattttcttctcccaattttgtgtcaatttccgatggcattttgtttggctttggctttttctttcccttttttttctttttatcttttccctcattattctcctccgaattcacatattttagtgcttcgtccacgtcataagtttctgtttggtcggcttcttcttcatctttcttcaatttcttttcattttttgtttctttttcttccgaataattttctttatttttttcattaaaattttcattttcatttttggcattttcttccaaatttgcaaatttttctttgcatttttcggcgtgatcatagatttcgctgacattttctgctccgcccacaattgtaccaattcgcattatattatccattgctccttaatcagcaattttattaggtaattgcttaaacagcttgatgcttagcagaataatttcattattatgcctttaattttttatttgatggtattattttttggaaattaaagttccttttttttgtccaccattaatcagcagagaaatagcatttttaggcaaaaaaatcgcaaaaaaaaatattaaaggaacaatacgcaaataagaggatgttttagaaacaaaaacacacacaaaaaaaaacaacttaattttggttatatgtactcaattaacgaaaataaatattgtaaacgaagatttaattatgtacaatattcttcgatttgcacaatttttaaaaccaaaaaatttgccaacaaaaagtaaattaaatttaagggaatgcatttttgagaaaatttttcaattctt

SEQ ID NO: 43118 - DNA, 967 bp, Heterodera glycines
tttttgatttatattaacgatcttctgatgcttgcctttcaggagtaagaattaaattatatgctgatgatgttaaattgtatatttgttataaagcaagaaccgaaacagaaattatgcataaagcattgcataatttatcggaatgggcaaataaatggcagatcagaatctcaattaaaaaaacttttgtacttcatttggggaataaaaaccccaaagaaatatataaaattggtggaaatataataaatgtcgtggatacaattagggattcgggcataaatattgataataaattgcaattttccaatcatgtcacacaaataataaagaatgcatatttacgtatgcgctctttatttcgggttattaaatcaaaatcttctaggatttggattagtcggcacgaaatgaccaattagtggccaaagcggaactgttggccagaatacgaaggtgcatagtgttttttttgtccaataaaaattttaaaaaatggaattttatatttcttttaagatttacagcgcggacgaaggcacaaaatcggatggcacgggcagcgggcgtacgacacgctgtgcagcttctacaagttggcggagagcaaaatcaaccaggcctatgttgaggaggtgggtcggccggggaccggattacccaaaagtacagacgccagtccgggcggtgggttgttcaaaaacatatttttgataaatttctacgtttgaaattgtttaaaaaaattttagttgggtgagagacacaattttttaatgaaaaatccttttttttgtgttctttaattatagaataatccccaaattttaatcaatttgcttatattatatcaatcattttgttggcacagtcactgatgtgttgatgcacatgatcatcctgctcaatgacaaaaacgactgacgagtccgtgccgcattcttcgaggcgagcccgatgctag

SEQ ID NO: 43119 - DNA, 935 bp, Heterodera glycines
agattcatctgctattacattacaatttctatttctcatttgttctaaacgcatccgtctttgtgctacagattcatctgctattgcattacaatttctatttctcatctgttctaagcgcacatttctggattcttgtgacttattctgccatctaatcctatctctctctcttttctttcgcaaattctcaagtctcctatcttcaaattgactgtcagtcatacgggatgaccccgcaacctcagcatccaaattcattgatccctgactgggaccaccatccacaaatctttgtctcttagcatagttatgctcttcaaacacatcataattcctaatatttctttcattttcttgatctaaaatctcaacacattcttccatttcatcaaaatctaaatcataaacataatcataatctcgaacataatctaaatcgtttattgaagccataataataaatacctaaaaattaatttaaaataaaaaaagttgaagatatttgaaatgaaaatcagatgaataaaattcataacataaaatttattatttatttaaaattttactatttacgatcagttaaccaataacaaaatcattattcttttgaagagatccaatggtcagcccagtcagtacacacttcattgcttaaataattatatttggttaattttaacatattgcaaagaaatttcataatgaagtcatagaacaaactctaatgtttatcaaaaaaatgacacacattattgtgtcacactaaagtcacagaacaaacactattgttttatcaaaaacataagacacattattgtgtcacactaaattcatagaacaaacactattgttttatcaaaaacataagacacattattgtgtcacactaaagtcacagaacaaaccactaatgttttatcaaaagcatgaca

SEQ ID NO: 43120 - DNA, 970 bp, Heterodera glycines
  unsure (1)..(970): unsure at all n locations
tctagagtcaatggcttgggcaacagttgggcgccaaaacacaaacagacctcccgtgaaaacaaaaccatcgccaggaagggccaatttttcatatcgtaattcattttttgattttggtattcattttttgcgacaaaagaattccaaatttatttactgtaactaaagtcaatattcaagaatcttttgttctggataaattctcacacttgaatcaatttgtcatttaattttccaatttatcctttttaaatattttttggcatttgtcaaattagaattttcagaacttttttaaaagatttatttaaatactgaaaatcttttatttttcctcaacaaattatgccgaaggcagcaggtgaattttgtggtcttgttccccgttgtcttttgtcttaatatgccccccccccctttcgtggtaaaaacagtcggtccatagacagaaaaagcggcaggtgtctgctgatgaatgagcgtgtaaaagttgtggcacccctggcaaaacaaaagcaatgcttcctccctttttccaccaattaccaaccattccactgcttctccccacccccatttgttaatgtgccaatgcgcgaaaaatgagcaggttaaaaaattcccccggcacggcacggcttttcgttgtcccatttaatcacacaatgaatgaatgccccggtgcgcggaaaaaggtgttaattaatttgtctgcttccataaccgacactttgccgcccaaccttttcttttctcccccttttacacatctacaatttcctccgacggcacttcaaatggaataataatttttcccgttggcgtcaaatattttttcagtgcctttttcaccgtcttaaaactaaggacagttttcctgtcncaattttttgctgtttttgtattgtgtnaaatgaattaatggaattaaaaaagcaatttcagaatttgcatttcttaaattact

SEQ ID NO: 43121 - DNA, 1283 bp, Heterodera glycines
  unsure (1)..(1283): unsure at all n locations
agagaaacaaataaaatttattttcatttacataaatcaactgatttggcctaattaattttaaaatataaattaaaaaaagagaaatcaataaaattaattcaaaatgtatgcaaacaacnnnccaacagatggtactattacactgcattgaatacgacgagagattaaaaaaattagcaataataaataatttaaacatntaaaaaagccgaatttaaaagaaatgaaaagggcattttttaaaacaaattaaattaaatatatttcccttaagatcgatgtatatatgctagagtagagcgggaccgggaccaaaacacggacaactgagtacaactgagtaccgaggtcccggttttgaccgggaccagtcccggggtttttcccgtttttcccagccaaaaattcccggtttttcaacccgaataggtcccggtcccggttaagcccaaaattcccgatcccgctctactctaatatatgcataatattatttattgtttatctaaaaaatggaaaaatatgtccgatgaaaattgtgaaagaattgcaaacatccaatttaaattggttaaaaatattagatcacaataattgattacatataggctgcccccccaaaaaaaaagaaataaagaaattaaataaataaaacaaattaattttttagctcaacagaataaatttaaaaatatatctcttgtcgacgtgaacttcttgtaaaccacaacatgaaataaaacaacagatcttaattttataagaatttaagttttaaattctatttaaatttccattaatttaggtattaaaattaaaagaatataaaatttgaaaatgacagaaatattagccaaagtatggaataaaatatgctcagtgtcattaattgtttatctaaaaaagagaaaaaatatgtgaggcgaaatttgcgtaagaattgggaaaataaaaaaatttaaatcgattaaaattaaaaaattcagtaaattacaatgaaaaaacagcaacaaaggaacaattaattaattcaacatataaaaaagtatatttaaaacaccatatgaaatcaccacgagagattaaaaaaattagcaatgaaaaatatgtaaagtgaaatttgtggaagaattagaaaaatcaaattaaaacgtttaaaattttatatcactgtaattagttacataaacactgccctcataaaatgtaaataagttggagagaattaattatgcaaatgacataagaattgataattatttatgtttaatattttattt

SEQ ID NO: 43122 - DNA, 1732 bp, Heterodera glycines
gttgggtttggatgagttgggtttacccctaaattatataatttttaattgctgccacttgaaatatttgacaaaaatttattgcatttttaagggcacattttccatggaattgttgtcgtcaaaaataggaaaagaaatgcgcagatacacaaaaaaattgttgaattttcaaaaccatttgaatttatgggattttgatggcaaattaaataaattggttaaaaaaatatgctgagaaatccaataaaataatgatggcattattaaagacttttcttgtgctttccggtcttcaaatgctttgtccaatccgatgatttattggtcgaatattcacactgaggacactggaaaaaagggcaaaataaatgtttatacctaatttaataaaatggggacatttccgtctctgaaaaatcaaaaaaaaattcttaaaaaaataattgaaaaaattatttaatttaaagatagatataaaggaaattgttcataaaagaaaaaacaggtgaagaccatattttcgggattttcttgaaaagttcaaaaagattttcctgatttttttttatttaaaaaaacttttaaagggcatgaaagtttctttgaataaaccaataaataaacgaacatgaaaccgcttcatgtcactgtgcgtgtatcggtgtgccgaaagtgaagagtgttgaccaaacgtggcatggcactgatcacactgttgtacaaacaaataaaaattataaaatatagtaatatttatcaggcgtaacgcatccagaaaaacaaaataatgggatgggtaaacccgaattttccgacaaaaattgctattttgtgtcagatttttaaaaattttgaattttgttgctctacggttaaccgattttgatgaatgttaagttagttaaaaatttaaaaaacatatatagataatctaaatattaactagttactcaagaactcgactcgattgtcaaattgctcctcaaatgaaaaattttgatcagtagggcacttaagaattgatcataagcgtaattaaaattaatcaccagggcacttaagaattgatcacaagcgtaattaaaattaatcaccagggcaattaagaattgatcacaagcgtaattaaaattaatcaccagggcacttaagaattgatcacaagcgtaattaaaattaatcaccagggcacttaagaattgatcacaagcgtaattaaaattaatcaccagggcaattaagaattgatcacaagcgtaattaaaaagcaaccaagcactgatcaacaatcgattgtcaaattgcctctctaattaagcattttgatcgcagcatcgcttaatcacctgataaggccgttcgcccgtgtgcttgcgcttgtgcttgttcaagtcgcccccgtaagcagttgcatatgcacagccgggccaatcgcagtgaaaacgcaactcgcgcttcagtttggccgatcgcgacgatgagcccaccttggaatcgtcgtcagctgctgacgacgaaccaatacctagaaaaacagaaaaaaatgctaacaaatataagaatttttttttaatataaaattgaatatttttaaaattttaagcaattgaaaatcaaaaaatgtcctgaattttcagattgtcctgaattttgaggtctctgataaaattaaaaaaagggcgatatgttgtaataaaaatcattaaaaatttcaaaaaaaatttcccgg

SEQ ID NO: 43123 - DNA, 1147 bp, Heterodera glycines
  unsure (1)..(1147): unsure at all n locations
ccnttgataantctgaaatttaaaaattaaatcgaaattacattgaaattttagtgtaaaaattcaaaaaaaaatttttataccaaggaaatccacatacagacacagatgtgtcgtgcccccggacaccacttcggcggtcgccaacaccgcccggagctcatattggtcgtccggctggtcgggttccgggcggcgtggacggaccttcttcggcgttttgcccttaggaatgcggattgatgggggcggcggctaaaaagaaaagaaatttggaagatatttttaaaaataattattaaaaccatttttataataattttaaaagactatgaaaggttaatatttttaattatttaaatgctatgaaatttaaactttttattaaagcttgcctgttttttgttgaatttgtttttgttgtttttatccctctttttttgtcgtgtgatttcttcggcggaaagtgacgacgacgacggctgaggaacatttgctgctgttgatgatgatgatgagcagccggcaggtggcggcggcgcttaaatttcaaaaaattttaataaaggaaatacaatgaatttataatcaattttaaattttttttattaattttttaaaaattaaactcacgaattgcaagtgccggaaccgcttcctcctccgctgcacgccgttgtgcactgcgcgtgaccattgtcaatgcggtggatgatgtagagcagccggtatttcggctggcgatgacttttgctgctgttgttgttgaagttgtggcatttggttcggcgacgacttcggcatttgatggtggcattggcaacggcaaaccatcttcaatttgtgatggtggtggtggtggcggcgcttaaattgtcaaaaaataaataaaggaaatgtaatggattataattaattttaaaatttatttaattttttaaattaaactcacgatttgcaagtggacctcttcgaaagcccatttgtctctttgccggcggcaccgcgtcctccgctgcttcacgtcgttgtgcactgcgcgtgaccttcaaaagttgagccaatgtctggagaaaacaggaattatttttgaaaatctcaggattttattttactctttttgggggcatgatgcgacaacaattgg

SEQ ID NO: 43124 - DNA, 601 bp, Heterodera glycines
ttgattttcataaatctacatgccattcttttatttttaaatccattaaaatattttttaagaatgaatacatcaatctggaaaatatgtctatttgaaaaatcaaaggatggcaaaagggcggagtgccgagaatgtaaagaaaatgcaaggcccaagtatgaatttatggagtcgggggcgtttgggcccccgcgtttgagcccccgcgtttggagcctcacgatcgggacctcgttcgtgcgacctcgggcctcaaatacctgaatgatatgccgctaacgactgacaaaggacaacctaaaaatttttcagagggagcattctccctcatcattttgcgtcatttacttgtgcttcaccatcctcagtcttattttgccgcctgcgttgcacaacccgacgtcgcatctcacctttggtggcccctcccccattgaccgttgccattatattggcgatctgcgttgctaattcattaacggtggccaaatagtcgaaatggagagaggtgagccaatttccctacgtacctgctgggcagacacaaaaaagacacgccattctctcgcgtcgaaggcagaagcgagcgacaggggag

SEQ ID NO: 43125 - DNA, 909 bp, Heterodera glycines
aggattcggtctccccataaatctgggcgcatcggtcctgggggactgccccgaaaacaaaaaaatcgattttttcaagtgtccgtttggggtactcaaacaattatggggagcaaaaatccaacgcagaattaaagtacaggctatagggaagctattccggaaagattcggtctccccataaatctgggcgcatcggttcggggggactgccccgaaaacaaaaaaatcgattttttcaagtgtccgtttggggtactcaaacaattatggggagcaaaaatccaacgcagaattaaagtacaggctatagggaagctattccggaaggattcggtctccccataaatctgggcgcatcggctcggggggactgccccgaaaacaaaaaaatcgattttttcaagtgtccgtttggggtactcaaacaattatggggagcaaaaatccaacgcagaattaaagtacaggctatagggaagctattcccgaaggattcggtctccccataaatctgggcgcatcggttcggggggactgccccgaaaacaaaaaaatcgattttttcaagtgtccgtttggggtactcaaacaattatggggagcaaaaatccaacgcagaattaaagtacaggctatagggaagctattcccgaaggattcggtctccccataaatctgggcgcatcggttcggggggactgccccgaaaacaaaaataaatcgattttttcaagtgtccgtttggggtactcaaacaattatggggagcaaaaatccaacgcagaattaaagtacaggctatagtgaagctattccggaaggattcggtctccccataaatctgggcgcatcggttcagggggactgccccgaaacccaaaaaaaattttttggataaaatttatt

SEQ ID NO: 43126 - DNA, 990 bp, Heterodera glycines
  unsure (1)..(990): unsure at all n locations
atttttgttggattttggctcacggtgaattttaatcttttaaatttcgctaatgcaaaaaaacaaaacttaataggcatcccaccgattatctatttggtgtccaacaaaactgttcgtcatgatgtgtacagcatgtttattcgtggacttgatatggtattcccatgtattaccgtaccacctcaactctctgggccagcagcaggcgcggtcattcgcgttgtgccaatctcttcaccgtttaattgaagttcaaaaatgcgaaaaataatagaatttgaattgaatgatgatgagtagggaacggattttgttcggagaaaatgggtttttcgtgcttctctcatcaagtactatccgcaaaaaaaaaaaaggttaaaacctaaaaacccgttccctattgatgaggaataaaccggcacatcacataaaaatttactaaattccaaataaattgcaaatacaagaaatttaaaaatatattttcattttcgatattgaagatttgtccccattttctactacatcaatgtataatttataggataagtactaactttttttatatttttggtatactatcatttaatttttcatatccactaatataatataataaatgagatgaggctccgccccttggattaaatggtaaacaaaaaattaactaggtatatgaaagttagagccaaaattataatcaaaattaaacagaaaaacagaaatatttgcatttttccgcgattatattcccaaatatgaatttatattatattttttcaaatctatccaaattattagttttagtccattaaaagcttttttattcacatggaaaaatcacaattctactgaattttcggaaaaaatctccaatccaatttattanaaataatgatgatttttcttcactactgatcacttttatttaaagagaaattttttcattaaataaatttaattaaaaaaaggaaaaaaacttacttt

SEQ ID NO: 43127 - DNA, 1054 bp, Heterodera glycines
  unsure (1)..(1054): unsure at all n locations
taatcaaaatgttattgctcacagttccttcncgaccttctgacaaaggaagaaatgctcggcatttaccaattccattgccatccgccgaattcgcccggggcatntcagctgaaattcncaagccaaggacgcatttgtgatcggaatgaatacactcttttgctggacattgagaagttttctgaatttgctcgagagaattttgggagtgaacggagcagcgaaacggtgcatatagagggactctcgtggaaaatattggcacaaaaaattaaaaatgactttggcgttttcctttgctgcaccgcttcaaaagaaggtaaaaaaatgctcattaaatgtaattaaatttaattaaaaataagacacgaattggagttacaaatgttcggcaacccttcgaattgtctctcaaaagaatgagacggaacattacacttggaaattcattgaccacatttttaacagtaaatcaagtcacttggctttccccgctttattttcatttgtggtgagtgtcgaccaatggaatttcgttttttcagttaaatttggagctgttatttgttttcttgatatcatctttcctcaatataagccccttttgagggagcttgaaagattggagcccccggcggaaacctatttaaatagttaccggacaagtggttcgatcggttttaccgataaaaaaaccgaataaacaagatcgatcgtaccggtcctctaattttaagactataaaatcggtatcttggatctgatcatatcattggtacaggataatctttattttaataaattaaattcagcgattgatggatccgagcaaaggacttcacaacaaaattgcggacaaagtcacattggccattgacatcactgaagtggagaaattggattcgaatccaaacaaacccaacgggacaattgtaatggaaattgacagattgtcgaactttgcgcaaaggttttgtgggagtgtatggagcagcaatgcagttttcattggaggattccatgnnaaataatgcaaaaaacacgacaatgc

SEQ ID NO: 43128 - DNA, 972 bp, Heterodera glycines
ggggaccagagcgtttgggcccccgtttttgggccccggggtcgtttgggcccccgtttttgggccccggggtcgtttgggcccccgtttttgggccccggggtcgtttgggccccaacccaaaaatagaaaaatgtgctttttaaaaaattaagattctaaaaactaagcctgagggatccctcgccacttggcataagttaggtttaattaacattcgctcattttttacaattttacttattccaaatcctattattttttaatagttaaccaatttgatgtacattcagatttggacatttttcagaaatggctaaccaattgcaaccaaaaaacaaaaagtaaaattgtcttacgaacgccacctttacaccttcgctaaaatgagttctgatgggatgacaaaattttggagatgcgagttcaaaaaatcaatttcacattattttggagtttctccggggaatttctcgcaactatcgaatgaacccgtgattttttgttttattgtccaaattaccttatgaacccgtgaatttctgttaatttttacattttttattgttaaaattattgttgaatttatttttaaaatgtttattttacatttttatgctggaatttaaaaagttgtttttactgtgatttttcatttttctgtacttggggcccaaacgaccctggggcccaaaaacgagggcccaaaaacgggggcccaacgcccccgactcgactctgccagtgtaaataagtttttttttatttagtaatcagaacgccagaactttgcaaaacataaaattttttggggattttcccttgtaaaaacgcaagagccgatctcgagttaaaaagcattttgacaaataagcaaaggaggacttgaaccttggaccccctttttggtgactaactcacagatcactccaacgaaaaatccaacttatttacactgggagcccaaaattg

SEQ ID NO: 43129 - DNA, 1264 bp, Heterodera glycines
  unsure (1)..(1264): unsure at all n locations
tatataaaaacatgacgaatgcatgtcgaatagacnacatacatgtattaatgcttttatgtgatacgcgtgggaatattaatatcatgaagatgtgactaatgcgcgaattaaatttaaataattgttaatatatttttaaacttattttatttatttattttttatttttttattattactattttttaattgtattaagcatatctaatttgtataaatgaatattattgctatttatttatttttttattttttttttgaaatgcaattatggtgtgaatttgtgaaatgcaattatggtgtgaaatacgataaatgtactaacataataaatagtaataaaaacgtaggcacactcaaacataacacgtaaatgtgaggcaataaatgaacccctcagggtgggactgatcaaaagaaatgatcgaaaaggagactgatcaaaatgaatttggggcgacttgatcaaaataaaatgggaggtgggactgatcagaagcaatggcagaaaaaggattgatcaaaagaaatgaccgatttgatcaaagaaatagggagggaatgggactgatcacataatatggcgaaaaaggaaactgattaaataaatttggccaatttgatcaaaagtaatggggaatggcactgagcaaaaagaaaacgcgcttatttgatcaaaagagaaaaaatgggggaatatatgatcactgaaaatgtcggaagacaatgatcagaagcaatgagggagggatgagactgagcaattgaaatggccaaatttgatcagtgaaaatgggtgagggatggtactgatcaaaagaaaatggccgtaaaggagattgatcaaaataaatgggccatgatcaaaagaaaatggagggggtgggagactgatcggaagaaagagaaatgggactgaccaatagaattgggaccattgattaaataaaatgggggaagtgtgaacaataattgggcccctcagggtgggcctgatcagaagaaatgcccgaataggaggctgattaaaagaaatgtggcacattccatcaaaagaaaatgggctgggtttgatcagaatgggagaaaggcactgattaatgcgcaatttgatcaatgaagaatgggtaggatggaactgatcagaagaaatggccactttgatcaaagaaaatgggtgaggattgaccaaaataatttgcgcagtttgatcaaaaaatgaggatgaacaacagaagtggggcaatggtgcctgatcaat

SEQ ID NO: 43130 - DNA, 767 bp, Heterodera glycines
tgagacgaaaccatgttcagtttaatttctggttttccacagttgttctgattagacaaaagtattgagccaaaccagaaactgttcagtttaatttctggttttccaccgttgttctggttaacaaagaaatgagccaaaccagaaactgttcaatttaatttctggttttccaccgttgttctgattagacaaaagaaaagacaaaaccagaaacatgaccagaaaaacaaccataaagttaccaatacaaaacaaatgagacgaaaccatgttcagtttaatttctggttttccacagttgttctgattagacaaaagaaaagacaaaaccagaaactgaccagaaaaacaaccataaagttaccaatacaaaacaaatgagacgaaaccatgttcagtttaatttctggttttccacagttgttctggttagacaaaagaaatgagccaaaaccagaaacatgaccagaaaaacatctggcatcaagttgttctaataccaaacaaatgagacgaaaccaactgttcagtttaatttctggttttccaccgttgttctggttaacaaagaaatgagccaaaccagaaactgttcaatttaatttctggttttccacagttgttctgattagacaaaagataagacaaaaccagaaacatgaccagaaaaacaaccataaagttagcaatacaaaacaaatgagacgaaaccatgttcagtttaatttctggttttcacaggtgttctgattagataaaagaaa

SEQ ID NO: 43131 - DNA, 1468 bp, Heterodera glycines
ttatatagaaaaaaaaatgcaaaattggaaaattttccctcacctttaggggttaatgaggccgtttatgcagggggtccctctaatagattatatttgaaaataccaaaatatgtataaagaaatgtgtccgtaagctaaaattacaataaaaaatgtaccgaaaatgcatcccccaaaaatgaacaaattattccgatggattgcggcggtggcgccggaatttggccgcaaaatgaaatcggattcgcactgaactttaaacctgcaaacggaaaaaaaaatttgcataaatcattaaaatacataacacaactcaccagacattacttcgggcacccaaaagagcaaaagggaaaatgtacagccaattgcaatcctaaaaaggtgggagaaacgtattcgaataaagaaaaaagggtaaaactgcagaaaggcggtcccaccggaaaacaaagttaaaatttctgtagaaaaacgcctagaccaaaaacaaaacatatttatataatggaggggagccgaacccaaaccatcaaaactaaaaaatgcactcccccaaaaaagtttttgtcaaccaaaattatttaagcgtttgaaacgcacccaaaaaatgattcacttgatgaaattatatggaaattcaatgatctaggaaatcatagctcaaattcatgaccaacgcattttctacactagtcaaactgtaaagaaattaaaatttgtttccgatggaatcgcaattttgcagcattgcgtgaaaaagaacccacgcggtaataaatgtccctttcgtcgtaacaatagccgccccagcagagcaaacagcctcaaagttattaacaaattcaaaaggaaaaagcaaaggcgggtggattaggcacctcggtattcgacacaaatgtgcccagccacgggggtcagagattcagtcgtatcaatctaaaaaacaaaaataaggaaaagagttagcaaattgtgagataatttaagggaaatacaggaaatatgaggaaaatgaacaaaggtgacctcaaagttgagctgattattttcttcgaagaaactttgcgtatttgcttgagaactttctggttcaatgtgtaaaatgtgggaatccatttggacatcttaaaaattagctgaaattacatttacgtaaattaaatacgaaaaagcaaatcctaaaaaataaaaaaataataatgctgataaaagggaattttggcataatatactaattaattttaaactttttattggacatttatacttgaacgttttttagtgtttcaaatttatggcctgtaattttgttacagactgtacaaaccctatattttatgtttttttggtcaagggttatgaaatggccggccgagataaaggctataattgtgttcagcgtaccagaaaattaaaaaaggccaagaaaaaccaggacctagtcattgtcccgaccaatgga

SEQ ID NO: 43132 - DNA, 1040 bp, Heterodera glycines
ccaaaactttgggtttttggggggtattactggcgcaagctagctgcaactacaatggcatatgggcgattaggtagaccttacaatgttaatgtggccgcacatttctacgttcggcatcgtattaaacttcgccatccatttcttcattgtgtcatcgaacgctttcctgaaggacaagaggatcgtttttatcctcttgagttatgcaaaattgaggaagttgatgaatcaaaatggcttggtcagattttcaccgagattaacaacaacaatttagtgcaactaattcaacaaattttgctgacactcaaacttcaaatgatgattcgaaaagtgttgatgggcgcgatgaatgtagccaaaatgattgctactctttgtggtagattaagcttttttccattttgtatcttctctctcttaattttgccatttttcacccaaaattgacctcttctattccttaatatttttcaatttatatttccatttaaataaatttttcttttttcaactttatgcaacgaatcaatgagtggaataaccaaaatcaagcacgcgaaaatcacgagagcaaacaatccctttgccaacatatggtttatatattttttgaagtggtgcggaggtgacattcccatcttttacaatggggcgtaggaaatgaggatacaatactttgattggtggtgattttccggtacgtacaaattctaagacgcgagttttgaaagtgtcgtaacaaagcccctgatttttggtcacatcataatttagggttatccctctaagtttgagcacgtagtcaaactcattttcgctgcccttcttccgaagcttcagaccatattgctttgctccaccacttataaattccaaaatgtcatgctgaatttaaatttatttctttaaatcaaaaatcattacctttggaaatcatccgtaactcacccagtgaggacccgtcttcaaaggatttgcgccttttgggttgacataaatcaccgaatccgtatcttaaaaaatttaattttttc

SEQ ID NO: 43133 - DNA, 1190 bp, Heterodera glycines
aaatttgggacaaaactctgggcggaggcagctctgtcgcgctggtcagatcagatgagatggctctttgtgagcatcctggtctatggccagccgagtaatgccatagaattgtggaacaagtacaaagaccaaatgtacaatccgcaaggcattattactctggcacagcataaagtagcagagcttgaagccctagccgacattgattggcggctgcacagctgctttaacttaagctgtgtgcattttagcctgccagacccgccaaactcaattgccaaaaatactgacgcggcaattgaagagtttttctttggcgatgatgatttgaatttgcctccagggcaaccaaatcctcgtccacagccaaatacccctccgccacttaacagcgaccaacagaaggtctttgatgctgttttgttggcaatacagtcgaaccctagggattcgactgtcccccgccgtttcttcatatacggcgatggaggcacaggaaagacattcctgtttggccaaattattaggcgcttgcgaaaggccccatacacctacaaagtgcttgctacggcatccactgggtgtgcagccattttgctgccatatgggaaaacagcccattccacgtttcgtctgggtagagaagtgtcattagacaaactcccaagcattccgctggagagcttctttgcccgtcggattcgtgaggcccaactcatcatcattgatgagatcaccatgcttcacaacacggtgattgaggtcatcgaccgagtgtgcaaagagatggcaattcgccagcacaaggatctcctcttcggaggaaaaacggtcattttcagcggtgacttcaaacagtcgctgccggtcgtgcctcatgaaggcttaaccgctcaggtgacagcctgttttcaaacgtctccgttgtttggtcaattcaccacgatgaaattgaccatcaaccagagactgggccaaggtcagcaagcgtacttgcaaatgtgccgccaaatcgggctcggagaaaccggagagcacttctggattcctccgcagttcctcgttaagagcaaggaagagctgatagattatgtctatcctaacttccaacaactccttggcaatgacaaggagctgctcaatcgttagattctcgctccgcacattgacacgtgtgatgaagtcaa

SEQ ID NO: 43134 - DNA, 1154 bp, Heterodera glycines
cgttattagcaaattccattcagcaggcgtcgtcccactttccaaaggaacggcgtccatttggcctttttcgtcgccccttcgggcgtcttccgcttccgcaaccattctctcggggaccgtcttctctatgaatcgccccacccctccagcgacgaaggggggcaaagcaatcggtggaattgactatttctaataattattgctaattgatgatgtcattaaacacaatgttaattatttaatttttattcgaagtgtctacaaacactttctgttggagctgtttccaaacgccgcggaggctgactttttccatcgctcagttcggcaaccgtccgaccagataactttcgacttcaaccgagaaagtgccatccttccctttttcatttaaattgtttttttttcattagcccgtctttggcagggctatggccgaaagacggcctatggccatgccgagaatgaatctctgttggcattggcctacaaaacggtgcgcgtcgacggagcagtggcgggagttgcgggcattgaggtgcggagactgctaacgatgcccccaaatgtgtcaccaatttgctcatttttaagttcctttacgatacgctcgtcgcccaaatgcgccacatcggctgtatgtccgccgatgtgagtttcttctcagtccttccattcatcacccttttctgatcacttattcatcgactttcgcttttctgatcactccctttggcagagtgatcgctcccgttgctatttgctcgatgagcatggctacgtgttgttctccaggtactgccccacaatacgcttctgccacaattccttcactcatttagcagtcattccactcgctattccgactttgtccatcagaacattgtccttcctcaaattgcgtttgtgacggcacaaaatatgacactttcggggcgaaaaagaaaggggcaaaaagcattcattgcgagtcgaacggcacaacagcagcaggagcaggaacagcaagaacaatgggacaccgccggaggggcgttggagttgggacgcttttttgggcaactgaacagagtgacagagtggacgatggaactcctgctgaggaaaggcctttacaagaggtaacaacaacattcgaaagccgaacttta

SEQ ID NO: 43135 - DNA, 1056 bp, Heterodera glycines
  unsure (1)..(1056): unsure at all n locations
tatctcttatgtttgagaaattttatacgttacaaaagccctctcagggtgagagggagggcggtgcgcaatcgccatttactttctcagagaatttttaaatttatcttatatccaagaaaaatgactatctcttcttttagaaattttatacgttacaaaagcgctcgagcgtgagagggagggcggtgcgcaatcgccatttaatttctcagagaatttttaaatttatcttatatccaagaaaaatgactatctcttattttgataaattttatacgttacaaatgctctcgagcatgataggaagtgcggtgcgcaatcgccatttaatttcacagagaatttttaaatttatcttatatccaagaaaaatgactatctcttattttgagaaattttatacgttacaaaagcgctcgagcgtgagagggagggcggtgcgcaatcgccatttaatttctcagagaatttttaaatttatcttatatccaagaaaaatgactatctcttcttttgagaaattttatacgttacaaaagcgctcgagcgtgagagggagggcggtgcgcaatcgccatttaatttcacagagaatttttaaatttatcttatatccaagaaaaatgactatctcttcttttgagaaattttatacgttacaaaagcgctcgagcgtgagagggagggcggtgcgcaatcgccatttaatttctcagagaatttttaaatttatcttatatccaagaaaaatgactatctcttattttgagaaattttatacgttacaaaagcgctcgagcatgataggaagtgcggtgcgcaatcgccatttaatttcacagagaatttttaaatttatcttatatccaagaaaaatgactatctcttattttgagaaattttatacgttacaaaagcgctcgagcgtgagagggnagggcggtgcgcaatcgccatttaatttctcagagaatttttaaatttatcttatatccaaganaaatgactatctcttattttgagaaattttatacgtttacaaagcgctcgagc

SEQ ID NO: 43136 - DNA, 1228 bp, Heterodera glycines
  unsure (1)..(1228): unsure at all n locations
ttcaatagacaatccttattaaatttatttttttttcctttaagctttttgttaaaattaaaccaatccatttttgaaataatttaaatagttaattatttaaaataggttttattaagagataagacgatttttacaaattgaaataacaatttttggataattttttgacctagtacacacacaattcgattaaacttttcaataatttaatttttaataataaatttcagggcaaattttatatatttattaaaaaaattttacccctaaagtgattaaagaaattacacattaaattataattttcaaataaaaaaattaaaatttcaaatatacaagatgacaaataatcctctaataatttatcattttaaccagtctttagtctcactttttaaaaaaagtaaaatttgagaaataaaaatttattctaaataattattttcactgaccaaacgcgttttatgaaaataaatgaaattaaataaaattgtttatgacttcagtaagaaagaatatttttcttaaagaattgaataaagaaattaatttaaaatgataaaccttcgtaaacaaattattattattaatataaaccaataacaattaaagcaatttgaaatgttaaaataaacgacgacaaacaattttgagtatcaaataagaaaaaaggagacttcggttctgttgcgaaaagctcaaaataaatttcgttaaatctaatttcacccactccatttcctccccactatctgcgactttttagtcagaattttttagtgtcgttgatttgattttttaaaaattactgtagaagtaattaaaattaattttttcattataatttattaaaaatcagcatctcaaaaaaaaaatctgcttttacccttgaatcagcaaaataatgataaatctgcagaaagcctgctggataattgtaaattttcataaatttatgcattaaaaattataaaaattcagttatttagaaatttgaaaatttacgtcaaaaattttgatattttaaaagttttacaaaggttttttaaagatttgtattgtttttgcgtttggatatgcgttggatgaaaagaagtgaaatgcaaaataacctgagatttaaaagaataaagaagaaaatagttggatttgacacttctttcgttcaattttcgttcgtcggaaacactttttaattttagcccagcganagaattctgagaaa

SEQ ID NO: 43137 - DNA, 1074 bp, Heterodera glycines
  unsure (1)..(1074): unsure at all n locations
ggatttccaaattttgagaccgaaacgtttgctataaaggtatgatttcctttcttttttttcctgcaaaatatgaataangaaaggagctcaaaatntagggtattttttgatagataaaaatatntaatcataaatactgggcaattagcttctaagaaccatatcggttttacccaagttcaggcacttttggtgctggaattccgcggtgaagattccggtaaaattcaaatgttagatttttaagatgtgcttcaaaaaaaaaattaattgatgccaaaatttggcgaaaaaaaatgtcctcatctaagcgccaacgccgttcattctagacagtccaagtttaggcgacacgcctacaaacattcacaacacaacgtagctggaaaatttttctttgaaatggacggcacatgtattaaatgcggcactctcttaaagggtttgattacccctaaataaggggaaataagagtgattactagttcgcctagttcgcctacttagctcagttggaagagcgcggcaccgattgctggggtcgcgggttccccaccgcgggttggtattttactaatcctcacaaagaacacgacgctcaagaatccaaatgaatgtcataatattgtttttataaaatcttttccatattaaaaaaaaatacatttggcacacattgctttagactcttctaaaagtcaagaatttatcaaaaaaaaatattttgaaaaattgggcagttttatcggcttttcattccaaattttggattcttcattccttcgacattcttccaatgtaattgttcacaaaactggacaaatacagaaaatcgcctccatcatcatcaacctaattaaatgatttccatgagattgaaaaaaattttttgagacctccgaaatgtgtgaaatcactgatccctcggggtcgtgccaagagcgcaaaatcatgccgttcaaatccaattgtaacacaatgccatgcgtcgatccgacaacaaaacgctgcaggacgttgtcaggcagaattttcnaaagctgaaaataggctaagtttcnaatgcttaat

SEQ ID NO: 43138 - DNA, 1085 bp, Heterodera glycines
atcattgggaaagctctaagtgtcctttattagcctgccctcctaagaaaatttagtttaggttcaaaaaagttatggccccaagaattcaaaaaaccaaattttccaacttttttggccataaattggttcaaaattaacaaaaatttttggaattttgcaggctagtagagcatctgaagagctttcgattacgccaaaaagagaaatattcccttccttggccgcttccttttatcgtttttccctttcctctacttattttttcttggttgaaattcataattacggtttataacggaattctgtcgcgtccaatttctccgagttggacgcggtcatccatttcttggaggagttgcggccagacacggcaagtgaaccgaacagtgatttaatggcatttacccgtgacgagagtgatcagactgtgttacggtgctgatcagcccttaaataatcctaaaaaaaccggtagaaacccgagagaaattccgaaatctcgagacttgagcagcacttttttgttcaaaaggcaatttccctattggcccttctcattccgattattttgctggccacaactttgaacccgctttaccaacacatccatccctacctcaaatagtcagtctcgaaattttaatagtgaataagtattttaaattaaaaaagcaaaaatttaaatcgaaaatttgctgctgccttttgttgtcagctattgtatccacgccaactaacgttaattgtttcaaaatatgtttttaaatttaaatttgttcattcagtccgctgctgcacaccggcaactcgtcgcccagtcacgacgcgttcgccaccgacatttacgcgatggtcggctcgcagcagcagcaacagtaccatttgctgccaacgcagcagctcaaccacaacaggaacaagcagtacacgacacaacaacaacagcagcaacagttcacctcgccgtacgccacctccaactacggttaccacgaactgacccatccaccggcctacagtatgagcatggtcggcggcggagacgcggggcaacgacgatagacaatggagatgaaccaaca

SEQ ID NO: 43139 - DNA, 1062 bp, Heterodera glycines
tctcttggagaatgaaagtcataagttccccgccttgaggcttaacaaaagctaagaaaaggaacggacgggcgtatggccatggcaaaacattggaatggcagagaagagggaaggacggagggagggcattggctggttactcactcgctctcttattccttcgtcaccctttttctatttgatggaggcggcagtctctctgctgttcttcgacaatcgataagctcagcaaaatttgagagagtaaaaatgcactgaacttttgaagttttcggctaataatgtaataaaaagcgtgcgctcattctccaccaaatggtcagctctttgcgcagttcgcagcttgaagttttggttgagcgtcgcgaatggcaccgcgtcaacgtgtcactcgaggagaccgcgttggtcctttctccgctcggcgatggttttgtcgatttaggcgcgacttcgatagaattgactggtacgaacaattaattaaagttaattaggtaattaaccaaacaaatattccttcgcagatgcactcgcccccaatattggaacatggaatccaaatcccgagaaacgttttgtgcgcattctcaagcaggagaaccaggggttggggataagcattcagggaggcgcggaggggggacgacccattgtgatcaggtgtgttgtgttttcgggaaccgcccagttcggcgccgaccctttcggcgccgttgctaataacttttctcattatcaaccaaattaaatattttcggttccattcgatagctcttaacgttctctattagcctgcaaaatttcaaaaaactttgacagtttacaaaatcagttatttttcaattttttcgatcaaaaatgtattaaatactatatttttagtctcccattattggttttaacaattttggtgagcaaataagcaaatcataaatttcagtacattccggatcaaaaaatcagattttacgaaatttttttgcggtgcatttttaaaaagacttaggggaacaagcggggcgggtggcgccgataggcaccgccgggaaaattttt

SEQ ID NO: 43140 - DNA, 1038 bp, Heterodera glycines
  unsure (1)..(1038): unsure at all n locations
aaatcccgagggccaaaaattgccaaaaaataaagaatttttaaaaaatccnaaaaattatgaaacttaaaatagacatcatattcgtactcagcaccttattttaccccagaaaaatatttttcacactctttttcgaccccaaaaaattttttgaaaatttctagggggcctagctcgaaaatttttgaaaattttacatcatgtagtacaccattcgatagcatttaaaatgctctacaaaaatgttctaagacaatttttcgataaacttaactcctgccgagttataggcccgggactcaaatgtcccgctcaggccaaaaattttttctatttccggaaaaaaaccgaatttttttcaaaaaaattaccaatcgatagagctcgaaaaactatgttttggaagtggtcttcgtttctctgggaaaaatcgttaaaaaatcataaaattaaaaaacacgaaaaccgttttttaggcctaactcgaaaaattttgaaaattttcgaaattttaaaatttggaaaaatcgggcttttaaagctctacaataagtctgctggccaccctgcgcacaggtcaaagcctaatgagttattcgcctggtactgaagtgggaaaaaaaaattaactgagtctccgtgtctgtacaggtccgggatttggtctgatcaaaaaaaaaaaataccggattatagaggacacttctgcggagtgccctcacagcgggcactttttgattcgggttttagaaaaaaagttacgggccctaaactgcaagaaaaagtgagaaatcgctcctcgggactcagttgggcgtcgagaatttttttctatagttttcccagatgcgcctcaaaaagttgtaagacccttccactactttcagacccgtcccattagccgttaaagctcaaattagtttttgaaacgaaactccttgtcaatataacgtatatattacctagcgcgtgcgtgaaccgtcgtgtattttaactgggataaagcgcttcacgctttgggagcttcgctaccta

SEQ ID NO: 43141 - DNA, 1343 bp, Heterodera glycines
gagtcggccatacacataaaataaaaattaagtggggacgggcgttagagacaaccctcaatatcaaaacacacgaaattcatgagctaaagggcttggtcgacacgggaacaaaattagctcgaaaataaatgcgaccggaatgaaaatcaaaaaaagaactcccataaataactaacatttatttaaacaaattatttttaaagtttacaaagaccaatctataaattctcgagtttcgaaaggcgagacaaagacccgcgacttttcttgagtcgagatcaagtctcgaaaatcactaagcaacaataaaaattatttaaacttctgattaacaacacatctatcaataacattgaattttggttgtcggattaatttgttgaggaagtgaacgatggcatcgagtaacaagcatcgatgtacaaatgggcgacttcctcaacaagccctttgtccgggattttggctgccattccataaatcgcagcctttaaaaaaaattaggcaaaatttagcctcatccgccaaatgtggcaccgtttttgaatttgcccctcggtcgggcaacgcggccacttcttcgcaggcttttttaaggtccactaagaaggcgtttagcactccgtcagccgtttgattgtaagtgatacaaaaatgaaggctaaaaaggaaatgcaaacagagaggaaaagcaaaaacaaacgcatcgggcttttgaaggaaattcaaattccagcccattttactcagacagtcgcctaacgcgtgaatgttaaagcgatgtgaagaaaaggccacctttcaatgtaagtctgccataatgcaaatatgggatgatattcaaatattttctgaccacggacacttcaggggttccgacaaggcaaattccggggactttagcgacagcgtcggccaattgtgtggtcttctgcagaattaggtgggctcgtcttgcatattctttttctccgaagtgttggagtgtggcccaagttagcgcaatgttcagacccggccgacttccttaagacggaaaaggcggaggagcattagacaaatggacagcagaaaaggggggatattcagttgccaagaaatttttattattcgaagcggcgaatgttctcaccagaaagtgtcggcgtagcgtaaagtccaccgggccattctgtcgagcaaaagtattgttggtgaagcaaatcatggctacggtagagaattacagaagtacccttcggggcataaccatactcaaagaaaaaaagcgtcaaaattggacaaaagtttggcacacttagtgagtgtcacaggaaattgaagtgacgccgagaaacggt

SEQ ID NO: 43142 - DNA, 916 bp, Heterodera glycines
cctttattcgatgtatcgcctcgatttaattctttttggtataattacacagatattgtctaaaaatgaccaaatttaaggattataaattatgccagaatagtcaatttttatgggtgtttttgtctaaatccagggtttctatctcaaaattttcaaaataagaatagaggccaaaaaataagattttagggtcaaaaataagaacattttgcaaaagacattttaaataatttttctagggtaaaagttatatggagagaagtgaatattatttttcctaataatgaaaatattagatagtacgccaaaaggagagaaaagttagagaaaaaaagtttctctgcactctctctttattgacacatgtctcgttttttgactcggtgtgtaaatattcaatccccattcttctctacactcatcttgaaatcaaattctcatatattggataatcagatcccggaactccgccttttgggtaaaaccgggactgggactttcgggttgaaaaccctggactttttggctacgttttttcagtatcaggtccctgtcccgctctactctattttcataggatcgctgaattgtcaacccttgttctaaaaataaaaatgcccagatttcaaaacatactttggcacttatttagcatattgtgtccattttatttagttagggaagttacaacaaaaatcgaagatgtgggtttcaaaaatttgcattttactttttgttcgatttatgaattaggaatttgtccaaattgatgttcgatttgtgaacaggagaaagttcttactacttgttaacaaaaaattgctcacataaaaggttatatacttaacggaaaatggctccgaatccaataaatgacgcggctgatgagtggttgtacgacaaagaagtcact

SEQ ID NO: 43143 - DNA, 500 bp, Heterodera glycines
gtttttaaaaaattcaaaagcccgtacttcttaaatagcgccttttatcttctaaaaattatgtggccgcaaaactgaacttttcgattcttatacatatttctaacatcagtcattttcctactttggatagtttaatggccattgaaactgtgccgccctttttgctatttttgtacaaaactttctcccccccccaaaaaatgattgggcaaagtaacggcacggccaatgccgcccataaaaaagggtcattgagtcttcttcacttcacacatcggcggacgatggaccgccgccgaccccaaagggcgcacataaaaaattggggaagggattcactcgcatttattcatccctcccctccccccccccccattttttctcctctcggcccgccaaatccgccgccaatcggccgagccgtttcgcaaatcccccgggggatttgacggcgcgaaaaattgagtctgtttgtgggaaggggaaaaagagcgccc

SEQ ID NO: 43144 - DNA, 963 bp, Heterodera glycines
  unsure (1)..(963): unsure at all n locations
aattaacaccaattaacgcttttttctccccatggcacagcatccaattttattatgggccagtgacgtgccttctgaacaaggaaaatcggtgagtaaatgacgaacgctttccaagcaattagtgattatctgggaaaattcaagccttaactcagcacaactaggaaatcctgaattcactttatcttttttgtactttttttggcaaaataagtttgacaaaatggttaatttattttgaagaatttttttatttaaagtccaatttttcggaattcaaaaagtccgctatcccgtactgatgatcccacaataatgttcggtttcttatattaagaatttctgtgccactatttgtaaaaaaaaaattttaaataggatttttaaaaaagcaaaaaaattttgaatgcgcttccgcgtccgcttttgcgcattttttctgttcgtgctccttccccgctggcttcaacactttcagattgtctgatcccgagcatttcaacttcgatgcccagggaaacaaccgacacagctattttgacaatcggtgtggagcggaaagtatgaaatttcttcattttggcattttgatttcaaatttggaaaaagaaaaattttaaaaagcaattttatttcgactttgctccattattcccttaaaatcaaaaaagcatttaatgccaaacaacaacaggagaaatgactgccaattatttgggcacattttgcggtggcggcggtggcaccactgagacgacaacggcacaactcaaagtgctgaagaaaaagtggcggaagaagaagaanaacaaaagtgccagcggtggtgccaaaaagagcggcaaaaacaaaaatattggcattntgtcctcgtcatcgtcgtcggtggagcagcagccggaagagaacggcaccgtcacaacgccacagcagcaacgacacatggccggcagcatcatt

SEQ ID NO: 43145 - DNA, 814 bp, Heterodera glycines
taacttttttcattgtaaaccaaatccaacaatcttggtatcattgtgaagctcttcacatgcctctattagtcttacaatgtacctatttttaagcatgtgcaaaaagttataaagaaagatttatacttttttattgttgtcgttgttgtaattcgcaatgccataacttttgaaattgtctaatctcgaagcaatagtttagaaatatgtagcttccaaaacatggtaagcttttgcgattgattgataccaagcttgttggattttgtccataactaaaaaaaagttatcgtcataaaaccgccggaacgtcggcgccgccaaaacacgacccacactccaatattcacgtccttttttttgtaccaaaacctcattcaaatgtggttttcttggttccattcaaaagcttagtctcaagaattatttaaaaaaagcaacagacaataagaaaaaacacacacacagtgacaaaactacaaattcaactcttacgaatatactcaagaacgactttttgtctgttgttatgagaacccaaaataagttagacaaaaacttctaaagccaaagacttttcgattgatacccaagatttagataccaaggattaatttttctgtaaatatgtcgtcgtcttctactgaaaaaatacttctttttctgttcgtcattgctcaacgaatcgacgatacggtaaaaggaaggggagggggaataaaaatgaataatttctagcccaaaaatatatggacctttgcttttttagctgttcaatccctcaaattgttccatgtccgaatcatttttt

SEQ ID NO: 43146 - DNA, 1003 bp, Heterodera glycines
  unsure (1)..(1003): unsure at all n locations
cttgaattggctctaaatatttaaaatttcaccagtttttcttttttcatttttttgacttctctaaacattatttttttttttttggcctatttaatcccttgcactttttggcacaatcgtcgcttggccaaaataaaaaaatggtcttttttggtggtctcccctttgggccagaaataacaagttgcccccgggggaatctgtttattccaccagcgccttctgaacttttcccgatgcttttgacatcggtcgctgacacccccgcataaaaaagtgaaaaatgggggggggggagggaagggacggcgaacaccgaattttggcactttttgaggaacggaaaaatgcagaacactcagcgaactgagccgaaggtcagtggcaattattgttggatttttaaaacgaatcgcagactaataaaaaaaaattgccaaatttgcgaaaagacatttgttggattattagctaattcattttaaaaatccatccttagaagtgccggcttttcttctgttattaaatccaaattaaatgatcacagttctcttttgtaggctttggcttatggtaggattatttatgagtgttcactgtgctcaattggccacggatttccattgtccccaagggctaaaatggcggagacataaaagtgccgggtgttcgcctaagatttggccaagataaatggtcggctaatacatcaccaaatgttgcctccaaactttccatttttggctcccatttttcatatttgaattccattttaaaaaataattcatgtacgaaccttttatataaatggtttttttggggttcgaatttgggaacatttaaatttttgcacgaaatatttataaatttcttaaaagttcaaaatttatgttctgaaaataaattaattttgtatatttattttaaattctataaccaaaaaatattattaaaatattttctgacggcngtataaaataatttgtcactgttttttgga

SEQ ID NO: 43147 - DNA, 1095 bp, Heterodera glycines
  unsure (1)..(1095): unsure at all n locations
cagaagctatttaatgaattcgaatgttttatcccggttaattagagcaacgaaaattggtttgaatcgtgaagtttatcatttctaactcacttctcaaaaatgttgataaattgcaaatatatttttccaaaagtctgtggacactttctgaaaataaattctatactcatgtattttccacttattagattttgcaggcttattgctgcatgttctttgacacttcttcaaaataacctatgccctttattcgttcaaaacagcatctttgttgtttcgctttggattgacaagcccgatgataaatagctcgagcgcaaaacgcgtgcatgtttggaaagtatcgttcataccaataattgagggtttatttttaaatgaaattttatgataaaccttattatctcagaagctatttaattgattcgaatgtttttatcccggttaattagagcaacgaaaattggtttgaatcgaaaagtttatcatttctaactcatttctcaaaattgttgataaattgcaaatatatttttccaaaagtctgttgacactttctgaaaataaattctatactcatgtattttccacttattagattttgcaggcttattgctgcatgttctttgacacttcttcaaaataacctatgccctttattcgttcaaaacagcatctttgttgtttcgctttggattgacaagcccgatgataaatagctcgagcgcaaaaagcgtgcatgtttggaaagtatcgttcataccaataattgagggtttatttttaaatgaaattttatgataaacattattatctcagaagctatttaattgattcgaatgtttttatcgcggttaattagagcaacgaaaattggtttgaatcgtgaagtttatcatttctaactcacttctcaaaattgttgataaattgcaaatatatttttccaaaagtctgtggacactttcttaaataaattctatactcatgtattttccacttattagataaggcagncttattnctgcatgttctttgncncttcttcaaagaagcctatgccctttattcgttcaaaacagcatctttgtt

SEQ ID NO: 43148 - DNA, 918 bp, Heterodera glycines
gtgcagaaattcacacgggccaaggacgagcagtactacaacaacttggcctatgtaacaattgtacaaataggcatatttgaagaaagctgtgtttacttaaggtggaaaaaccgcaaaaagatttccccggcttggagttggagccggtgcagctgaaggccggccaagtgtccaggtatcaaccggtgcacgagaagttggagacggtcgcgctgagagagttgaaagagaaggaggcaaagaaagaggcggagccgttgccggactgggccagcggagaggtgaagctgggcgagccggttggaaagtgagcgacggaagggatgacaaataaagaaatgcttaaaaatggcatttagaatctcacaaggtcccgagcctgagcgggagccgagcattccgcaccgggaccaggtgaagctgaagacggccaagccgaagccggccaccgaagcgccgccggtagagcacgtgaccattgaggaggaccgagcgaaaatggcctcaatccaacagggccccccaattgagcaagagccatttgtacggatggcatttagcaaataattaattagggtttattatttcgaaatcccatttgaaggtggcgcacaaagaccaagtgcagataaagcagcagttcaaaccgaaggaagtgaaagtgcacgagcagggcaaagtggagggcgcggacaaacagctcaaagacattccgccagtggtcaaagagtgggttttattacttaatggggcaaattcaattaaaacgaatgaaatgtttttcagagagttcgaacggagttcggtgccgaacaaagtgcgttttcatttgtcgatttttgaacatttcaattttttcgttggttttctttaccaatgatgcttttgcgattttaatttatgattcctggttta

SEQ ID NO: 43149 - DNA, 921 bp, Heterodera glycines
  unsure (1)..(921): unsure at all n locations
aaggcttgacagattgttttgctcgatcgtgggcattaaagagttgacggcccagcttttgtgggcacaacttcttggtggatgtttggtggtgcattgactggcttcgagtcaaagataataagcaataacagttctgtgatgaatgtctgggaatgtacagcacattgcaatattgtgcgtagctacgaggactactcctagtaaagatgcgttatcaaaccatcttgaatacgtccctgccctttttacacaccgcccgtcgctgctcagaactgagctatttcgtgattttcgtggacggttagtgtttcggcttcggctgtgacgcagactggaaacgagttgatcgcaatggcttgatctgggcaaaaaagtcgttgattttatggaaaagagagtggttggcggtaagggttccccgcatgtgaatgtgaattggattgacaggtctgtttagaaagtgccgcgagcaatgtgtacttcttccgttggatttggtatgccgcccagtgctgcacaagtgaaagccaactggtaggctgcttgtgtggtaatgggatggtggcggatcgccttgctttggtgggtttgctgtccggcggaggagacacgttcgtggtgcgaaagaaaagtgcgtccatgcgctcgtacgtgagtaccctgactgcgcagcaggcgaaagcgtatgcttgagtgttatggatggactcaatgttgaactagcgaggcaccaccacatgccccgtctggcgcttgcagacggtcagacccgttcgatgtggtctgacgctggtgatgatacattgttacatacggttcacagtatgtcccgtgaccctcaagtgccgcgagcaatgtgtactttctcccgnnttggatttggtatgcccgtccagtgctgcactagtgaaagccaac

SEQ ID NO: 43150 - DNA, 1033 bp, Heterodera glycines
  unsure (1)..(1033): unsure at all n locations
agatagagactcgatcccgagacagaaaatcgcgagaccgagacccaaaaaattcgagactagagacttttttcaaaaaaaattcctttttcgcttaaaaaccgattaaatttctatagttntaaaaaagcaattttttgaggcttttcataataaatttttggcttttttttaatttgattcaacgaaaaactttcatttctaagtactttcgcgccgtggtttttgagtcaattgggttccggncggtgccgaaaggcggccgcccgggaaaattaaaatttttgaatttttaatgaattttgttctgcccatggactgactaaagtcgtgggttcgattccatccgagttttaacgtttttcccgtttcttactgaatgctggattgactgagctgctctgatcactgattttaaatttatgattttttattatgaatacccgcaattcaattcatcgattgtttacgcaaaatgaatcaatggcattttttgatatttctttttgaatttcaatttcttaatttatttcaatttccttgtccaattaatttctcattctttctccagcaataaatgcttctcaattgagcagaagccctccgttgtccgcattgatcagtccctccccccggcaattctttcgcatcgacggagcagcagcagcgcaattcgcaccattcgggcagaaatgacacgattaattgtataatttcctcccctccctccgcccatttacgctccgacttccccccgccaagcgccggaaatggcaattaatcacagcgactgataggggagggggagggggtgattattttggtgggcagtgaattgggggaaacgccgcccagccaaagaaaagaaaactcgcaattcattcagcagcagcacccttttgactctttgggcggcaatcatttgataacttcttccatttgtttttgtttgttttttcattttcttttgccgggttttctccacaaaatgcacagtctctcctccatttccctctcgtgtgatcatttttta

SEQ ID NO: 43151 - DNA, 1191 bp, Heterodera glycines
  unsure (1)..(1191): unsure at all n locations
tttaaattaacatttgggtgcgtttcagagcagtttctcattaatatttatgaattaattttgctaaaaaaataaaatactgtagctttaaaaattaataaaaaattttaaattcagaattactggagttagcatcatagcagtgcttttccttgtctttttgatgctctcgcaaaatctggttcgcttctgatcagtttataaaaaaaaagttaagcctaaaatttttcgcatatttaaaaagcaattaaaaatttttagatttttattcatctccctttttgatagtgaaagcatctgagtgcctaaaataacttgtaaataaaatttggtgcgtttcagagcagtttgtgaaaaaatatttatgaattaattttgctaaaaaaataaaatagtgaagctttaaaaattaataaaaaattttaaattcagaattactggagttagcatcatagcagtgcttttccttgtctttttgatgccctcgcaaaatctggttcgcttctgatcagtttataaaaaaaaagttaagcctaaaatttttcgcatatttaaaaagcaattaaaaatttttagatttttattcatctccctttttgatagtgaaagcatctgagtgcctaaactaacctgtaaataaagttttgtgtgtttcagagcacgttctaaaaaatatttatgaattaattttgcaaaataataaataattaatgaaaaagtcagaatttcgaaaaattttaaaaacaacaagcgttggcattttttcaggttaagttagtcctttacaatggagaaggcctgcaaaatttggagagattatatcgattttagtgcgctaggttcgatgaaactttttaaaatataagcctaaactttttggcctgtttanaaaggaattaaaaatttttaaaaattttattcatctcccttttgatagaaaaagcatcagagagccttatttaactttaaattaacatttggtgcgtttcagagcagtttctgaaaaatatttatgaattaattttgctaaaaaaataaaatagtgaagctttnaaaattaataaaaaatttttaattcagaattactggnagtagcatcatagcagtgcttttccttgtcttttgatgctctcgcaaatctggttcgcttctgatcagtttataaaaacaaaagtaaagcctaaaaatttt

SEQ ID NO: 43152 - DNA, 675 bp, Heterodera glycines
gtggggttcggacggtgcgcaacatatacaacggcatgactggcacacccgtgggatgacacaatttaaactacttgcacaacatcccccttcatccttctggattgttatcttttaggcccacgacgatcggcctccccaaagtatgtgccttcaaatggggaagaggcctgatgagacaatgacgcctaacccctctgtgcaaagccgcactccgaacaagttaaactcacaatagagtctgttcggatcacgcctatttatagacgccccttcccccgacaacctcccatatctctttacgacgcacgatgaaatgctccctgaatgcgcattacaacagagctgaggccaactccgacaaaagacagcgccaaatttacaaacatatatcccaaactcacgcttaagcccaagcccacgccatactctaatctatacaagtgaacgagatgactataatggattcggaaccggcaaccatttcttgtcattttaacagcagatacaacaattacttgtatgcctcctaaatacattttttactgttgcacgcctcatgagacatcgccctggtttacgtttctataacatattaataggaaaattcctatgattctaagttatcgaatattcattattctatttatagctttgtttcgtcttccagataat

SEQ ID NO: 43153 - DNA, 1612 bp, Heterodera glycines
ctccccataattgtttgagtaccccaaacggacactcgtaaaaatcgatttttttgttttcggggcagtctccccgaaccgatgcgcccagatttatggggagaccgaatccttccggaatagcttccctatagcctgtactttaattctgcgttggatttttgctccccataattgtttgagtaccccaaacggacactcacttgaaaaaatcgatttttttgttttcggggcagtccccccgaaccgatgcgcccagatttatggggagaccgaatccttcgggaatagcttccctatagtctgtactttaattctgcgttggatttttgctccccataaatgtttgagtaccccaaacggacacttgaaaaaatcgatttttttgttttcggggcagtccccccgaaccgatgcgcccagatttatggggagaccgaatccttccggaatagcttccctatagcctgtactttaattctgcgttggatttttgctccccataattgtttgagtaccccaaacggacacttgaaaaaatcgatttatttttgttttcggggcagtccccccgaaccgatgcgcccagatttatggggagaccgaatccttcgggaatagcttccctatagcctgtactttaattctgcgttggatttttgctccccataattgtttgagtaccccaaacggacacttgaaaaaatcgatttttttgttttcggggcagtccccccgaaccgatgcgcccagatttatggggagaccgaatccttccggaatagcttccctatagcctgtactttattctgcggtggatttttgctccccataattgtttgagtaccccaaacggacacttgaaaaaatcgatttttttgttttacgaacagttttccccgaaccgatgcgcccaaatttatgggagaccgaatcctcccggatagcttcctatagcctgtactttaattctgctgtgggatttttgctccccataaaggtttaagtacccccaaacggacacttgaaaaaatttttatttccttttttaaaagggcccaaaaatttaaacttgggggggaaaggggaaaaactgggttcccccccccgaaaaaaattttaaaaaaaaattttaaaatattttgaggggggtccccccaagattcccccccaaaaatttttggggggtttttttttaaccccctcaaaaaaaagtggggggagtgaaaaaaaaaaaaaaaaaaaaaaaaaaaaaaaaaaaaaaaaaaaaatgtggggggggggggggggggggggggggaaaaaaaagggtggtttccccccccccccaaaaaaaaaaaaaaaaaaaaaaaaaaaaaaattaaataaaaaaaattttttattggggggggggcctccccccccaccccccccccccccccccccacaaaaaaaaaatgttgggggggggggcggcgtctctctctttttccccccccaccacacacacacacaaaaaaggggggggggggtggggggaagaaaaaaaagaaaaaaaaaaaaagaaaaaaaaaaaaaaataaaataatataaaataaaaaaaataaaaaaaaaaaaaataaaaaaaaaaaag

SEQ ID NO: 43154 - DNA, 939 bp, Heterodera glycines
  unsure (1)..(939): unsure at all n locations
aaagaaaaaataataatttttaaattgaaatatntttctcaggggaattgaacccacacgaaaaataatgaaaggcaaaaggttggtatagccactagaccacgcaaccacaagaaaaaatgctttaaaaaattaataataacttattttttttctcaaaatttctccttgtccgccgatttccttatctacctagtttcatccagacccctctcttattttgacccgaaacgcgaccaaaatcatcgggtcgggtttcgggtcgagaaaaatgtcgggtttcgggtaacccgcggcaaccctgctgtacatatcctttatcgcattttcgtgtcatttgtatctcatatcagctagaaccttttcgtgtaagcaccagagatggcacgcaattctgactttcgaaaaattttggtaaaaggtcggaaattttcggaaatttcactttttgaaaagaacgcaccgcgaaaattcccttccccaaaaatgttctaaaatagtttctgatgaaaatcagtgaataattttttcaagcaagaaccaaattttttaaaatttttggggcctcggaatgccatccctgatgctcctcccttatttgttaggcgcacatacaacagtagtttatcaaaaattttaaattgtgctcgttgggccttgagcaagccattggaaaaaactttttttctttgtcttattgattttatttggatttctcgataatgcaatttgagtagtgaattttttacgaagccgcaaatgtcgtgccgcaatttcccgctttggcttgcgccgcaaaacaaaaaaaaaatgggccgcaaatgcgggntaaccgctgttataaaaccacaaatcattcaccaatcggctcaattgtaaagaaatattattgggttaataagttcataatttgggcttacgagggataaccttgcctca

SEQ ID NO: 43155 - DNA, 188 bp, Heterodera glycines
tctagagtcaaaaaaaaaaaaaaccatttacagctcctaaatgtttacatggtcctctattggaaccattctctttttttcttgttgtttgttttgtttttttgagatggagttttgctctttgttgcccaggctggattgcaatagcacgatctccgctcactgcaacctccacctcccaggttcaa

SEQ ID NO: 43156 - DNA, 796 bp, Heterodera glycines
atttagggatagtattttgtcagggatttaggtcagatggggcatggctggtgtagtgcctctgccggtactaccatggctgtccggacttcccggagatttgtcctacgacgcggaattcgccccagcaggtgcgattggcatcataaaaagaattcgcattattctcccatgcctttaccatgtaattattaaaatttggttggctcttatcaccggaccaaagaggagtgaccgggacagccgggacttcccggtttaccgtgagaggtggacctgccgggcactcccgggacgccaggtcccgagggcccatccggtccaattggactgtttgacctccctggtgtgcgtgtatcttagtttctccgcgggacatttggactacccgtttcacgatgccgtgagctgggaagcaatatttttattacggattgctttttaagtgtattgcccatggccgctgcgatcgaccgtttatcgtcaactgaaataatgttagaatatatagatattttacagactttcattaagcgaatcttgctcaagatgaatctgtctcgacattatttatgatttgacatttaatgcttagggcgatatgatattattttgttgcatcaaattgctttcgattccattcatcattcattctctcctacataccccccagaacgcatataattattccatgacatctatttatcgcatatatgcatttgaagacgatcattgactcgatacactaattggctcgagtacaggaatcgtataggtatattatatttatcgctga

SEQ ID NO: 43157 - DNA, 1375 bp, Heterodera glycines
tttttttccttctctcaccccccccccctttctctctctctgtctctatctttctgtctatctctctccccctctctctctcttccttctctctcactttgtcttcctctcgatctcctatctttctcccctctctcttactccctgtcgctctgtgtcctctctttcctttctccctcttcctctctctcctctcactgtctccccttcatccctcttttattccgctttctcattgatttccctctcgctcgctctctctcttttcctctgttctctcctctctctctctctctttatcctcctcactctctttttcttttctctctctgcctcctttcctctcttatcccctcgccctctaactcacttttcctctcttctctcgctctcaatccctttttctcgcttctcaccccccccctctctctctctctcctcgctctctctctctctctctcctcgctctctctctctctcttccttctctctcactttgtcttcctctcgatgatttccctctcgctctctctctctcttgctctctctctatctctctcttatgcaacgtacgtagcaaggatagcacgaaaatccgatttccgaaattctgtaacaaaaaaagacagaaattttcaaaattttttttgaattttagcctttttgtacaatttcatctgaaataaaaaaggtgaacaaaataatccctttctcaaaaatgttctaaaacaatataaaataacatgaaaaaaggttttgctgaaaatcactgaattttttttcaacctgatataccaaaagcatttttgaaacatcttttacttggttaagaattttaaaatttcctattaaaatgtttaaaattttttgttatattttatatattttaaaaaatttccaacttaacttcagatttcctatgtttttgggatcggaattcgatttacgaaaaatttttgaccccaggaagtatggacttccaaaaatttttggggcccatccctgggtctttaaattttaaaagtcaaatcaatttttaatcccgaatccccaaaattaattcgagcaaaagtcgagtttaaatttacgaacctggcatttttcgtacaaaagggcttaaataatacattatttctttttggaaaaaaaaacgaaatttgaaaaatcgaattcatgttaaaattgatcaaattaaatggtaaactccttgttcaacatgccagaaaaatcccattggaaacatttttttgagtttttcaacttccaaaaaaatttgaaaaaaaaggagggtaaatttaaataatcccaaaattggtgagggaaaaaaattcaaaaaaaagcaaaaaaacaaaaatacccaaattttttaaaatgc

SEQ ID NO: 43158 - DNA, 1046 bp, Heterodera glycines
  unsure (1)..(1046): unsure at all n locations
atttcaaaatttcaattttttctagtctatctactcaaaacggttcagaattcgataaaaataacattcacggtgcgaaaaaaggggtttgaaaagtttattggggaaaaaaagactttacaaaataatacccctgggagaagggagtgggaaacatgatttcaaaattttcaattttttctagtctaatctactcaaaacggttcagaattcaataaaaataacattcacggtgcgaaaaatggggtttgaaaagtttattggggaaaaaaagactttacaaaataatacccctgggagaagggagtgggaaacatgatttcaaaattttcaatttttttagtctaatctactcaaaacggttcagaattcaataaaaataacattcacggtgcgaaaaatggggtttgacaagtttattggggaaaaaaagactttacaaaataatacccctgggagaagggagtgggaaacatgatttcaaaattttcaattttttatagtctaatctactcaaaccggttcagaattcaataaaaataacattcacggtgcgaaaaatggggtttgaaaagtttattttgaaaaaaagactttacaaaataatacccctgggagaagggagtgggaaacatgatttcaaaattttcaattttttctagtctaatctactcaaaacggttcagaatcaataaaaataacattcacggtgcgaaaaatggggtttgaaaagtttattggggaaaaaaagactttacaaaataatacccctgggagaagggagtgggaaacatgatttcaaaattttcaattttttctagtctaatctactcaaaacggttcagaattcgataaaaataacattcacggtgcgaaaaatggggtttgaaaagtttattggggaaaaaaagactttacaaaataatacccctgggagaagggagtgggaaacatgatttcaaaattttcaattttttctagtctaatctactcnnaaacngctcagaattcaataaaataaacattcacggtgcggaaaaaagggg

SEQ ID NO: 43159 - DNA, 941 bp, Heterodera glycines
cccttctttgtggactcgaatgcttgtctctgcaacggaacaataaaaaatgggggtaaatattaattatagtcccgaaatttcgaaatttgccacaaaaaaagattttaattgctgtaataaaaagaaaattaagaacgcgcttgccattttttatttaaataaaatcgtcgtgctgagtaatttcttaatttgcgccaaggggtaggaaaacaaacaaaaaaatgtaatcatttattttcataatttgactgaatttcaaccaaattaatttttcatggtaatatttaatagctcattgatcagatcttccaattataacaaataagttcggctaattacgttttaatgacttaaaaattttaaatgactataattctattatatatgtgcaaggcaaaagaggcagcatgaaaatgcttttaatgtttttcagaaaaaactaaattaaattttctttatagaatttgatttgaataatctattaaacattaaaaaatggataaagaataaaaaaatattggtactaaatccattttcactagtgactcagttatcataaccaaaaatgaaagaagaccacaattttgaatttggtgggctattatgattattaatttgacaaaccactgccaaatgactgccagcagcttcgaatgcaattaaaaggccaccatcatatttctcacgcaaatattcgggcaatgatttgccatttggacgatcatttgggctaaacaattctgtgacaccaaatttggcagctaaaagaaattttgaatttttatatttcatttgtttagaaaacagatttacgaacagcataaataaattccagaccaataattataaaaaaattgaaaaaaatatatattttagttttttgacatcattttccacataaattctaaagggattggtaaattattattattttttgg

SEQ ID NO: 43160 - DNA, 990 bp, Heterodera glycines
ctcatacgcaagcgcttttgtgaggtataaaatttctcataaaaagagatagacatttttctgggatagagtataaatttaaaaattccctcaaaaataaaaggtctattgcgcaccgccctccctatcatgctcgagagcatttgtatgtgtataaaatttatcaaaaaaagagatagccatttttctgggataacctctaaatataaaaatcctctgtgaaataaaatggcgattgtgcacagccctccgtctcatacgcaagcgcttttgtgaggtataaaatttctcaaaaaaaagagatagacatttttctgggatagagtataaatttaaaaattccctcaaaaataaaaggtctattgcgcaccgccctccctatcatgctcgagagcatttgtatgtgtataaaatttatcaaaaaaagagatagccatttttctgggataacctctaaatataaaaatcctctgtgaaataaaatggcgattgtgcacagccctccgtctcatacgcaagcgcttttgtgaggtataaaatttctcaaaaaaaagagatagacatttttctgggatagagtataaatttaaaaattccctcaaaaataaaaggtctattgcgcaccgccctccctatcatgctcgagagcatttgtatgtgtataaaatttatcaaaaaaagagatagccatttttctgggataacctctaaatataaaaatcctctgtgaaataaaatggcgattgtgcacagccctccgtctcatacgcaagcgcttttgtgaggtataaaatttctcaaaaaaagagatagacatttttctgggatagagtataaatttaaaaattccctcaaaaataaaaggtctattgcgcaccgccctccctatcatgctcgagagcatttgtatgtgtataaaatttatcaaaaaaagagatagccatttttcctggaataacctctaaatataaaaatcctctgtgaaataaa

SEQ ID NO: 43161 - DNA, 1019 bp, Heterodera glycines
  unsure (1)..(1019): unsure at all n locations
cgctcataattgggatgtataaaggcgattgtagaaggccttaaatgtgctaaaannggangaggagcaagaggagcggacttacgattttacttacaccatttttttctaggcttagaccacatgcgattttcggcactctgataattttagcgctcataatgggatgtataaaggcgattgtagaaggaattggaagcgctaaaattgtttgaggagctttttgagcgtaattacgatttttacttacaccatttttttctaggcttagatcacatgcgattttcggcactctgataattttagcgctcataatgggatgtataaaggcgattgtagaaggaattggaagcgctaaaattgtttgaggagctttttgagcgtaattacgattttacttacaccattttttgctaggcttagatcacatgcgattttcggcactctgataattttagcgctcataatgggatgtataaaggcgattgtagaaggaattggaagcgctaaaattgtttgaaaagctttttgagcgtaattacgattttacttacaccatttttttctaggcttagatcacatgcgattttcggcactctgataattttagcgctcataatgggatgtataaaggcgattgtagaaggaattggaagcgctaaaattgtttgaaaagctttttgagcgtaattacgattttacttacaccatttttttctaggcttagatcacatgcgattttcggcactctgataattttaacgctcataatgggatgtataaaggcgattgtagaaggaattggaagcgctaaaattgtttgaaaagctttttgagcgtaattacgattttacttacaccattttttgctaggcttagatcacatgcgattttcggcactctgataattttagcgctcataatgggatgtataaaggcgattgtagaaggaattggaagcgctaaaattgtttgaggagctttttgagcgtaattacgatttttacttacaccatttt

SEQ ID NO: 43162 - DNA, 829 bp, Heterodera glycines
ctgctcaacagtaataggaattccaaccgcattctcctcttttttacgccgatactaattgttctggaatttgtttctcgccgcgtttgtttgggaaaaatttggaaaattggctatctctttttatgctcaacagtaataggaattccaaccgcattctcagaataattacgccgatactaattgttctggaatttgtttctctgcgcgtttgtttgaggaaaaatttacgaaaattggctatctctttttctgctcaacagtaataggaattccaaccgcattctcagaataattacgccgatactaattgttctggaatttgtttctcgttgcgtttgtttgggaaaaatttggaaaattggctatctctttttctgctcaacagtaataggaattccaaccgcattctcagaataattacgccgatactaattgttctggaatttgtttctctgcgcgtttgtttggaaaaatttggaaaattggctatctctttttctgctcaacagtaataggaattccaaccgcattctcataataattacgccgatactaattggtctggaatttgtttctctcgcgtttgtttgggaaaaatttggaaaattggctatctctttttctgctcaacagaaataggaattccaaccgcattctcagaataattacgccgatactaattgttctggaatttgtttctcggcgcgattgttttggaaaatttggaaaattggctatctctttttctgctcaacagtaaaaggaattccaaccgcattctcagaataattacgccgatactaattgttctggaatttgtttctct

SEQ ID NO: 43163 - DNA, 926 bp, Heterodera glycines
  unsure (1)..(926): unsure at all n locations
ttgagggccgaagcattgcacattaaatagtcaatacaaagccaaactgacgggggaggagggaatttggttggataaaacacggcaaaatgagcggaagaagtgatcagacataaaggaagtgatcagacagtttgacagaaaaaaagagaatggaggtgatcggacagttagcaaacaattggcaaatttgccacttacattggcacagtgcgtaaccaaagccccaactttgagccacctgaacggacaaaagggtcggctcagaataacataattattgccatttagaattctcgtgtttttttgtctgttgtcatatttctttctcacttttggagtgtcttctattttttggtttattaaaaaaattttctgaaaagaacccaccgtatacaaagtcatcaacggaatggatacgatacctatgggggagaaaggacatttaatcactgaaaaacggacaattgaacattaccaactgtcagatcagcaacagccagggaaaagagaaagtagtttgagatggtctgcagttttttgtccacgcaaatggaaagctgaagtaatggaaaaaaataaatcatttttataaaattttaattgataaatttgggactttcccccgccccccccccgaggggatgaaaaaaaacagaggaaaacaagcaattcaattgtttaatattggaaattcaatcatccaactttaaaattgcattaattgccacaattttgaaaaaaagcattgttcgtgtgatgcccgtctccaaaacggtcctttctttaattaaaatttaattgtcaatagggattaattttagctgttcaattttttgcttcccttccttccgtccactgaccattacgagggcatttccggatgtcgtggccacggtgaaaacactccgatcannatgatcaaa

SEQ ID NO: 43164 - DNA, 821 bp, Heterodera glycines
ttttcggcagtcccattttcaaatttttcatttttattttttggcgtcattattttaacctcattttcagaatttttgtttgaaagaattgccttctccaaaaaatgtaccgtaatgtttacagtaggtgttactgtaatattcggagcttgggttatctttggcatttccgttactgaacttggtttaggcattgaaatttcacccttgaattttattttttgggttggttttacatttgattcgaaatttgtttttggtacttttggtaatttggtagtatgtgaaatggtatgattcgaaacagtaaactgtgttttgggttttactgtagttttgacttttggcagctgtgatttccattctttcaaaccccgaattttgtaaaattgttgcgttcgatttgcttgtaattgaaattgttccgtaaatttcattggtaccataatatcagtggccattgttgtttttaatttgacttcggtttttgtcttttgtgtggttgttaccaaatttcccattttggttgtttttgcaggtgctttggtttttgttttccgcatttcggttgtcaaattaatttctaacaccttttttggggtgttccaatttaattttttgggttgagacagtcgaatgaatttgtgggctttttgtggtactcaaaactgatggtctgatggttgttggtgtcgcgggtgtacttgcactgataattttcccttgtgataaatccgtactcccaaagtccgaataatttttatttttgaattttttcactttccattctgattggtttaattttggcttccttttttgac

SEQ ID NO: 43165 - DNA, 1225 bp, Heterodera glycines
  unsure (1)..(1225): unsure at all n locations
aaaaaattaactattcacgcttgagaacgcgaagtttgctgcggagaatggcaattatatgcagaaagtcaagtgcatatatctcagcgcctagtgcatgaataggagcgtttttactgttttctgagagcgcctgaaagcagctttcgaatggtatagctgatttttttggatctggaattttcgcagagatatatgcaaattagtaaccagtgtttcgtttcaaattatttctcgtattctaacgaaataattttttactatgagtgtttggtttggaaactgtctaaaatgttccgggtcgcccacattgcacaattttcttgaaaataccatgaaaatgctctaactccaagagacttagttgagcgcactgcaaggagaaccctaacacagttcagcacaaaaaaattaactattcacgcttgagaacgcgaagtttgctgcggagaatggcaattatatgcagaaagtcaagtgcatatatctcagcgcctagtgcatgaataggagcgtttttactgttttctgagagcgcctgaaagcagctttcgaatggtatagctgatttttttggatctggaattttcgcagagatatatgcaaattagtaaccagtgtttcgtttcaaattatttctcgtattctaacgaaataattttttactatgagtgtttggtttggaaactgtctaaaatgttccgggtcgcccacattgcacaattttcttgaaaataccatgaaaaatgctctaactccaagagacttagttgagcgcactgcaaggagaaccctaacacagttcagcacaaaaaaattaactattcacgcttgagaacgcgaagtttgctgcggagaatggcaattatatgcagaaagtcaagtgcatatatctcagcgcctagtgcatgaataggagcgtttttactgttttctgagagcgcctgaaagcagctttcgaatggtatagctgatttttttggatctggaattttcgcagagatatatgcaaattagtaaccagtgtttcgtttcaaattatttctcgtattctaacgaaataattttttactatgagtgtttggtttggaaactgtctaaaatggttccgggtcgcccacattgcacaattttcttgaaaataccatgaaaaatgctctaactnctcagagacttagtgagcgcactgcaaggagaaccctancacagttcagcacaaaaaaat

SEQ ID NO: 43166 - DNA, 1014 bp, Heterodera glycines
agatttatggggataccgcatcattcgggaataacttccctatagcctgtactttaattctgcgttggatttttgctcgccataattgtttgagtaccccaaacggacacttgaaaaaatcgatttttttgttttcggggcagtccccccgaaccgatgcgcccagatttatggggagaccgaatccttcgggagtagcttccctatagcctgtactttaattctgcgttggatttttgctccccataaatgtttgagtaccccaaacggacacttgaaaaaatcgatttttttgttttaggggcagtccccccgaaccgatgcgcccagatttatggggagaccgaatccttcgggaatagcttccctatagcctgtactttaattctgcgttggatttttgctccccataattgtttgagtaccccaaacggacacttgaaaaaatcgattttttgttttcggggcagtccccccgaaccgatgcgcccagatttatggggagttagtgaaaattcgatcactcatattttttgctaattgagcagaagcgtaccaaactttgcagggatactccccggtaaaggactaacttacactgaaatgagcgccgagctagctggctcaaaaaaattttcgaaaatctgagtctttcgtttttatttattttttgcaaaattaattcttaaatattttttcagaaagggttctgaaacgcaccaaattttatttacatgttagtttaggcactctgatgctttttctatcaaaaagggagatgaataaaatttttaaaaatttttaattcctttttaaacaggccaaaaagtttaggcttaacttttttttcagaaactgatcagaagcgcaccaaactttgcagggatactgaaaggaaaagaattaacctgttttatcacattagcttgtcatcagtttttataaaaaattttcaaaattctgagtctcctattatttttttttttttcaaaattttgaagggcgggggggggg

SEQ ID NO: 43167 - DNA, 938 bp, Heterodera glycines
taagagctgtggaaattgtgaattaattctcagatcttcctggatctctttttaggacaattttctatctcgtaacctttatgctaatccgttccggagagcctcttcaaaattttttccattaccataagagctgcggaaattgtgaattaattctcagaaaaatggctatctctttttaggacaattttctatctcgtaaccccgatgctaatccgttccggagagcctcttcaaaattttttccattaccgcaagagctgcggaaattgtgaattaattctcagaaaaatggctctctttttaggacaattttctatctcgtaaccccgatgctaatccgttccggagagcctcttcaaaattttttcctttaccctaaaagctggggaaattgtgaattaattctcagaaaaatgggtatctctttttaggacaattttctatctcgtaacccccatggtaatccgttccggagagcctcttcaaaatttttcccttaccctaaaaactgcggaaattgggaattaattctcaaaaaaatgggtatctctttttaggacaattttctatctcgtaaccccgatggtaatccggtccggagagcctcttcaaaattttttccattaccgtaagagctgcggaaattgggaattaattctcaaaaaaatggctatctctttttaggacaattttctatctcgtaaccccgatgctaatccgttccggagagcctcttcaaaattttttcctttcccgcaaaagcgggggaaattgggaattatttcccaaaaaaagggtatttccttttaaggaaaatttctattcccgaacccccaaggtaaacccgtccccaaaagcccctccaaaatttttcccttaccccaagaagtggggaaattgggaaattattttcaaaaaaaagggttttccttttt

SEQ ID NO: 43168 - DNA, 989 bp, Heterodera glycines
  unsure (1)..(989): unsure at all n locations
cccccccctcccccgcccctcagagcacgacaaatatttcaacaaaaatttgaaaatcatgtttcccactcccttctcncaggggtattattttgtaaagtctttttttccccaataaacttgtcaaaccccatttttcgcaccgtgaatgttatttttattgacccccgcaccgttttgagtagatgagacgataaaaaattgaaaattttgaaatcatgtttcccactcccttctcccaggggtattattttgtaaagtctttttttccacaataaacttttcaaaccccatttttcgcaccgtgaatgttatttttattgaattctgaaccgttttgagtagattagactataaaaaattgaaaattttgaaatcatgtttcccactcccttctcccaggggtattattttgtaaagtctttttttcaacaataaacttgtcaaaccccatttttcgcaccgtgaatgttatttttattgaattctgaaccggtttgagtagattagactagaaaaaattgaaaattttgaaatcatgtttcccactcccttctcccaggggtattattttgtaaagtctttttttccccaataaacttgtcaaaccccatttttcgcaccgtgaatgttatttttattgaattctgaaccgttttgagtagattagactagaaaaaattgaaaattttgaaatcatgtttcccactcccttctcccaggggtattattttgtaaagtctttttttccccaataaacttttcaaaccccatttttcgcaccgtgaatgttatttttatcgaattctgaaccgttttgagtagattagactagaaaaaattgaaaattttgaaatcatgtttcccactcccttctcccaggggtattattttgtaaagtctttttttcccccaataaacttttcaaaccccatttttcgcaccgtgaatgttatttttatcgaattctgaaccgttttgagtagatt

SEQ ID NO: 43169 - DNA, 1131 bp, Heterodera glycines
gcgactaatcccacgcattggccaaggcagaggtaccttttatgatgaattgttcgatcagtggtccttttgtttctctctaactttgtgatcaattgtccgggcattagttcttttgtccctcttcagctgtaattaattaattaattatgtcctccgcccgctcactttgtccttttcttcctccctttcgcttattttctcctctccaataatgtcgacaatgtcggagagggaaaaagaagcgcaaatggaagagaagcaaagggaagaaaggccaaaggaaacggagaaaaacggcgccggaggcaatccattggaacgcatcgaacgactgctcacttgcccaatttgtttggacaggtcaaatggggggggggggttaataagtgtgtaggtcttttgaaaaaacaatgcttttagtgatattctcggaagtgtcgactccgagtcgagaaaagtttggctttctcgattctctgggcccactccgattttgggcttactttttgttcaaattttgtttctttctcttccactctctttcattagcttcttcttttcttccttgttaaagttcagctccttttcaggtacaaacagccaaagcttctcttctgccaacacactttttggtggcttttcccttcttttctctctctctctctctgtctctctctctgtctctcaccgtttccttctcttccctcccctttcctttagtctttcttgcttggaaagttacgtcgaatcgtccgccattgctcggccccgaattcgttgccccgaatgccgtggcgaaaccggtagtaaacataattcattaacaaattcttgggcatcgtttgttttgtgtttctttagcattgtcagacggagggaatgtgcaaagtttgccgacgaatttgacacttttggcattttcggaaattcatttggaagcgagcgatgtgaatgcagcagaaatacaagggtatgttcagaggtaggacaaaggagcagcagaagcagcagccaaaccaccacattggcatttccactagattcaacttggaaaaggggcgagttcggaagaaaagaccgagtggaacttagtggagattgcgagcgcaaatgttgcggggaataccg

SEQ ID NO: 43170 - DNA, 1647 bp, Heterodera glycines
ccataccacttgcataaatttactgtcattttatgacagccaaaaataattctattgtgcatttgctgctaattatttcatgcaaagagcgataaaatattttcaagaatcttttgcattcgacaccgttgaacagttgtatgcgcattttaaagaagagattttgagctcccccggtgaatattacccaaaccctctttgtgtgcttgattgtgtacacattgtcaacgacgaacacgctgatttgccggtgttcattgaaggaacgcttgatttgatcgcaggactagtactgtattccacatgttatccgaggacggaagcagggacaatcaaatggtaagcgagcagagaaatcaaaattcctagataaaaaaacatttttaatttaggagcgaagtcttgtacgtggagttgaaggacatgatgatttgtcgaggcgaatcggctcgctgtcgctgcgcacaatccatcaacaacaacctgtcacactaccagcttatcgtggacgaactggaccgttggctgatggacaacaaccaactcaatcggcgggacgtcgtcgaacaagaagaagaggaaaacgtcgaccactcaacctggtgaaggcactgtgtcgtttcaacgggggctgcatgccatcagttttgccgcagatgattcagaggagaagaatggaaaatttgggttttcttcgtgatctcaggctgcaaacagtgcatctgaagaataacattatgatttccgccaattcattttcatttcatagtgccggcagtttgcttgcctaccgtggctatttgtccataacggtagagcagcacttgtacgttcgccaccgcgttcgtcttagatttcccttcctgccctgtgttgcgcagtatgggggaaatcaccatcattattattttccattagaactgcttgaaatatgttcacgtccaactgacgaatcctcctaatctactcatcttccgaaacttttattgttagttattgtgaaaaataaatgtttgttaacaaaagtgctgattttagatgcttattttagggtgagcacttttcctctattccaactttcttccctcctgtgcgttattctggactatttagtttgccgccgcctcctcctcatcatcgccgctatcgtcatcagtgacttcggcttcagactcagttgaagaactctgggccacttctcgatgagagtccatagctatttttttaattttgtaataatcatcatcatcatcatcatcatcatcatctgattaccattggaacaatgcgcggcctccaaatcacgaaccttttcctcagaacgttcaaccctacaaaaaaaaaattggttgatcgtgtcaacgcagtttatttttgctaatacttttttagtatggtgtccaatgagtcttccccaaaatcgaccacgtctgaggcattgtcgtccacacccatttcttcctccagtttggagtatttttttcgagcgcatccagcctattttttgttaggagacatatctatgtttttagactttcaatttaccattcggcacgtgattcgccttgtgccttcatcattgtgcccagcatttgagtagcggacccatcaacgaatgacgtcgttttccgctataccactgctcgt

SEQ ID NO: 43171 - DNA, 1303 bp, Heterodera glycines
cccccccccccccccttcagagcacgacaaatatttcaacaaaaatttttaaaaattgactagagcaattgaacgctaacggacgacctaatggaaaaaaatccccgaaggagagaatttaattaaatccattccttcgggggaccgtgccgggtgccgcggggtaagcagtgctggttcgtttcatcacggcaccgaaccttttggctagtcagcaatcgttgcttaacttgccagatcggacgggtgcgcatgattccactgttccaagcaccccaccaaaagcaaaacgatataaccaaaatataaggaaaaattttttaaaaaattttttctccatcttcctttttgatactaaagcatcagagtgctaaaattaagttgtaaataaaatttggtgcgctttagagcactttctgaaaaaaatatttatgaaacaaaaaaatcgattttttcaagtgtccgtttggggtactcaaacatttatggggagcaaaatccaacgcagaattaaagtacaggctatagggaagctattcccgaaggattcggtctccccataaatctgggcgcatcggttcggggggactgccccgaaaacaaaaaaatcgattttttcaagtgtccgtttggggtactcaaacaattatggggagcaaaaatccaaggtaaaaataaagtagaggtatagggaagctattcccgaaggattcggactccttataaatctgggcgcatcggttcagggggactgccccgaaaacccaaaaaaaaattttttggataaaaattatttaaatgaactgactagataatatttaaaataggttatttctcttcctttcagtatccctgcaaagtttggtgcgcttctgatcagtttctgaaaaaaaagttaagcctaaactttttggcctgtttaaaaaggaattaaaaatttttaaaaattttattcatctccctttttgatagaaaaagcatcagagtgcctaaactaacatgtaaataaaatttggtgcgtttcagaaccctttctgaaaaaatatttaagaattaattttgcaaaaaataaataaaaacgaaagactcagattttcgaaaatttttttgagccagctagctcggcgctcatttcagtgtaagttagtcctttaccggggagtatccctgcaaagtttggtacgcttctgctcaattagcaaaaaatatgagtgatcgaatttacactaaaaaagttaagcctacattttttggcatatttaaaaagcaattaaaaaatttttaaaatttaataattttcctg

SEQ ID NO: 43172 - DNA, 1343 bp, Heterodera glycines
  unsure (1)..(1343): unsure at all n locations
atttttcctcgcctctctttcgaaaagaaaagctattagcaagcgtgtttggaccaattctaaaacaaatcggggtaataatttaatctgactttataagataaatgggaatntaagcgaaggattcatgcaaaataataatctatagaaattctcaaaaaagtagttcctcgcagattcggggaccgtttctataaagctagagacatatgcgctaaccataaaaaagatgaatcattttttgaaaaatttatatagttcgactaaatttgctaatcgatttatggtgtacaggatgtttgtcgaaacataactcgtcaggcctttaagatagacctgccattgctattcctgcaaatatggagtctagtcagcccaatcgattgctattcgaatggtttggggtcgttggcccaaacaaaagttgtgctacttcttgcaaagaagactaagccaattgtaaacagcaagccatccaaatgcttcaatgtaaaaaaaaattacatttggatgcaacctttatttttcctcgcctctcttttcgaaaagaaaagctattagcaagcgtatttggaccaattctaaaacaaatcggagtaattaatttaatctgactttataagataaatgggaatttaagcgaaggattcatgcaaaataataatctatagaaattctctaaaaagtagttcctcgcagattcggggaccgtttctataaagctagagacatatgcgctaaccataaaaaagatgaatcattttttgaaaaatttatatagttcgactaaatttgcaaatcgatttatggtgtacaggatgtttgtcgaaacataactcgtcaggcctttaagatagacctgccattgctattcctgcaaatatggagtctagtcagcccaatcgattgctattcgaatggtttggggtcgttggcccaaacaaaagttgtgctacttcttgcaaagaagacttagccaactgtaaacagcaagccatccaaatgcttcaatgtaaaaaaaaattacatttggatgcaacctttatttttcctcgcctctcttttcgaaaagaaaagctattagcaagcgtatttggaccaattctaaaacaaatcggagtaattaatttaatctgactttataagataaatgggaatttaagcgaaggattcatgcagaataataatctatagaaattatcaaaaaagtagttcctcgcagattcggagaccgtttctataaagctagagacatatgcgctaaccataaaaaagatgaatcattttttgaaaaatttatatagttcgactaaatttgaaaatcgatttatggtgtacaggat

SEQ ID NO: 43173 - DNA, 1456 bp, Heterodera glycines
  unsure (1)..(1456): unsure at all n locations
aattaattatgcccttctaaaagagtcacactcattacgtccctgtaattagccatttatttcggcgtcctgannccaggacacgaagctcattaaccattttgtcatggttttccanagtctttcntcctgtccttgctttttgacgtccttgaacaaggacatgaagccgattaaccatttttcatgattttttccacgtcttaatcctgtcattggcctttccattttcatttcccaaaaaattggctacaaaaatgccaaaacgggttaaaattcgggactgataccgaatccgtgcgcgggcttttccgtttccgtgtccgagttgcgcgggtgatcatgtccaaaacggccaattgcatccggttcagcttttccgatgtttgggatttcgttttcatcggttggggcatggttgggcatgaacagttcaggcttggtggcgtaaacaaaaaacaatacgaagaaggcacataccatgaagagaaccggacggcacattatgccgaacattctgaaaggcaacaaaatctcttaattagccataagtgtaaaaagcttggcaatgatatcgtccaaagcacacactaattaattaagctaatcgtttttaattacccatgggtgttaagctaattccactcgttccccagtgtaagagtcattaagccacggggctaagtaatgtcttaattagtcattgccatcagtgtaagctaattggcccgaggtttggtattgagatcggttccccagtgtaagagtcattaagccacggggctaatgtaatgtcttaattagtcattgccatcagtgtaagctaattggcccgaggtttggcattgagatcggttccccagtgtaagagtcattaagccacagggctaatgtaatgttttaattagtcattgccatcagtgtaagctaattggctcgaggtttgacattgagatcgtacgtacaacacactaattttcacacgctattcaactaatcgtttttattacccacaggtgttaagctaattgtacttgttccccaattaaggatcattaagccacagggctaattgccttaagctgacaattttattcttcctaattaatgtctttgtgttcaggccagtactaatggagctcaattagcggacttgaccgacccggagtcgtgctaattagattgtaacttccctctaatgaccgactaatcccatttagtgtccttaggaacttggctctatcagagaactaacttaattcttatcctaatttattttatttattaagaatatttatttagaaaatttatttcatttgaaaacaaatgattgaatgaatgaatgaattctgcggttgttcggctaacattggcaaggggcggagctttgcctctggaaaagcagcagccaatcagagccaaacacaacgaattagcccaaccccccacagaaaat

SEQ ID NO: 43174 - DNA, 1215 bp, Heterodera glycines
cctggagagtcgggttggctgccctcgtgtttcgctgatttaacgccacgcttgttgccacttgggatgccgagagctgtgatgcgagctgttctggtcggatgcctcttccatcttgtcgtggtgctgacaatgtcgtcgtattgctccttggcaattccgaagttctgttcggacatgacgatgcgtgtgccatcgcaggcgatgagttctggcgcatttttggcgaaagttaatgccttttggtgatcttcggagatccaagtggctactgtttctccataagctgcggtaaattttccgctgatgatttccgctcgatcgtagtcgcatgtttggcattcgttgccattgcaggttgatttccaaatcagggttgagttgtcgggcagttggcagaattcggttgcgtattgacagttctgaatttggtggactggcgaaaacatctgcagattgtgccgttttacgaaaagtgttgctggttgagcaaagcagtttgtcgccgtgctgatttgttcgcctttgaaaagtccggcgattggtccagggaagttgacttccaattcgtcattcgttgaccacaattgtgcttcgtgattcgtcatttcagacttggcgaatgggcattcctggtgaatggccatttgtttgcagatccgcttgttgaccggtggaaattccttctcaatggtgacgaacttatcggccaacaaatttgtataataacgttcactggtacgtttgatggagcaatgccatgcgaatgcgatttgctctggcttgatgacttttgcgaagagctcaattgccagattgtgccattgagcagtgagtgttggcgggggacggcagaaaggtgaattttccgtgcccttgagttcccaaatcgtactgcccctgtcggaacaccagaaaacgtccgctccgtcacggttcgttcccaagtctctttttgctgattttgccgatttgatcgtgccgggaggtgtcgttgcatccgtttgttggcttcttgctttcgtgacgtattggattcgggttcgtcttgtcgtccaagttgatgcgctgcttgacatcgttggagtccatctttgcttggtagtcgtcatcggtgcccatcttgttgttgtccatggatttgtcttcgtggttgtcgtggttgtcatcttttcaaaaggagttattgtgctgtaccacgacgaagttactggt

SEQ ID NO: 43175 - DNA, 1679 bp, Heterodera glycines
ttaatatatagccaaaatttcaaaaaaatttcccagcggcgcctatcggcaccgccggatccttaaaatccttaattttcttaaaaaacttgctcaatttgcaaaaaatggtcatttttgaacagaatctaacaatgtattgtattaaaattttcaatttttttcccggcggcgcctaccggcaccgccggcctccctcctcctccttggtcaccaaaaagttttttcgagaaatacaccgcaaaaaattttgtaaaattaataaagggagtcaaaaatataaagttaataaatgttttgttcgaattaattataaaaaataatttatttaagcaattcgaaaaaattttctgatttttgactcaaaaataagatttttttatttcaaatttctcctttataaatttttctatatatttttaatttaataaattgattgtcctttaaatttgtgcattaaaaatatttttgtgagtttttaattaaattttcgaattactcccgctcccgcccgggactcccgttaaaaatggacgggattttaacgggagcgggatttttacgggaatcccgttcgggactcccgtcccggaaaattttgaactcccgatcccgctcccgctcccagaaatttttttttaccggactctaatcaaaatcacggaaaaattgaaaaaatccgtgagccgtgatccgtgatcatggcacccaaaaacccccgtgattcccggtatttgtattaaaattgtaaaacacaaacttttagtgggtattttccggtatttgtattacaattgtaaaacacaaactaaaaatgtgtatttttcggtatttgtattataattgtaaaacacaaactaaaaatgtgcattttccgctatttgcattaaaattgtaaaacacaaactaaaagtgggtattttccggtatttgtattacaattgtaaaacacaaactaaaaatgtgcattttccgctatttgcattaaaattgtaaaacacaaactaaaagtgggtattttccggtattttattacaattgtaaaacacaaactaaaagtgggtattttccggtatttgtattacaattgtaaaacacaagctaaaagtgggtattttccggtatttgtattacaattgtaaaacacaaactaaaaatgtgcattttccggtatttgcattaaaattgtaaaacacaaactaaaagtgggtatttttcagtatttgtattacaattgtaagaaactaaaaatgtgcatttttcagtatttgtattacaattgtaagaaactaaaaatgtgtatttttcggtatttgtattacaattgtaaaacacaaactaaaaatgtgcattttccgctatttgcattaaaattgtaaaacacaaactaaaagtgggtattttccggtattttattacaattgtaaaacacaaactaaaagtgggtattttccggtatttgtattacaattgtaaaacaccaactaaaaatgtgcattttccgctatttacattaaaattgtaaaacacaaactaaaaatgtgtatttttcggtatttgtattacaattgtaaaacacaaactaaaaatgtgcattttccggtatttgtattacaattgtaaaacacaaactaagaatttgtattttcccgtatttgtattacaattgtaaaacacaa

SEQ ID NO: 43176 - DNA, 1608 bp, Heterodera glycines
  unsure (1)..(1608): unsure at all n locations
actttcgcaatgcattgttagcaaacncggagtaagttacaattttccaacatttgcccagcagttgcatcattacgttgtagcgatggacgttttctttaaaaagcttacattaaatgaaaactccaaaaaatgcaaaaattagatgctcgtaattcaaatttgcgaatccggttgcagaattagggtttaatttttataattttttttgttgctggactgactccgtccatcgacggttaaaaaaaaacggtaaaagttgccaataaattattggcgtaataaacaaaatgccaacaaacaaacgtttcttttttttccactttcactctcactttggcgtactatctcttcatttttgataatgtaaaaacaacatttacttttctatgggtagcttcttttccctatgttaaaccttcaccaaattttgcatatcgaactctagaaaaaaaaaactgttttagctgtattgtaaagaacttagggggcgttaactcttgaattgtaatttgctcacagctaagacacatagtatgcatttgaatgcattggcattttgtatattacgtcaatgatttattggcaattttttccgttttttaccgtccatgagtcggattaatccattttcgtccattttatattttaattcattattttaatccaattatttttatgtccacctttgtttgtcgttcgccttttcagggcagttccattttgtttttctttccaaaaataaattgtcccaattttcttccgtttctccaacttccgtctgcagcgacttttgtttatccgcttctttttcttcttctgcttcttttctttctttcaaaatctctgttgttggcgagccttaagaaaatgttaatttggatttgtgtttaattagttgttaaattagaagtttttctaactgaaaaaagattaaaaaaatagaaattaaaaattttcgttggtcaataatctacaggatgtaaataggataatctagcattatcccaaagtcaagctatatagtcctaaggaattgacaaaaagatatgactgtataacatttacatactcatccgtaaatacaaaaaaaaatctttttaaaaaagaattttaaaaatatttattttgaaaaaatctaaatttaaaattattattaaggatattgtccttaggattagccaagaacggagagccctgtcctgcactgcccttggcgatgattacttgatgagctcgcatgcttttcagtgttagttgtctcattttcgtctgatgagctgctgccgccataaaatgactttctaaactgagaaaatatcgcagcaggcgacggaaaaatgcccaaaattccctttcttccttcagctccatcgtcactttgcgcctctgcaaaacaaattctaattgtttgatttgttacttttgatggaatgccatcgcaaaaaaacactcaaaagattggctcatgggcttaaaatccggtaaaaacccgtcaaagcttcccccgccttcccgaaaataaaatttaagcttttttccaattacatattcagagggctaaacaaataaattttttttacaaatttttaataattttttttacta

SEQ ID NO: 43177 - DNA, 564 bp, Heterodera glycines
  unsure (1)..(564): unsure at all n locations
aatcgaagaaaaaaatttttaatttgaaaattatgttaataattatggaaaaaagtcgatttttagggggtgtatttttcaattttcttgtatttttattgcaatttttctcaaaaatgccaaaatatgtgcaaaatatgtgccaaaccccaaaatatgtgctaacatattttatgtgacaaaacgccaaaatatgtgtttttatgtttttataagtcgctctaaatcaaaaattgttcggagataatgctatttttgggcttctctcgccataactaagccgcaaaaaaaatatgttaaaacataaaaatccgggccctattaatcactacactatgggcggaccagncggtttttcgcgtgggccgttttcgcgtggagcgagtttttgaactataacttttttatttgtcaaccaaatctaactttcttgatatcattcgatagcccttagtgtcctctattatcttgtaaaaattgcgaaaaatttcgtcaaggttcaaaaaagttatggccaaaaattttcgaaaatctggttttttgaattcttctaatcatatcttt

SEQ ID NO: 43178 - DNA, 1094 bp, Heterodera glycines
aattgcctaattaattaatttattgccctttcgtctctctttgcccatttttcaatgaaatttcgttccctcgcactttctcttcgcgtgttccaccttcggcgccaacatcaacagcatcagcagggagcgaatgaggtgggttaattagggttaattggggataatgaggtgaggatgggcggattggggcgggttttatcatattaaagacagttaaataattgaacctaaatgcgaaccaatgagcacaagcacttttatctctaagtaaagttttggattccgagtcgggatctcttctcgaaccatttcatcaaatttttgaaaaaaatttgcctatcaaaacaaaatgataagaaaatgctgtcgccgaataaactaaatttgcaacgaaataatgttttacattcgcatttttttaaattttccttttttggcctttgacttattgtataatctttcatagaaatggcataaatgagaaattttctgcgatgaaattgggccaattttagcacagaaggcgaaggacgggcggaaaattccccggaaattgttgccggagggagggggggggggggggggaaattgtggcaaattttaacccttggatggaattttatgcatctatttaatgtttttatatccggatttcgttgattcttcttttaacgatatatttatatgttcaacaaatttccaaagagcaaaaagtgccaaaatcgcatcttacgccccaaaaatcattagaaaaacataaaaaggaggcaaaaaagctcaaattagttgaagtctggcaaatctatgtcaaattctttttcttttcctcgggaattgttttttcgtttttaaattaaaattatttggcatttccaaatttggcatttcattcctcgaatttcacagcaattttggtctttttcattggaaaattacacctcgaagcgctaaaagatttgtttgagattggtttctctgccctccggcactttgccattcgctgcctttgtcctcccttttttttacccttcgtttgccttttcagcagaaaaagtctgtttgcttagcaggcatattttgcattaaagtgc

SEQ ID NO: 43179 - DNA, 1145 bp, Heterodera glycines
  unsure (1)..(1145): unsure at all n locations
cattttttggcgacataaaaaaatttcaaaaatttttcactaaaaaatcagtcgaaaaacaatccccccgtctccatttatcccaccgtatctaataatccccccccctttctaaggaggttgaacaataatccccccggggtgataattggagataatacggtactcacatgaccatgattttcaaccaaaacaggggattaaaccttgattttaaattcattttttaattttatttatttattttttacaaaaaaaaccttaaaaaccaaaaaagtgattccattaaactgtaaccaatgaatagaagtttagtcgtgttataagcttttattttttgcattgcacatcgttttttttcattttacatatatttatttggctttttcaaaagttttagtattttcagaaataaatatatttttaatgaattaatatttattgttttaggtcactcaatggcacatcaaattaccttttggcacttttctcctttttcgaaattcttcaccaatttggccattttctgttcgtttacatcgcattttatggacaaaatttaattgagtatcgtttggcagcaaagattgtatttatctcatcacttggttatggtaattttaaaaattttaaattttataaattatttggcaggtgcaatttatatttcaatgcttttcactggcgttgaccgactaattgtaataatttttgacgaaatgtatgcaattattgcttattaaaataaataaattaatttaatttaaatttataggaacaataagcataaaattcgtttgtatttggcaactgtcacaattatgtctgctttctgcggttgcatttctactgtttcactgtaccaagatgcacaattgcatggtgatttgatgatcaccggttgcactgtcgatttttttatggtttaattataaatttaaattaataattattttagtttacgccaatcttccgtatcattatttgtttgttgatcaatattatcactttaatcatttatatggttgttggaatggtgttcaaatttaaatctgccggttgcttaatgcttaattacactattcaaattttaattacccactaaatttaggtttacccacggnctgatgtgtatttactacaac

SEQ ID NO: 43180 - DNA, 960 bp, Heterodera glycines
ataactcgttttagaagaagaaaaaaagctattttttgagaaaaccgaccaaaaaccaaatttccattttttggaaaattttctggtctttggtgtcaaaacggccaattaactaatggggaccgttctaatagggtttttggaaaaatgccagaatatggacataaaacatggacttaaatccaaaatatggaatggaaatgtgtggtccaggaaaaaatggatttccatatttttggatgcctttttagggcatattttatgccaccatttttggcatggggttttgagggtcgctgatcaccaatatgacattcttttcgaccaatttcgaatcccgaagccgagttcgaacaaaaagtcgaaaattcaaaaattctcgattttcagatttatgttcaaactttgtttaaacacacgaatatcatcagtgcttcagtaaaaggtcatctaaaccattcttagactaaaaaagaaaatcgaaaaattttgagttttcgattttttgttcgaactcgggtccggaattcggaatcggtcgaaaagaatctcatattcgtgatcagcaaccctctttccacaattggtaaacattatttcgtttttgtctcgtcttcaattttgtgcggaaaaaaattagcagaaaaaaagaaaaccgagaaaaacaaggaaataatttgcggaagcaaaagggaagggaaaagtgagcgaatgaaagaaaatggaagaaaggagggcttttatagcaaggcgtcgaatacgaatgaccgtttaggtaataaaatcgtttaaaaattggcaaaaaaattattttaatgtaaaagtctatgctcttccgccagagcggtaatcgttttggtgccgccgttttggcgacagggtcgttttggcgccaagacaaaattaaaaaattgtgaatccaagatcgattccaatttttaaaaattataacttttcata

SEQ ID NO: 43181 - DNA, 1679 bp, Heterodera glycines
  unsure (1)..(1679): unsure at all n locations
tctctatcaatttttcttggccttcttggttgcaatcccttcaacatcatttttttcttttggcacatcactgtcatcattccctgggcacttcttgaacaaattgacaatccaatcaaatccagtgtacgtctgattgttcgcctagggcgtggtttgtcaaatacataataaatagcaacaaaaaaccttaatgttaactttcgcaattatcttcacagcaatcaaatcgtccaagtgtttcgcaaggctttccggctccttctccttggctagcaattcggcagctttcattcccaaaaactcttcagcaacactcgaaaacatggtgacacgttgagcaatgtctgcttgttcaacatcctgcagcagaagacgaacaaacaccgtgtggatgggagcaatcgctttttggccgcacgcctcacacatgttatcatcggacaattttcggcggcaaatgagccccttggaacgaaatgggcatgcctaaactagaaaaaattaataatttaattaattaatttaatttggactttgtaaacacggtactgcatatttgtcacttttcccaaaacataaaaaacgccggccgaattgaagttgaccacatcgctgatgtgtttcggttcaactgaatccaactcctcttgctgtcgtgtcccttgctccgggagttgaaagcgtttaagagaattcattgcaggaagaacagaaaaaacgaatgtggatggaattttttttaaatggacgaatgatttttttatgtagaaaaactgtgattaaatagaaaaaaaatggggcgggacaaaagaaactaaaagcaaaaaaggcggagtcaacttcttagtaaagcaaaacaaaaatcaatggggtgtgaccaacaagaaaaggggcggagtctttttactttgcatgatgacgtcattttttacaatttaatgaattggagttttttgctaatttacttaaagcttcggatatgatatatgcaataggcttgggtttattgattatttgtgtacagtccttacaataggttttgccttttttttttttgggggggggggggattattttttaacctcctcatagactggggataattggagactgggggataattagagcaaatactgtattttctctctctcgaccccatccaataggtttgggtttgtggaaggggatgtcagagaaaaaaagtagacacactcaaattatcgatcgaaaatcaatcgataatttgattgggaatattatctactgttaagcctaaactttttggcctgtttaaaaaggaattaaaaatttttaaaaattttattcatctccctttttgatagaaaaagcatcagagtgcctaaactaacatgtaaataaaatttggtgcgtttcagaaccctttctgaaaaaatatttaagaattaattttgcaaaaaataaataaaaacgaaagactcagattttcgaaaatttttttgagccagctagctcggcgctcatttcagtgtaagttagtcctttaccggggagtatccctgcaaagtttgttacgcttctgctcaattagcaaaaaatatgagtgatcgaattntcactaaaaaagttaagcctacattttttggcatatttaaaaagcaattaaaaaattttttaaatttaataattttcctgca

SEQ ID NO: 43182 - DNA, 1249 bp, Heterodera glycines
tttcggaaattaaggaaaaaaaaatggaagaaatttggaataattttttgaaagcaaaatttttttccttttaggattgggtcaaaaaaaatttaagacaattttggatttttttttgaagttttgaattttttgacaaatcccaggcttaaaactgggagaagcaaggggctgtggcgggggcctaaaattgggccacattgagatttcttctgttttcgaaaaagtcctggaaataactatttttctttccttacgttctgtagagctcgatctgctcttttcaatggtcttatcccggtctcgatccgtgccgaactcacaaaatttatggagtgaaatgtgaaatatggttttcccaaaaaggcattttttctgaaaaccggattcaaaaatctggggtttggtataaccgttttagaaatagcgtagaaaacagcttcgatatcaagaaaccaagtcaagtccagaaaggaatattttaaaacgattcgttttgttttggcattatgataccgaataactttcggaaattatggaaacaaaattggagaaattcgaataattttttgactgcaaatttttttccttttttgaattgggttcaaaaaaattttaagagaatttttgattattattttgaagtcttgaatttatttgacaaatccaagacttaaaactgggagaagcaaggggctgtggctgggggcctaaaatttgggccacattggagaattaattctgatttctgaaaaagtcccagaaataactattttttctttccataccttcttgtagagctcgagctgctctttccaatggtcttatcccggtctcgatccgtgccgaactcacaaagttatggagtgaaatgtgaaatattgttttcaccacaaggcattttttctgaaaaccggattcaaaaatctggggtttggtataaccgttttagaaatagcgtagaaaacagcttcgatatcaagaaaccaagtcaagtccagaaaggaatattttaaaacgatttcgttttgttttggcattatgataccgaataactttcggaaattatggaaacaaaattggagaaattcgaataattttttgactgcaaatttttttccttttttgaattgggttcaaaaaaattttaagagaatttttgattattattttgaagtcttgaatttatttgacaaatccaagacttaaaactgggagaagcaaggggctggagggggggcctaaaatt

SEQ ID NO: 43183 - DNA, 1024 bp, Heterodera glycines
acctgtgaacagaggtgggagaaagaccatttaaaacaaggatataaatcagagcccctactggggtaatattattttcgagaatcgttttagttcgaattagaaccggatccgaataaatagatttagttttcaacatacttcaaatgcgataaaatgcacgaaataggggtctactcccccccccccccagaaacaaaaaatgaggactttttaaaatgaaaaataggaaaaattctgaaaagtatacccttttcttaagaaatttcatcaaaaacccaaaaaattgacccaaaaatagtcaaatttttggaaaaatcttaaaatgggctaaaaattcctgaaattttctgatgatcataatctaaccagttccttcccacttttatctttaaaaaagctctcaaagaattttttgatttctggaaataactaattttgcttcatgacgaagccctcacttcctggggagagttcacgcgacgcacagagataaacaacacgtcaagagaattgtccggcaatcccccgcctgtggggtaaatacgacgctgacgtgccgcttcttccaacgggtgacgcatgttggtcgtcttgtccaggtaatatgacgacgcgtttgactcctcgccgctgctcatgttcacaatgccacacttcttcgcctcctcaagcgacatttcgcgtccggtgagcgagtcgcgcacgtggaaataatccggcgggagttggccggaatgaatggccgactccaatgggatttgctcgttggtggccaagttaatgaacacaattcgcgccaagtcgaacgcatacgcacgcgtctcatactcctcgcccatcggtggaccacccgtttcagcagcggcggagggaaattgtatgatttttttgctgccgtcagtggcagcgggcgattccgtttccgcgcgaaacgcaacatcgcgcaacgtcagacgacgacctcggtgctccatttgaccaagccggtccaacatctgtggcatggagagataaaatattt

SEQ ID NO: 43184 - DNA, 644 bp, Heterodera glycines
  unsure (1)..(644): unsure at all n locations
ttaaattcatttttttttatgactcacttgcaaagcaaatatcagtccgaaacagagttaattaaaaaatattattttgttttttctttcaatagaattaattctggctaaagcagacgtaaatttgtataattttgggcaaaaaattaaattttcaaatatttttttgttttattaaaatccccaaatgtcgggttccctaagtgttggatccccaaatgtcgttcggtccccaaaagtcgggtccccaagttgcaaatccccaaaagtcgcaccacgatttgtataagacagatatattttaattttcatttgtttttcccgttgagcaaattggcaaagcgagtatcgaattgaaatcgattggtggtcaatttggcacttttttactgcttttagtcagcagtggaatttcggcacaatacactttgggaagggggaagatggacaatttcatgcaagtaggtgcttggcaaggaaacaaatattcttttaaattcattttaggttagaaaattttcacttttttcaatgatttaaaaaattaaaatttcttttggatacccttcatcgccccatgtatcggcgctttgattggcacttggctttaccaantgttgtatcggttttcacttgccggaatt

SEQ ID NO: 43185 - DNA, 1091 bp, Heterodera glycines
caactgggcgacgccgactgggcgccagatcaactgggcgccagtccccgtttccctccctaccagagaagggattccgagaccacaaaaatttttgaaaattggagttccgaagcccaaaattttttcgaaacggaattacgtgctatccctaccccctaccatatatgtgataaataaggattttttaggcaaatgcataaaattttgcgtaatagttatgattgtaggcccccttttaagaaattttttttgttgttccaaaagttttctgggtcgctgacaatgaatcctgtatccatttcgaaccctcggacccaaattctaacaatttttgttcgaatttgggtccgggttcgtaatttgtcgaaatggatgtcggcttcgtgataagcgacccaaaaccccttgaaatcatgctttcatgacttttaaaaataaaaacaaaaaaaatttctttgaaaatacacccttcagaattgaaaataaaattctcaaaaattttattgcctcttcgaaaatttttgtgtctatttaaacctattttgcgatttttgtgcctaaagaaagggaatttgaaagtgggtcttggcgcccagtcggcggcgcccagtcgacccggtccgaaaacctcgcccaagccgaaattctgggaccgtccctgccgtcagcccatttttttcatttttactcctcaatttcggtcacccaaaaataaaattcccgcataaaatggccaacaggggcaattcgtaatacaaattgaaaatgatttttaaaggacaaactaaaaaaaatttttttttgtaaaatttccaagttttatttaaaaggaattttttgacaaaattcttgcttttttaaatatatatttttaaaaaattgtacgagtgccattaaaattttaaaacttagaaatttttcaagaaaaaatctttaaaaaatttttcgttgaaaattctatgagaaaaatttttaaaaaactaattgcattggtcccgccactgatcatatccccgcatttatttatcatcaccttttttttgttatatgttgttgtccctcgtggagcttaagggcagaactgaaat

SEQ ID NO: 43186 - DNA, 911 bp, Heterodera glycines
aatgagacacgtgactccattatctaatttgcaccaaagggctgggaatatcgtagggtcatagataccacccagcgattgttgtagtttctccactcgaattctttgctcaaacgttaaaactccaacaatgttgatcacacgcagctcatagattgtcattgttctgcattgtgtatattgaattcgtcgtaaaacccttgctgcatacttttgggcttgatcagggtgtggaactccagtaaggacgacacgtgccgattgaaatatgagtccagccacagtttttgctccatatcggattcgcatgatgattgagtggaaacggcgtggatcatattctgtattaattcaacgttgtgcaatagccaaaaactgttgcttgttcaaggaattaattttaaaaataacagtagtttgaaattttcatctaaattataatggacaacttttaaaattttacgcaacatattttaaaaacaatttaatactgaaaaaattctaaaacataatagtgagaatttcaagcgggaaaaatgttttatgatcaccgcctccaaattcgacgacacatggcaagttcggatgatgcaaacggattccatgttacatgtagtagtgcattcgtacctaaaatgactatttatttccaccaaattgccaaacaaaaaaaaacggtaccgtaattcccaagtagccgcggtaggccgggtctgagtgggcgtcgagaatggagaggtcattgcagcgcaccgggaaatttcgaacaaaaggtcgcaggtgggcggttcgcagttgcgctaagcgcagatgctggacaatctcccggcgcttctccaagtttctgaacaacacgcggagttcatgcgcgctacagtggaacctcttgcatagatggtcgacaagcggaa

SEQ ID NO: 43187 - DNA, 1377 bp, Heterodera glycines
  unsure (1)..(1377): unsure at all n locations
ttttaatttttgttcaaaaatggtttttagtttaataaaatgtttttactcgggaatttttagtagcaattttacataagatgaccatataaaaattaaaatatatgcattcttaaactaaaaccaaaaataaaagttttctaaaattataaaaaataaaactaaaaaagtttgagatttgaattgtggagaaatactattgtgcaccaatttttcacatttaagtttaatccacttagatccaggagtagtctgttcgatgaaggtaaaaagaaaagaagcatttttataataaaagattaataaaatgtaaggaaatgatacaaattttgaaaaaagtattaaatttcaaaccaaaatcaaaatttgcaaaaattctcaatttaaatttaaaattaatgaaacgataaatttcctgtataataatgcaaaaatatttaattttaaatatataaaataaaaaatcattaaataaaaattcaccctattttttaatccttaatatattcgatatataacttaaaaaaatatatgaatttaaaaaaatgtttttaaaaactaaattgaaaatattgtaaatttatttaaaaaccttcgataggctttaaataaaaaagattcaaaatatcacatgcaactacgaaggaatgttccgaaaatttaattaatattaaatttcatcaattaaacaccataattatntnaataaaattaaaattaaaatttacaaagtcatgggtttgtattaaagaaactttatgatgaaaagagcccaaattaacataaaagtttttctgaacgatacaaaaatattcataaaattaaaaaaagaaaaactacagttttcgtttatcccaacagaattatctacaacaaattaaaaccaaataaaaaattaaaagaaatacgactagcatttgagaaaaagaattgtccttaatatctaagtgcgttttaaagtataatttaaaatttatatttcaataaaaatacttaaccagaaaataaaaaattctaaatattcttatgatgaggcaccgataaataaagaaaataatttattaagaaaaacaattaacaaaataaacaaaaataaaagaatcaaaaatcttccagacttcctgatagtgcccttaaggatggattgactcgattaattccatttaccgctatcaaaaaaaaagagattaaaaaaccgtaagtgatctgagcttgatgaatagacgagaaaaaaatggactcatacataacacaaacttcacaagaattttaaaaaactttaaaaattttataaacaatgcagatttaattgctttaaaattaatataatattttggattatatcaattcacttcaatattttttatatcgatttta

SEQ ID NO: 43188 - DNA, 1031 bp, Heterodera glycines
tgcttaagaaaaatattataaaatatttaataatcatttttttgaccaaaataaagttatttggttattttttaggtgttttgctccataaaaacttaaaaaaatttaagtgccttttttcatgcctttttcaggattttcgtgccttttttcaattttttggtacctattatagtgctttttgtgatttttggcacctttttagtcggtctctagtcattaggtaaaagaaaggccaaaattttttaaacaaaaataatttttctcttttaataaatataagttttcaaagaattcttatattttttacaatcctcatgagaattttggagaattttacttaaaatcgcttgaaaatttgaacatctttctaccgttaattaaaaaaaattctttaagtaatttgttaaatcctcataaaatttattaattcttaaaaaaaatttacctcccagaaaaggtggcccgtacttctgtgtgcgtattcttttctccatttggcccttttttggtcacgctaatcatcaaaaaaaaaatttaaatttttttttcaaattaaaaaaagcaattaaattaaaatttaattataatacccacattcggtgtcatgttggccataggcttttaatgattgaacacagcaaatattgtagaataaataaaagctaaaaaaataaattttaatataaatttaacaagcttcaaattattcaattatatataataaaataagtaaaaaatacaaaaaaaaggggggggcgtgtaattgatgagtgcccttttcaattgcttgggaaacattttcctaatcgattctactaatagggaaggaaaagaaaggaaaggaaaggatagttgtgcattaattatatatttaaaaacattagctatcaaaaaaatattttaggaaaatattaaaaaatacctatatttcttttaattcctcaattcatgcccccggtaaagacttccaggtgaaaaaattattgaaaataaatatcaagaggttttcgaggtcacttgatcacata

SEQ ID NO: 43189 - DNA, 477 bp, Heterodera glycines
cggggaaaaattttgaaatttgaatgcaatttgttaacagatgttcaccaaaaactgcctacgattttaaaccatgcacacgactttttttgtttataaaatgggttttttcacggcgcgctttttaaaaaatttttttgaggataggggggtccggaaaaattagtaatttttaatgcgagttgtatacagatttttgtccaaaaatgaccaaaattggcgctttttggctaattttttaagaaaaatagtgcatagtgacataatgccataatatttcaaaaattctcaaaaattccaggattaaataacataatgccataatataatcaaaatattgagaaaatgacaaaggtttgtcaactttatttgacgttttttgaacttttcgaaatggtcgttttcaagaacgtccttgcatgcgaggacgctttttatgttcaagaaagagggcccaatctcaaaggcgtccttgcc

SEQ ID NO: 43190 - DNA, 1293 bp, Heterodera glycines
  unsure (1)..(1293): unsure at all n locations
gttttataagaattaaatttttaaaattaaaatagccttataaagaaatttatggattaaaataatatatatgttttttaaaattttttaaagaattgtaatataaatttttctaataatacataaagattatcaaaaatgttgattttgttttactaattatgctcaaatttaataaaaattaatcaaaattttttataatcttaaaaaattataaaagtattttgatgttattatagtcagagtttaaattaagaaaatacaaaacatataatttcgtcattcagaaaataaaaaataattattttaataaataaaagcaaaatttcgtaatacaataaatgccggaatttataccaactaaataaatcgtgatactcttcatgaagatttttaaaaaacaaattgtttttctttcgaaaataaattaaataatttattaaaatattcaaaaaaagcatataataaatctgtctttaaataatttaaaatacccctcaaaatgtgccagattaaaagattacgctatcaaattgaaaagaaaattgacccaacaaatcgtaattttgaagatgaattttgagaatttttcacaaaatgccaaaattgggttttattttctaaaaataaaaacctaaaaaatagttgtcaataactaaaaaactagattaacaaccaccaaaaaaaaacatgttttcgtgcatttcagaccatagggagctccgggaaaaaaataataaaaaactaagaatagtatccctctttaagacgaatgactaaagaaataacaatattattaaaggataggcttatgttcaattttatctacttcaaacgaaaataaatttaaaaatgatattaatagatgatttaaaaattagaaaaataaattaaaatctattcaatggctcttttgctggattctctttaaatccttaataacaattttatttgaatatttttttccatttaacgcctaaatacgatttttaataaagaatttaaatgctaaaataattttttaaattaaacttatccaataaaattataatgtaataaaatgagcaattaatcatttctgttttatcgattcaaaaaaaaggatttgaaactatactctacgaaggtatttataatacaaaaaaatttaaatttaaaacaataatccatttctatnaaaatcataaataatttctaataatatacagataaaaaactgtactataaatttttaaaataaagaaatttaaattaaatggtcatttattttaaaataaatcacagaaaatctca

SEQ ID NO: 43191 - DNA, 904 bp, Heterodera glycines
  unsure (1)..(904): unsure at all n locations
tcgggtgtgtgatcagcagtncattgttggatagcggcgacgtctttgttncactacggcaaatcactgaggacaccatcaacaccatactcaatcaattcaacaaagtggcgcaaagcataaaacagcaaaatctgactttgtggggtgagccgttcatcatcaccataactacagttgatcgcagtggtctccctgtgaagcggcatatcaaagggggcgcccgacgtcgtttggccaaagtccaccaccaagttaatggcaaatgtctgatcaaggtcgtgcttccgtgacttttttggcaaattaccactttttaagttatagattcgaaacgaggacgaccaaaacagtaacaactattgcctgttctatgctctccaggcaacgatggttgccaaaacgcgtggatggcccagctggaaattttacgattatatgcatagccgacttggtcaacgtggactttttcatcaagacactgtgcagctgatgcgccaaatcaaagcaccattggatttggacgcatacgacgccgacacgtacgtacccctggtcatcagccactggaacaatgctcaacaacagcagcagcaccgttttgcactgttcatttttggaagcaccggacactacaagccaatctacaagtatattgacagcacttacgacacaccattggttttatactttaacaacaatcatttcgatggtgtacacttcctcagcggactctttggcggcaaaaagtattgtctggagtgtgagaagccttacaagaagccgaaggaacacatgcaatcatgtaaagcgcactgcctcatgtgttcgcgagttgggcccgagttttcatgttcctcggaagatgatggattcttcaaacaatgcagtggatgcaacaaaa

SEQ ID NO: 43192 - DNA, 1427 bp, Heterodera glycines
tcatttttctcgggcgcttctgaaataactttgcattcttttgatttaatttttcaaacattgatttgtatttattagctgcgcctattagtgtttaattgggcttaattagtatcttaattacctgcgttctcttcgctgttttctgccacttctctcttctgctgctgctgctcggcccttcgaatgtttccggtcggtgtcagcacaaaactcggctgatgattctgtgccctcagagattggccaatttccgtaaaaattggtcccaaatcgcacacactgtcaatgtatcgctcaacgggcggtgaaattgtcattttgtcgcgtcgttcgctgcgattgtcacccatttcgttttttctgtttttaaaatattttaattacattattatttaaataaaatattctgtttattttacgcacttttcccccgattcactcattgaattgtaaatgttccgattatttgtcacatttaaatttgtcgcgtgcaaaaaattgacgggtccgctgaattccactctcaccgattgctgatctgaccaaatttaaaattgttgtatttctggtaatatttgaatcactttgtgtctctggcgaagtgtgcatttgcgccgggggggaaacggtgcccgaggcacccatcaaattgcgcacttcgtcattcgcttgatgctcggagaaagttgccgactcgttcaaaatgggtcgtatcctttgatttcctaaattaaaaaaattcactagtcattcatacattttttattaaaaataattaggaagcgctttcggggttgggttgcgaaaagtcagtgtttgatcctctcattttggggtgtcggcgtgacagaacccaacacaaatactaattacagtactaatcttaatactaattataatttcctcttattttctttgctttaccctcaacgctcacaacactttggaacatttccgcttgtgaatcactcattggccatatgctttttgcggccaattgtcgtgaatatgcgtggaatttgcacagattgacggagcattggacggactcggcaaaagacgcggcacaaaacgatgggaaagaggaggactaaaaagtatcacttttgaaatttaaacagcaatattttttaccaaatcttgttgtggctttggtgccgtttctggcggcatctttggcatttgctttgtccattgcggcaaacattcatacgccgattgccattcatctccactgcttgatgtcattggtgggggcagaaaatgggtggactgttcttgttgttggttttggaatttagcaaaaatggggcatctaaaagccgaaaaaaaaagataggagaaattaaggatatttaaaatgggcgaaaagattagggggaattaaggaattaaaattttattaattgaaaataaattattta

SEQ ID NO: 43193 - DNA, 1185 bp, Heterodera glycines
  unsure (1)..(1185): unsure at all n locations
gcaaaaatccaacgcggaattaaagtgctggctataagggagactattcccgaaggatttggtctccccataattttgggcgcatcggttcgggggggcttgcccccgaaaaacaaaaaaatcatttttttccaagtgtccgtttggggtaatcaatcaattatggggagcaaaaatccatcgcagaaattaaaagtacaggctatagggaagctattcccgaaggattcggtctccccataaatctgggcgcatcggttcggggggactgccccgaaaacaaaaaaatcgattttttcaagtgtccgtttggggtactcaaacaattatggggagcaaaaatccaacgcagaattaaagtataggctatagggaagctattcccgaaggattcggtctccccataaatctgggcgcatcggttcggggggactgccccgaaaacaaaaaaatcgattttttcaagtgtccgtttggggtactcaaacaattatggggagcaaaaatccaacgcagaattaaagtacaggctatagggaagctattcccgaaggattcggtctccccataaatctgggcgcatcggttcggggggactgccccgaaaacaaaaaaatcgattttttcaagtgtccgtttggggtactcaaacaattatggggagcaaaaatccaacgcagaattaaagtacaggctatagggaagctattcccgaaggattcggtctccccataaatctgggcgcatcggttcggggggactgccccgaaaacaaaaaaatcgattttttcaagtgtccgtttggggtactcaaacaattatggggagcaaaaatccaacgcagaattaaagtacagactatagggaagctattcccgaaggattcggtctccccataaatctgggcgcatcggttcggggggactgccccgaaaacaaaaaaatcgattttttcaagtgtccgtttggggtactcaaacaattatggggagcaaaaatccatcgcagaattaaagtacagactataggggagctattcccgaaggattcggtctccccataaatctgggcgcatcggttcggggggactgccccgaaaacaaaaaaatcgattttttcaagtgntcgtttggngtactncaacaattatggggagcaaaaatccaacgcagaataaaagtacag

SEQ ID NO: 43194 - DNA, 1172 bp, Heterodera glycines
cccccccccccccccctctcccctacgcccaccactccgtcgtgccaatgttgggttcctcctctccccccctcgtctccgtctccccatttactgcccctcattgaccgtacaactcacttttctctccttttaccgacttcatctcctcctattgtaaattcattcacaatcagcacggcctttccttctgagacggaacaacttggaatggtcgaagatcagagttttgtttcaattctgtaagttcacggcaccgaattgtgattggcttgaaagtgtcaattatcacataactgactaatactcattccccgggacaggactcattaattcttctcttaagttacctctcctatatgccgttgtgttgtgttgtcggcttaactgggtgagttgcttagcttcccccccccccacccaccccattgggcaattagttcataattcagaaattgtatggtcgtcgtactcattcggtcagtgcctttttgcttttgttggaatactttaactgaattaatgaattgcttaagctcaaatcgcatcttccagaagctgccctccagcatttatctgctgaccctctctctaatgtcctccgtttttctgctctctcttctgtaattttctgtgccaattccctaataatttgacttttcccgcatttgtcagttctttttgggtggaagaaggctttatcacaggtcaaaacgagcaggtggcatggctaataattgccaataaaattgacaaatcttttggtagcactccatgtttctgtgcaaaagtgccacttttctcggttcgttcccgtacttgcgttttaaatgcttctctctttgtccagcccacttctgcgacttcgccagcgtttggctgatcgttttggtcggctttgagcgacttacgctgctttaccgcgtcagctgtcgccgttcggtggtcaacgccaagcgacacgtcctttttctgctcattctcagcggacttgccaacctttggtcatttttacaccaaaaagtgtccatttacattttgggacactttaattaatctgagccactttttggaaagaaattatattcacttccctcctccctctttaggatagttttttgtgctgaaattaacgagtttggcgaatgcgacattaatgtgagtttttgagt

SEQ ID NO: 43195 - DNA, 961 bp, Heterodera glycines
  unsure (1)..(961): unsure at all n locations
tgaaagattttaaaataanttgaaaaaagcaaaaatatatttttaaattattctttctaaatttgtatgattttatttaaaatgtgtttaagttatgctttaaatatttttcatttccaaaaattttttttctttgtaaactaaaatttttctaaaatctttcatttttactaaaattaaaatttaattggaatatttaataaaacaatatttatataatttttaaaataattttatttaaaaaatttaattcgaatattaaaaaaataataatattttaatgcttttttttactttgcaaaaatttcctccaatgacgtctcctgcaagtccaacagcagcactgccttgttcagcagatggtcaatgtccatggtggcacggatctccgagccgaagtccttcatcgggatcttctcatgcttggagtacatcagagtgacattgtcgaactcatctgggatggaaaaattaaacatttttagatatattttaaattattttattatatttattttaattattatttattataacataaataaaatgacacgcacagcacacaatggaacagaaacaagttaaaaaaatgttcaaatgcagatcagttatgcactctttttttggcgttacgtgattaaacaagatactggatagataatcagcagatttaacaaaaaaaagccaacattttattggcactattcaccattttcgtaaaaaaataataataaatatgaatgaaatgcgctcatttgttaggttaatttgatcagcgccatatgattgttagctaatagtgaaaaatgacataaaaatattgtttaacaaataacgcaaaataaaacatttttattatcccataatccaaatctaatgaagattaaaaaaaaataaacaattatgtctgagcgtagcactgacattcccntcccctgtcacgcataatcacttaattgac

SEQ ID NO: 43196 - DNA, 1437 bp, Heterodera glycines
  unsure (1)..(1437): unsure at all n locations
ccaaaagtttttgaaaaatgcgcgcaaaaaaatgttaaaatctgatttttttatcccgaatgcactaaaattntatgattgctaatttttcctccccanaattgtttaaaatcgttaatgggagacaaaaatatactatntgatacatttttgatcgaataaattgtaaaaataacgatttgaagcaattttgcaaaatgttcttatttttgacactaaaatcttattttttggccttaatgttcttattttgaaaattttttgatcacatccctggcctatacctataattttttttaaaggtaaaaaaccctcttgagctgtcgttttttgcggcgcgtttttcaaaaacttgggctgggattttttgtttaaaagattttctcgagggtactgatacagacagagtcatccattccatgcatattcatcgtttttttgaaaatgcggagttttccaaatttatttttctttttgactatgtaaatgttatttattttggccttgcaaaattcgctaaattttaattttgactagacattttttacctatttttttcttgaaaattgtttttccaccaatttcattaataagagcaattttccaaattagccaaacttaaatggtcagtacgtatatctactgggggtggaaagggaggtatacgtcggcacaaatttactcatttttttaaaccaatcatttccgatgtaaaagtcccaaaaagccaaacaaaaattaaattatcaaacgaaagaagcaacaattttttggggattttcccttgtaaaaacggaagagccgatctcgagttaaaaagcattttgataaaaaaacaaagcatcatcctataggttgggttaaaataagtagctgtgcaaaatttgaagaaaatctgacccgaggaaaatttttttgacccaggacaaaggtttttctttttctctcatttgggcgtactatttccttgtctctaacatataaaataacacatgaatcatttatctgccaataaacaatttttttaaacttttgactaacttagaaatattcttcagaattttcccttcaaaatgagcataaaatgattttatttgttctagtattgaccaagttataagctaaaaaatttcaatctagcatcaatttttccatttgcccccttttagatcagtgggttgggtgtcaaaggaacacaagttgaggagctgtacaccattgacgatgaacaacatctgtctaacttaaggccagtctccctcctttttttcgcggtttttctttcattttgcgtctttaggcccatttacggtctggtcttcctcttcaaatggcgtcccggcgaagaatcagaaggaactccgatgcccgacgcgcccgtgtactttgcccaacaggtgggcgcttcaaagcttttttccccaatttaaaacaaat

SEQ ID NO: 43197 - DNA, 980 bp, Heterodera glycines
tgaaattgtgatttttgaattccaattttccctgagtcttttgtttactcaaatgtgcgtcactcttcccttgcattggttgcccgtactggatccgctggtatcaattctctgtgtcagtgactaccgtaaggcgctggccaatttcatccggtatacgatatgcaggagacaaaatgccgttgcacaacagcaaattccgatgaatatcctccaaaataacaatcaaaaagcgcaacttcctattgttgcgtcataattgcacaggtgaattctttgtctttatttaagaactaccaaataatatgagaacgattcaagttatgcgcgcaatgttcattggtcagacattaaaattttatccaaattcattgagtttaaacttcttattcagattttgaatttttcctcgtttttttttattaaaataaaataggcaaatatcttttaaataaacaaattttttgagaacactgtttaaaaaagcaaaaaatttattttaattgagaatatagataaattcactatgacttgatgattagtagttatttcttaaattccgagcacatttcttaaatccgtaaagggaaggaaaacaaaaaattaacacatataaattcatgcttggcacaaccaattaatattcttggtaacattcaacagctctaggtttttttaacagaatactattttgaaaatttatcgtataaaaaaaagtcatgtttaaaatttcttaatatgggtaagaattttttgtccataaaattttttattcaatggattttgttaaacattttatgtttaatagattataccgaggagttcaaattctaataagaaaatttaatttaattgcttctgtaaaaattataaagcattaaacatactatgtttttgctatgctcttgcatataatcataaatagggctcggatttttaggcaaagggctatttttttcctgagctccccgggcctaaaa

SEQ ID NO: 43198 - DNA, 1293 bp, Heterodera glycines
  unsure (1)..(1293): unsure at all n locations
ttacctttttctttttttctaaattctcggagaaacgtccgtttccgttcgttcacgtatggatatgtatgtacaatgagaattaaaatgatgtttttaattttcttagtagattatatttagaatttgatttggttcattaaaatataaaaataatttcttttgataataaattatttttatttagttttaaattgtatataatttattgaattatatatctttttttgtgcttttttatgttttcaataattttgtcaatttttaaatgtttttcattatttctaaaatttgatttaatctttctgccgacgcttctttggtcatttctgtttttaaatgtaaatctttcttttcccctttaattattatattcattcagtttactcaattcccttttatgttctccattttttcaagattaaattttctttggacataatataaagcaataactttttatagcaaaattaaaaagtaatttttatttattatcaaattgcatgaatttttctcacttttcctttgaagccgtgaattgatatgaattattaaaacatatttaaaataaactataaataacaaaaaagtttataatattctcgttatcggtaattcgcaattttaaaattatttaattttttaatcgaaaattcgatttccattaatataacgtgatttaattaatcttccgtttttaattcgatcgtaattaatttaagttttcgtttcatttatcacctttatatttagttttaattatgtctaatttataaattcccaatttcacgcaatccaaacgtccacctcctccccccccctccctagtttttgtttttctccaattttctgggtttttaaaacttctttatattagttagaataaatggttgaaattgtgaaaattttcgaaataaaattcctaggagctgctaaaatttgttgtattaaaatatttttggtcattataaagcttttgaatttagtttaatgggttttaaatatcagcagcttcacaaaattaatcaaagaaattttttgtttaaactaaaacaaatttaatggtttgtttaatctcaattataatcagaattggagtataataaaaaggattttttccaaaaaattattgatttaattaatttaaatcaaaaaaataattatttttttttgatttcctttattatcatttgtagtcctaagggttaattttattagcctacaatttttttaatattcaaaaaagccagggcccaaaattttcgaanaaccactttttgagtacttattttt

SEQ ID NO: 43199 - DNA, 1077 bp, Heterodera glycines
  unsure (1)..(1077): unsure at all n locations
caaaataggacgatatcctgcaaaaattagcctatcagtattacgaaccttttctgctgctaatcgctacctttaattagatagcattcgcaattagattatgagttcgttattcaaattgccctctaacgtcttggagtaaaaactcgcaatattttaaccactaaagaatcaaatagatttgtttttctagccttacgcaaacatttcgaaatatttcgccggcatttgtggcaattcgacactagaaaagcgattttgttggttttagaaccttagcgtcctagtaatgaggtacaattaaatcctaatttatgattaaaattgtgcataaaggtcaataaataattttcctctgggagaccgaaattttttgattgtacaccgtaacccttttaagtccaatgtccaaaataggacgataatccttggcaaaattagcctatcagtatttacgaaccttttctgctgctaatcgctacctttaattagatagcattcgcaattagattatgagttcgttattcaaattgccctctaacttcttggagtaaaaactcgcaatattttaaccactaaagaatcaaatagatttgtttttctagccttacgcaaacatttcgaaatatttcgccggcatttgtggcaattcgacactagaaaagcgattttgttggttttagaaccttagcgtcctagtaatgaggtacaattaaatcctaatttatgattaaaattgtgcataaaggtcaataaataattttcctctgggagaccgaaattttttgattgtacaccgtaacccttttaagtccaatgtccaaaataggacgataatccttggcaaaattagcctatcagtatttacgaaccttttctgctgctaatcgctacctttaattagatagcattcgcaattagattatgagttcgttattcaaattgccctctaacttcttggagtaaaaactcgcaatattttaaccactanagaatcaaatagattttgttttctagccctacgcaaacatttcgaaatatntcgccggcatttgtgtcaattcgacactagaaaag

SEQ ID NO: 43200 - DNA, 1333 bp, Heterodera glycines
  unsure (1)..(1333): unsure at all n locations
tttaacncaattttcttaacaaaatgcattaaaatttcaaaatttcccggcgcgcttatcggcaccgctggaaccccacttcaccttaattttttgaaatttgaaacccaaaaagtgcaaaaatgtagtcattttttagcgaaaagcggctatattttccattttttgctgctttaattaagctacgttaacggcgctgtgctctcatttctgcgccgcttaaagcctcttttcgaaatgggaatcactttgcattttacgattgacttcaaacaaactcgaagtttggatctgcttgcccaacagcttatccccctggtcggcatcgctaacatcaccggaatttacattggccaatggtcagttaaacttgtcgactttggcactgcgtttgcactttctccgcttaagccacccacacggcatctgcgagttactgaagcgcacctcctcaacctttttcatcaattgccccaatctccgatcaatttattttaagggcatggaacatatgataatgtacggcagagccccaggcccaaacatgagggaatggctccaaacgccgcgcggcgatgggcgtccaaaagtgttttatcgcaatattagcacattcgttattggtcactacacgaaggcatgtcggaaatggggaaaagcatttaaaaaatcgactctatgctgctaatgactgattttaatgcacttttgaggactttttggctgccaccagtccggccaattacatcgtctgttttgaacaatattttaatgggtacgacccgcaagactttgaaatggacaatttgcggaccaacgaacgcttatcgctgcgcctggttgagaagaaaaggcagaacaaatattgcatgacgcgggcgccaattgggcgcaaagagcagcagtgggcgcaatgggagcgagaagcatggcgcgaggaggagatgcacaatttgctcgaatttcggctggaagacgcgaacatcggcacggacattcaatgatcagagagatacattgatcataattcatggaaatattgtaagacaaaggctttttcatatggtcgggaataataatttagttcaattcgactcggatgatcacacataaataaatttcgtttcttttaaattttacattttaaaaaaggatttcgttacttttccgttatgcctaaaatatgcgaaaataggttctttttaggctctaaaacttaggaaaaataggcttttgcctaaaaattggagccctactgatcacgaatttgatgtcaaaattaaaaaaactcagattttgtatgtgatttttatctcacgatttaatggatttt

SEQ ID NO: 43201 - DNA, 949 bp, Heterodera glycines
aaaaagagatagacgttttttcaaattttcagagacacactcgcccagaaagaaaatccagaaaaattagggtcgtcgctactattccgaaaatgtggttggagttcatttgagtgttgagcagaaaaagagatagacgttttttcaaaattttcagagccaaactcgcccagaaagaaaatccagaaaaattagggtcgtcgctattattccgaaaatgtggttggagttcatttgagtgttgagcagaaaaagagatagacgttttttcaaaattttcagaaacaaactcgcccagaaagaaaatccagaaaaattagggtcgtcgctattattccgaaaatgtggttggagttcatttgagtgttgagcagaaaaagagatagacgttttttcaaaattttcagagccaaactcgcccagaaagaaaatccagaaaaattagggtcgtcgctattattccgaaaatgtggttggagttcatttgagtgttgagcagaaaaagagatagacgttttttcaaaattttcagagccaaactcgcccagaaagaaaatccagaaaaattagggtcgtcgctattattccgaaaatgtggttggagttcatttgagtgttgagcagaaaaagagatagacgttttttcaaaattttcagaaacaaactcgcccagaaagaaaatccagaaaaattagggtcgtcgctattattccaaaatgtgggtggagttcatttgagtgttgagcagaaaaagagatagacgttttttcaaaattttcagagccaaactcgcccagaaagaaaatccagaaaaattagggtcgtcgctattattccgaaaatgtgggtggagttcatttgagtggtgagcagaaagagagatagacgttttttcaaaattttcagagacaaactcgcccagaaagaaatccagaaaaattagggtcgt

SEQ ID NO: 43202 - DNA, 1101 bp, Heterodera glycines
atgaagaattatggggttaattaaattcttataacagtcaataaaacatttagcgttcaacaaaataaaatttatcgcggcaaaaacctggtaaatctaccgttaacaagtcgatttttggaaaaactaaagccagaaactacggtaatttccggtttttaccgttaccgctaccggagaaaatcgaatttgccgaatattagaatattttccaacttactcttgtctcagtcagttcgacatggtcaatgtggctggtaacctttaaaagattttggtaataaattttttttaggttttttttccaaaaaattacataccctcgttgtaaagtcatagtcttcgggtacttcgaaaaagtccgcatcacaatacaccttaaagccatttaaaatataattttgaaacttttgaaaatgtagaaagaaaaaaacggtggaaatattttttgcataattctcacctccttttctcggatatgagtaagcaatttgattttcaggatgagacctaaacaattagtaaataaatttttgttttcattaaaaagtgcatatcaattaaaattatttatttattcaccagtgatggcgccaacaacggtggcaaatgccaaagtgatgcccaaccccgccagctggtacaatgcctgttcaaacttgtaacgtccggacggcacaattcgggaactataacgtataaaaaaaatttccaatccaatctttggcattcacttacttctccgggaatgagttgttctggtagcatgcaagtgccaatgagctggccaaaacgccaatgattcctcaaataaaatttaaatgaattggcaacgaaaataaatatatttaccgggaaatattattttttatttttattaaattccatttccaacctggcaatgcgtgaagattaaaaactccttaaataagaaaaaggaattcaatattttattattttaaaaattaccgcgcgtgtcagtgatgttgaactttttctccagaaaatgcggcttaaataaagaaaaatttatcgatatttaggcaaaaaaaaaacaacaacaacgtactccaaagtaaataaagccaagaacactgatag

SEQ ID NO: 43203 - DNA, 1041 bp, Heterodera glycines
  unsure (1)..(1041): unsure at all n locations
ttcataaaattcgccattttagctaatctttcgattctaccgtactaatcgtcactaaacacaatattttggcattttctctttccttgaattttccattgatattgaaattaaatttcttaacacacctttaaattgtcgcataaaacaaaaccaaatattttgctttgattattcacaaattttccatttttttaaaaatggatatgagatttataccaaaaaatttttttgtgctaatattttcttaatatttcattttcattttccatctaattttcatattcataaatttgaatttttagcaatgtttatgcaatacatatcaatggatattttatattttaagctaagattctattgtaatattgaaaaagcggaatattactgactaaaaataatttccaatggttaaatttatatttataaattaaattttctaagttgtttttttcatcaattaaaaagtgcaaattttgctgctttctttcaattaattctaccgttttttttttgccttttgtttcgtatatattttcaaatttttaaataaaaaaattagttggcatcatgcccatttttttgttcccaattttcagattgactggaactaccacaactttttcgggctgaccattagggacaattttcatgatggcttggacattttgtacaacgatttgacacggaaaccatccattcgcaaatcgctgatcacacggaaccggcgcaacggaatggtcatccgatcaatgggactcaccgcggaaaatgtaattttgattaattattaaaagccatttaaaataattaaccatcaatcatcattagggagcagatttttatttataaaaaatgccaaaaaatttaaataatatttaagagaaacggccaaagtatttaagaaaattttgtgactaaatttagagtaacaaaaatcaaaaaaattttttctaattgaannaaatcacacaaaaatgcgagaaaaaaaaattttttttccacaccccccccccctgaaaaataaaacaaaaaattttc

SEQ ID NO: 43204 - DNA, 816 bp, Heterodera glycines
ttgctgttgctgaaaaaatgggtcatattttttttttggtacaacttagggacatttcggcgccgccgtatcggacccaaaaatttttcataacagtagttattaatgatctttaaatggatttatttaataatttgaaaaaaatattttgtgaaaatctggcaattatttgcacaatgctcacccgagacaaccgccgtactcaaacagcaggcattggttggtgtgcaggtcgaagaaaaagcgacgcgaatggccctcacatggaccgctgactttgggcagaacgcacgggtctaacgataacaaattttatcatttttttgatcagtcaatcgcagtgctggaatgatcaggctgatcagtttaagccacacgttttgtgtgaattttgatcgggtcacagaattgacagcgttcatcagttttggtttcatgtttctatgttaaaatcagatcaggaagcattgatcacccatttatctgatcagagcattgaaagcgaattttgctttcactgtccatgctaaagtctgctttcagaaagcattggtctccatcatgcactgatcagcccattcctgagttgatttcactattctattttttaaattagattataaaaatattgatcaatgatcatcatgcattaatcaggccgaatcacgattggtttggaacagacatttcactcagattaaatgcaggaatttgtaacaaaattttctgatcaaagctttcgatcacttagaccaatcctatgtgatccaccaatacggatttaagaaaccttttatttaattttaaaattagaaa

SEQ ID NO: 43205 - DNA, 1261 bp, Heterodera glycines
agttaaattaaaaatcgaaaaccgaacaatcttttaatctttttatgaaataatgcatttatttatgtttaattaatttttttattattcgtctaacaaataagcatattcaaattataaataacaaatttaaaatttaattaaaatttgaatatttctctcaccaaattggaaaaatcattgaatgtgtgcttgtttttattttacaatttattttatacagctactcattcgactttttcatctgaaaccctgtttttttgagaacattttgaatcgtaattttaattaaaaaattttatgactctattttttggggcatattttatttgtttataagaaaaagccaagaaaaatagccaatttctaaatatgctgttaatttaaattataaatattaaaaatgaaagatatcttaatgaataatgaatttttcaattttaaatttatgacatttttaaccatttcatttgcatatggtggataaggaatttcaaaaacatttatcactgatatttattttaaagttcatattagttaataacaaatattttatactttatatttactaatgatattcaattagcgtgattcattgggcggtgtaattactttttaagagaaaagttttattaatgtttataaatttgtttttgcaatattactataagatggtgaatacaaaaaatttatgcataaataatagtgtaatcattttatttttatttcttttggtcgcaaataatttacactcttttattcgacgaatattttttcttatattataatttaaagttcactgctgtaatttttttaaattatgccaaattaatgataaaatggacataaagttttgaatggataaaattctgttttattataacgtgacttttcgtttttcataaattatttcattgaattatattaatttttaatttgagtgtatatatactacttaaaataaatttattgacattttgagaaatttaagttcttttttacaaaattcaaattaacgtaattaatcttaaatttagtttatatatttttaactacatttagaaattttcaggattctaggtcgatttcttaggggtgaatttttccaaaatttttttttgtcgattcttaggggtgtatttttcgtttttattgcatttttgttaataaatttcccaaaaatccgcgaaatatgggcgaaaataagggcgaaacgccaaaatagggataaaaatttattttaggcgcgaacacccaaaat

SEQ ID NO: 43206 - DNA, 665 bp, Heterodera glycines
tgtccaaatgtccactgtccagatgtgcggtcacgccccctccccccacttacttcgttcagtgcgtattccatttctttagccgctcggtctgctggcgccattccgcgcgtgcgttccgttcgcacgggcggggcccaatcgttgtcaacagaccaggaatgttggcaaaaaatgccaacaatggccaccaaagtgaaccggcagagaaggcaaatcatttggggacaaaggtgcgaaaagatcagtcgaactgatgtaagacagaaagcgaaatttaaatggcaaaaactaagcggaaaacggcagccaaatctaaaaatatttttaatttaaataaattattccctaaatccgctcattagcacgtatattttcttcaatgagcgaaattacatattgatggaattatcgtccatcgtttcgttcctgtgcctttcccccgaggggcaattatgccgtcgaattggcggcatcggcaaaatgctccttgggatccggcttttgaggtccgccgaattttttttttttgtttttgtatatatgcataaatgtgaaaactgattggggggggggggataatgatggtgaaggattcagagaaagacagaaaaacggacggacggagttggacagtgaaaattgggggggggggggggaattgt

SEQ ID NO: 43207 - DNA, 874 bp, Heterodera glycines
ctccccataattaggtttgagtaccccaaacggacacttgaaaaaatcgatttttttgttttcggggcagtccccccgaaccgatgcgcccagatttatggggagaccgaatccttccggaatagcttccctatagcctgtactttaattctgcgttggatttttgctccccataattgtttgagtaccccaaacggacacttgaaaaaatcgattttttttgttttcggggcagtccccccgaaccgatgcgcccagatttatggggagaccgaatccttcgggagtagcttccctatagcctgtactttaattctgcgttggatttttgctccccataattgtttgagtaccccaaacggacacttgaaaaaatcgatttttttgttttcggggcagtccccccgaaccgatgcgcccagatttatggggagaccgaatccttcgggagtagcttccctatagcctgtactttaattctgcgttggatttttgctccccataattgtttgagtaccccaaacggacacttgaaaaaatcgattttttttgttttcggggcagtccccccgaaccgatgcgcccagatttatggggagaccgaatccttcgggagtagcttccctatagcctgtactttaattctgcgttggatttttgctccccataattgtttgagtaccccaaacggacacttgaaaaaatcgatttttttgttttcggggcagtccccccgaaccgatgcgcccagatttatggggagaccgaatccttccggaatagcttccctatagcctgtactttaattctgcgttggatttttgctccccataattgtttgagtaccccaaacggacacttgaaaaaatcgatt

SEQ ID NO: 43208 - DNA, 829 bp, Heterodera glycines
  unsure (1)..(829): unsure at all n locations
tatcgccgctaaaatttggtgctcggacatttcctaaatcccgtcattaggaagaagaaaaagataaacatggagaaatattagttattaaattgtaatctaatggattggaattctaaattcattgtgccaatatatggcgatggcaatggcaatggtttgccaagtgccaattagatgtataatcttaattataataacgaaacaaattattttttaattttgctttaataatatacggcattagtttgaaaaattctatcaaattttggaaggaataactaattattaacccattatttcttttattttctttatgattgcaggtttaggaagacaagtcaaaacaacccacattaaattacacaaaaatcaaggagataaggtaatatgacatttgaaatttaagagtgaattgccatgagaacacacatacaataaccaattaccataatttgttttttggttttttttgtaaagtttttgaatactttaaacaattgaattaacgaattagaacaatattcattttgacttttattcaccatttcaaatgactaattttaaaaaataaattcaaaaatgagaaaaaagaacgaaaaataaagctttaagtgatggatgaagagataaaggaatttaaaattaagaaaaaatataaagaattaaattatcaaaaataaacaaagccggagaaaaaaaaatataaaaactaataaatctcttcccaatttatcagtttcttttttcatttagatttacagaattttgagtanatattttttgtagaaataatttactcgaataatttttanaaattcaaaaatgc

SEQ ID NO: 43209 - DNA, 1122 bp, Heterodera glycines
cggtaggggtcaactccgtctggccaactccgtctcgccaactccgtctggccaactccgtcttggggccaactccgtctgagccaactccgtctcgccaactccgtctggccaactccgtcttggggccaactccgtctgagccaactccgtctcgccaactccgtcttgccaactccgtcttagtgtataaggggccaactccgtctcagagagaaaaaatcattttaagctaaagaattttcttaaaatctaaattttattagatcgggatcaccttctttttgaagaaagttttttttaatgtcataaaaacatggttccaagggttttcggagtcgctagtcacaaatctaacatccatttcgactaaattcgaaccacgaacccgtttcgaacaaaaatattttgaaaattttcactttgattcctaaattgaccaaaataagccaaatttagtcaggaatcattgcaacaatagaataaggtcaataagcacagttacgaacataaaagtgaattttcagtctttcgaatgatatcaattttcggttcttcaaggaattgcggcagtggcgtcgtcagttcaatttcattgcgtacttattcgttctagttacaaccataaatgtgtataggcaaagaataaatagtttttacactttttttttagctttcttggtcggaacgtttcccattacagccctaggcatttcatgcggtaggagtgctatggttatcgctgaaataaccttccttatagcgccaggtcgttcaataccggtgtatgattttttgtccgatgacatttcgccctcttgcgatgacatgcgtgtattcttattttttccgatctcccataatttacccctttgtgtggtccctcaagactaatgtactcggccatctgatttgcgcaactacgaagttcgtctgcagacaaatccattctataaacggaaatgatacacataacgttcagtttcgataataatcatcttctcagagttataaatccggcatttagcgcttgtcctgtgcgcgcgaagcggccgaatgtcccacaagaaaattacaaaacgggcgcgaagcgcccatcctgagtacgtaaaacggacgaat

SEQ ID NO: 43210 - DNA, 1495 bp, Heterodera glycines
tgattcggtggatggtggtgcatggccgttcttccttttaggagcgatttgtctggtttattccgataacgagcgcgactctagcctactaaatagttggctcattgcttctgtgggcacaacttcttagagggattttcggtgttcagccgcacgaaattgagcaataacaggtctgtgatgcccttagatgtccggggctgcacgcgcgctacactggcaaaatcagcgtgcttgtccttccccgaaaggggttggtaaaccggtgaaaatttgccgtgattgggatcggacattgcaattattgtccgtgaacgaggaattccttgtaggggcgagtcatcaactcgctctgaatacgtccctgccctttgtacacaccgcccgtcgctgcccgggactgagccatttcgagaaattcggggacggttagtgttccggcttcggtcggtatgcagactggaaccgatttaatcgcagtggcttgaaccgggcaaaagtcgtaacaaggtagctgtaggtgaacctgctgctggatcattacccaagtgattcctattcacccacctacctgctgtcctgttgggctagcgttggcaccaccaaatgcccccgtccgctgatgggcacaggtcgttcgagatgacttgtggacgctgcccaacattacggggcagctgcctcacgagccatgcttttggggtgcttccatacgttggagctgtggtataccgctcagtgctgcacgtgtgaaagcctgtgtatggctgctgcgtggcaatgtgtcggtggcgggccgcctcgcttggctggttcgctgcgccaatgtgggatgcacgctcgtggggcgacctaacggctgtgctggcgtctgtgcgtcgttgagcggttgttgtggcaggcacataacacactgactggggatggtggtttcgttcccggtcttacgtgccgtaactagcggtgtgtttgtgcttgctgctacgtccgtggccgtgatgagacgacgcggtagtgcccgtgcttggcctagcacgtggcttaagactcaatgagtgtcagctcgggcaccgccagctttttctttttttttcattatttttttttacacttctgttgaagaatgaattctagtcttatcggtggatcactcggctcgtggatcgatgaagaacgcagccaactgcgataattagtgcgaactgcagaaaccttgaacacaaaacattcgaatgcacattgcgccattggagttacatccattggcacgcctggttcagggtcgttaccataaaatgcactgcttgtgcgttgcttcgtgggatcatgtacttgtacgtgttcttacgttacttgctcagctcggctgtggggttttggtgtgctggcgcgaacttgtggttctaattcgcgttttacggaccgtaactcaagcgcaccaatgctttgcatgctaagggggagtgcctggattactggcattcctgctttgatt

SEQ ID NO: 43211 - DNA, 93 bp, Heterodera glycines
cccgatcaacggcctgaacttcgtcgactgcctgaagctgttcaacgaagacccgcagaccgaaggcatcatcatggttggcgaaatcggcgg

SEQ ID NO: 43212 - DNA, 1028 bp, Heterodera glycines
ttaatataacattttatttgattttaccgacattgagaatttctttttttttgtattgtttggcgcatctagaaataaaaattcatttttgactataaatacaacataacaaatcagcgatataaactttttcgttatcttgtctttttcctcctcatgtgttgattaaaacattcaaaatataaactaaagtgaacttatttgttcggaaaaaatcaaacaattaacttaaatggaaagaaaaaaagttgcaagaaataattccgaccaaaatgatcggtcatttcaatgtgcacctcacttgcgccgagtttatgcatcacttttgctgctttgacccatcatttgtggcggggacaacgggctaaataacattgataattcaaattaatcaattacaaaatgcaaaagctgctgttgttgttttttacccaatgctattattgtcaccaacaacaaaaaagtggtcagtgattaattcgcccaaattttcgcctttccgctgaaccgccgccgtctccccaattgggcatcgcttcatcagccaatgttttaaagtgaaattccatatttgtttctttagtgtcagcttttctcctgtccgttcgttcattaattcaaatggttcaataattgtcgctgacggagaaagtttaaaatgaattttgtaagggcaagaaatggtggcacggagaaacgcctaaacaaagcaaaggcatgtattgtatgatcaattttggcaaccctaaaattcaccaaagcggacccccctttacaaatttatgggtttctaactcctatggtcactcccccgcttgctttttaaaaaaagtattgagcacaaaaattccagactaaatgtataccataaagaggcatttcattgaaaagaaaaatatatcttatgaatagagatgtacctggtttatttgcatattgatagttttgcataattacaacctaatgagcaaaacttgtaaagcagttattaaagcgatatttgaaaaaatccatctttcgtgaataaa

SEQ ID NO: 43213 - DNA, 1496 bp, Heterodera glycines
  unsure (1)..(1496): unsure at all n locations
aaaatgcaaatacaaaaaattcgcttttttcatatatttttttgtctttnaattctctgtcactttgcccgtataatttaaaaattcctcacgaacaatgccaacctaaatattatcagttatttttattactcttaaaaatcctgtaatccgtcatgacggtctccaaatatcaaccatttctataaatcataaaatttatctgactaattaagatttaaaaattaatctttgattgatcaccatgcattttttcaaaatatccgcctgattaattttgtcatcttctcaatttagttttttatttttctccctcctattagttaattctttggcatttcagcgccagtattttggtaacaaactcatttaattaagcaaaaatgaagtgctttccataataattaaattttaaaatttaattgcataagaaaaaattttggcgccgaaacgctggtgtgccaaagcttcccatgtccctttttctgactagatctaaaaattatttgaacaataactctaattcggttcttatttttaaatcaaaattttaaaaatggaatatatattttttaatttacatttttatttaataaaatgccgaattcgagtttaggtcccaccctatcaccatcctgttcctcctcctcaaccacccaaatggcgccgccgaatgttcggctcccgtattgtccgcccaaccatggacagttcatctgctgatgtttctgctccggcaagcaaacacagggtgtctgtccaattagtcatatttggggataggattttaaaattaaaaatgttaaaaacaaaatgccaaagttgcgagaaatgccgaaattatacaaatatatgttgttaattagcgcactaattaagtgtaattttgggaattaattagggggatgagttggacccgtcggacaacacactgatgaacactgctgttgtggtgcgcccacgggatcgtcaacatttccggcacagcaatgtgcccccggtgttaaacattcttgatcaggcaaccgatctgtacggtgatctttttcggatggtaatcgatccggaagggattaacggaggcagcggcggtggtgcgcaagtcataacatcagacgaggaggaatacggacgatgatagcagcagctggattttgttttttttactcttgattcactggggattcagtttttggcattaaaaattgcaaaattggcactttattggtgccaatgcatttaaaaatttaaaattaattaagaatatttaaaaaatagtttcgaattttgccaaaaaggaattcctgatcatcctttaattgattgtcttttctcaaatgattatgatttattattattcccatatcttttatctgttcctcattctgattttctgttctcttgtatgatctggatttttttattaaaataaattatcttttgaaaattatttttaaaacaaaaaaataagttaatgaatttttttttaatttttt

SEQ ID NO: 43214 - DNA, 1156 bp, Heterodera glycines
  unsure (1)..(1156): unsure at all n locations
cgtacctgagattgggagctttgttactgtaacttaactgttgtcgacaataattgcaaaaaaaaaattaaaatagttctttattattttaattatggttaaagaatttccaaaaaatataagggacaagaaaaaattttgttccgttttttttttgctattattgaccaaatattttccctatcatcatatgtaaacttggactgtcatcattttttcagtaaaatacggcattcttttaccttgtgaatttgctatcactttcaacatttttttttctgaatataaacatttgggcttatttttgtcaaagatttatttattcaaataaaattgcaaattaagaattaaaaataaatcgtgaggcattttcgtcaactttacaaatatttatttaaaaatattttttgctttaattaataaattttatatgtaaaaaaaatgagggggggggggatttggcatgcgtcccttaaagatattgttggcaaatgattgccaaatctgtgctgcgctgaaatgcttcaacagttggggggaggggggcagaatttggcaggatacccttaaacagtaggaagattttgccaaccttcaaaattgctttccttttaaatgctttttcatttatttagcaaatcccattttcatttttgcattttattttgaattgctctctctctctctctcttcccaatgaattttatttatggaattttcggcatgattctcctcgtttttgaatgtgtaatttcagatggtggaaactcagaggtgattttggtttttttttttaagcaaatctccaattttacaactctggtatattttatcttattttcattttttacgcatttgggtttttagtataatttaattaaattttaaaagtcacttttaatcgacagctgaaaagtgatgacgaatttgtcagtttcttgaaaaatgacttaaaaaaatatcaaaacggaattaacaaggatgcaatttaccaaaacacaaattgtttaatttttgaagcgcaccttggcgttttgtgtttgatgaaaaacaattggaactgtgagaaaaaagtcaaaaaaggcaatgaagaaatatgncaaaaatatagcagatatatgctttttttatatgaatatgttatacgagtgtacta

SEQ ID NO: 43215 - DNA, 1113 bp, Heterodera glycines
  unsure (1)..(1113): unsure at all n locations
cctgcannggtctctgttaaaaaacactcaaaattcggttttttcccggccgtgactatcggcaaatcattagtcatagatttctttttctctatttttaattttaaatcaaattttaaacatttaaatattttaatttaaaaaatgcaatggaaaaattatttaaaaataaataaaaataattttccaattttattagctgaaaagagttccggtggatgaatgtgaaaacattggaaaggaaaagaggccaattgcgggcggagaaacgtcgtcaaattccactggcagcggagagaacaaaatttgggcacaatcgccgcaggggaaaattggcaattttaaattaattatttttaaaatcaaaattataaaaataaatgttaatcaagccaatcgatatgaaaatgttttgcagttgttttcgaatgcggcagcagcggaactgaagaaacgaacagttcataaaaacatggaaaagtgtgcgtggtgagacgaaccgaaaatagtctcagtgtcaataaaaataaaaaatatttaaatttaattatacaattcaattcggtctcgaaaaatataattttaataaagacaattattttaaaaaaataaactaaaataaaaactttccacctccgaccaaaaaaaagttacatcgaaacgaaaattttaattttaaatcttgaagctacaaatgaagtggcaagtaagtttacttattgtgctttattcatggaacaaaatctagcatttattttttaaactgaaaagcaataaaatgagaaatgagagatcgttgcgaattaaaaaacgacaaaattatcacaaaaacgacgaatttttgtgtcatcctttccaattagcgtcgttgtccaaaatttgatgcaaaatccatcggaagagtcgttgtcggcgtggcctcagacggaaattggaccgcatctcgtgaccgtattccaccagcatatggtagagggtgcctaatgacaaaagggcacaatttgtgtgaaaattaggaatttcatttttttaaagtgagtttttttcccatcaataaatttttattttgaaaattttctttaaaaacccaccgactgcgacacaacggacacg

SEQ ID NO: 43216 - DNA, 1252 bp, Heterodera glycines
  unsure (1)..(1252): unsure at all n locations
cccagaaaaatggctatctctttttttgataaattttatacacatacaaatgctctcgagcatgatagggagggcggtgcgcaatagaccttttatttttgagggaatttttaaatttatactctatcccagaaaaatggctatctctttttttgagaaattttatacctcacaaaagcgcttgcgtatgagacggagggctgtgcacaatcgccattttatttcacagaggatttttatatttagaggttatcccagaaaaatggctatctctttttttgataaattttatacacatacaaatgctctcgagcatgatagggagggcggtgcgcaatagaccttttatttttgagggaatttttaaatttatactctatcccagaaaaatggctatctctttttttgagaaattttatacctcacaaaagcgcttgcgtatgagacggagggctgtgcacaatcgccattttatttcacagaggatttttatatttagaggttatcccagaaaaatggctatctctttttttgataaattttatacacatacaaatgctctcgagcatgatagggagggcggtgcgcaatagaccttttatttttgagggaatttttaaatttatactctatcccagaaaaatggctatctctttttttgataaattttatacacatacaaatgctctcgagcatgatagggagggcggtgcgcaatagaccttttatttttgagggaatttttaaatttatactctatcccagaaaaatggctatctctttttttgagaaattttatacctcacaaaagcgcttgcgtatgagacggagggctgtgcacaatcgccattttatttcacagaggatttttatatttagaggttatcccagaaaaatggctatctctttttttgataaattttatacacatacaaatgctctcgagcatgatagggagggcggtgcgcaatagaccttttatttttgagggaatttttaaatttatactctatcccagaaaaatggctatctctttttttgagaaattttatacctcacaaaagcgcttgcgtatgagacggagggctgtgcacgatcgccattttatttcacagaggatttttatatttagaggtcatcccagaanaatggctatctctttttttgataaattttatacacatacaaatgctctcgagcatgataggggagggcggtgcgncatagaccttttatttttgagggaattttt

SEQ ID NO: 43217 - DNA, 1613 bp, Heterodera glycines
  unsure (1)..(1613): unsure at all n locations
tgtttatgtaatatttaattattgatttccaaaataatgtaagcttttcgaaatgcttccgcggactttcattctttcgggacattccaataagcactgtatggggggtaatttgtagcaaatgctaataaattggtcaagaaaatttatagatttcttcaaaagtcataaaggtcgaaccaccccccattcttgcgagccttgtcgcaccctcctcagtcgtgtacgcccccccgggactcttcggtttctttttcgaacaccgaatttggatgtcatcattagggatgggattattaggcaaaaggctagttaaagaagagctccccgtggcctgaaatgctcgaaaaacatgtattttttggctgtcgttaaggtacttttcgagttatctctgcctattttttaagaggttgattttaacgcctaaaaagcataaaaaatagagaaagaacctatctaggcgtttgtgcccaaaacttgtttatactagtgcaataagaacgaaaaatccacccctaaggatcgcccacacgatcttcaagaacacagcgctaagtcatgaaggggggagcgaggaagggaatgggcgcatttccccctcttcccctcgcccactcctcactctaaccggggcacacattgcctacctcgtccactttctccccccccccccctccattatatttacatcaattttcctttctatcttttcctgtctaattcttctgtcctctcacttactctctcctcccctttatttcttctttatctgcagaataaaggaattctgtgattaattgtttgaatatgtagctaaaaaagagtggatgaaagagcctaacaggaggaggggaagtgtcgagagtatttttaaatgtttgtgtaaagcggaagtatagacaaaaggtgctgccgcttttgacaaggattaatacaaacaccacaaacgacacgcgattaagtacggctcgaattcagtgccaactttttttgacagagaaattttcttaaattcaaaaaaggggcgtttccatccttgatattaccaaaattcatcgtgagttgacaccccaaaacacactggaaattgagcccaatttacagtgtattttagtgtgtcccgataaccctaaagaaaatatggctgaaaatataacccaaccactaattataattggtttataattgattcagcaacccccgccccttctctccttttattggtttttgtccagggttttctcgcgttggaaggtattttccctattttcattgtttctaagaaaatgcacaattaggtaattgcccatcacattcattcattcattcgccttttcgttactcggcagatgattgagacctttttccctttgttttcatatgaagttgcgtctcccaacagacaatggcattacttgttatgtatttccttttaaatgggactggaactgacctgaattttcccgggttctaagttccggttttttanatgccaatccctttgccggtatggtcgggaaaggaatgaggtctgagtgaaaaattgtggaaatcaaggaatgagaggaaacttaaaattttttcattttttcaaaccatttcttatacct

SEQ ID NO: 43218 - DNA, 1292 bp, Heterodera glycines
cattttatgaacgatggtggagagaaagagatggctgcttttacggtcgtccgccacaatttacgataaattgagaggagatatatggtgggcaaaagaagggaaagagaaacgcacgcacgcggggggagggggtaagagagaaaagagagggagagtgaaatggagagagagaggaagggatgatagagaaggagaaagagagagagagacggtgtaggatgaaaggacggaaaagatgaatagctttttaagcacttggacccatcccaaagatttgacttcttcaagggtttggtatccaaaacaacaccaaaaaacataattttttaattcttagagagtcacattttaaaaaaattttatttgcggatgacgacatggatttatttaatgcaatttagtaaggaaatgtttaacttttcaaaaaattttctcatttttcttgacaatttttgatttaagccccctccctggctaacgggcaggacaaaagaaaactcatcaaaatggccccactgattggtatttgtcctcgcgatctttgcaacgcacaaaatactggcgaatgtacggcaaactttggtcttgacgacggattctaaaacaaaaagaaaaatgtgggattgaaaaatgtttaaaccaaaaatatatacgtgatgagtgttgggtcggcgataagttggtcggcgaatttgatgacagcatcggaataagtggcactgaacagcatacattggcacgatgggttagcggagataatcgcgctaaatcgggaggggggggggaatgaattaattggtggcaaaagggacacaaggactaggcccgtagccagaaaattttttctccagtgtcatttttcaagatttttagcgcttagcgaaaacagaaattgtagcggttttgcatcaaaaaatgctgccattttggtgtaaattttcaaaaaatattaatacaatggggtccggcggtgccgacaggaaagtttttttttgaaattttaatgaagtccgataagaaattgagtaaaaattttcaaaaattttttgggaaattttaaatttttcatttccggggtgggggagagaatttatcctcccactaatggcaccgacttctgtatgcgaatgcttttgtcttggtatccctgctggccgatcattacgtccgcctcatccaaagcaaaagagacgatttttgaggcatcaatgtgttttcttggggaaaatatgaatttattaaatattgctagcggagtctttcttacccgcatcatccaatcgagcatt

SEQ ID NO: 43219 - DNA, 908 bp, Heterodera glycines
ataaacagggctgtaaaaaatatgcacgaaaagtagccaaaatatgcgcataaatatgcagataaagtcgtgaaatatgcacaaaaaacttgaaaattaggagtgaaaatgaatttaaaaaatttatttctcataaatatcgattatttttgcaatttcaaatcaaaaatttctcaagattttcagtagtgaagctcactgttgacctactcgcgcacccattcaaatttattatttaatttttggataatcaaattttttcctaagggatatttaaatcggaaaatatttggcgaaaatggcaaaatatgcaaaaaatcggaaattatgcacaaaaaatggcaaaatatacacgaaatatgcacaaaaagccaaaatatgcaaatatgcacaaaaatcccgaaatatgcaaataaaagtcccaaattttataagcaaataccaaaaagaaggtgttggacatagaatccaggaaaaaaatgcatttgcataaaatttacagccctgcttataaaacattccgctgtaaacaacggatggaataatttaaaaaaagatcctttgaaaattgtaaaaagataaaagaatttaatatccataatttcactgtcatttattaaaattaaaataatttaaaaaattatagctttgctagtatatgacaatgctcgcttaattaaaatggaagttttgagtttaattgttgaattcaattaatttacctgtttcattttggtgtatgattattttttattaataaaatatatttttccattattaaaggatatttttctatttatttaatggcacttttaagtaggcaaaattttccttaaaatttttcaatcttgtgcgatacttcgtgagcagtaaaatgcttcgttgtcgcacttgccaaaattattttt

SEQ ID NO: 43220 - DNA, 764 bp, Heterodera glycines
cggaaatgttgacactttgaatgtgtggaggagcaagtcaaggcttttttgcaagtcaaaaaagcaaaaaggatatgcaaataaattttaaccattgagaaataaaattgtttttctgtaaatgttaaacaccggcgatatattgaacaaacactaattctaattaattaataattacgattattgggatgagtggagaaggatatgtatgcttgttgtctcgataaaacggcttgttttcgttggtcttttcaacttgaattatgggcatagacaatctttgtatgacagtaataacacggcaaattttgatggattgcgcgttaagtccgaaggtttgctaatcgtccataagtttactgatcaaataaaacgataaaattttattaatgcccgcgcatttccgcaacaaattaatggtaagggcatactggtcaagaatgagttcgagaatgccgaaagggcaaatttgagaagatagggcgggaagattaaactttggattgaaaattgaatcgagaaaatttaaatgaaactcgaatattcagtcatcctattgtccctaattgggtaggacaactaaattagcagacaattaattctatttcttaatatcatttacgaataatgaaatgctaagagtattgagttttatttgctctctccttgacccatcatatgcaaatgggtgaagaatactcacatatattatttgttgggctgactgactaatgagtgagtgacggggaagggggggggggggg

SEQ ID NO: 43221 - DNA, 941 bp, Heterodera glycines
catttcgataactgggactcaacccaccaacaattcactcactggggatcaactcaccaacatttcaatcacacgggactcaacccaccaacattccaatcactgggactcaacccaccagcatttcaatcaacgggactcaatccaccagcatttcaatcactgggactcaacccaccaacattccaatcaacgggactcaatccaccagcatttcaatcactgggactcaatccaccaacatttcaatcactgggactcaacccaccaacatttcaatcactgggactcaacccaccagcatttcaatcaacgggactcaatccaccagcattcaatcactgggactcaattcttctgcatttcaattactgggactcaattctccgacatttcaatcactgggactcaacccaccaacattccaatcactgggactcaacccaccagcatttcaatcaatgggactcaacccaccagcattcaatcactgggactcaacccaccagcatttcaatcactgggactcaatccaccagcatttcaatcaacgggactcaatccaccaacattccaatcaatgggactcaatccaccaacatttcaatcactgggactcaacccaccaacatttcaatcactgggactcaacccaccagcatttcaatcaacgggactcaatccaccagcattcaatcactgggactcaattcttctgcatttcaattactgggactcaacccaccaacattccaatcaacgggactcaatccaccagcatttcaatcactgggactcaatccaccaacatttcaatcactgggactcaacccaccaacatttcaatcactgggactcaacccaccaacatttcaatcacttgggactcaacccaccaacattccattcacggggactcaatcccccaacatttcaatcac

SEQ ID NO: 43222 - DNA, 1000 bp, Heterodera glycines
ctatcagcgccgccggaccccataattcctattttttcttaaaaaattaggcccaaaatcgcaaaattggtaatacgccaagcatcattcaaaacctggaattaatatataagattttatgaaattttttttgacttataacttgttgaatattaaaccaaataaagcaattttgtgctcattttgaagggaaaattctgaagaatttataagtttagtttgatttgacatttttgcgtttaaaacccattaattggctaaaaaataaattaaatttcaacaaggtaaaaaatttttcccacaggtacaattttttttaaattttgcacaaccccatattttgaccccccccccccccctctatcgaatccctgtttattttttcgagtaatatttttaactcgagatcggctcttctctttttagaagggaaaatcccaaaaaagattttaagttagcaaagttttggcgttctatttgctgaattaaaaataaacttatttacacttggagcccaaaattgacttgccgtgatcaaaaaaccacaaaaatccttaaatttctcaaaagtccacaaaaatccgcaaatcctcattttccaaaaaatcctctttgaccctctaaaagaccacaaaatgaggaaaaatcctcagatatcacatctctgggttaaactttatgagagccaaccatcgcattttgcggtcgcgtccctggtaagaaattgttttgtgttaccagttttttttttgttgttaaaaatgaagagctaacaacagagctttctttacacaaatgtaagtaattgaccattgaccaaaattgccatttagccatttgtgacccattaatgtttagaatatcattgtgtgagtatttcacccacctcattcccttccttttttcaactctctctattgattcaaaattttagcgaaaaaatatttgtttacgtaattattaccaaatatctctcctgtcttcgtcatcagcgaatttg

SEQ ID NO: 43223 - DNA, 1265 bp, Heterodera glycines
ttgattatgccggaccatttttcgggaaagatttcctgattgtcgtcgactcattttcgaaataccccgagtttttcgaaatgacgaccaaatccgcggccgcgacaattgatcatttgcgttatctcttcactcgtcatggaattcctgagacgctggtatcggataatgggacgcaattcgccagcacagaatttgccaaattcatggccaacaatggaatcatacacctattctcggcaccgtacaatccaatgtcaaacggacaggtggaacgatttatggacactttcaagagggcttttaagaaaataaaagggagggaacggcaaataaggaagtgatcgaaacttttctgatcacttaccagacgactcctaatgattcgctctcggaatcaaaatcaccagctgaaatgcttctcggacgcaagccgcgtaccacgctggatctgctcaagcctcctccaccaaggccaacggagagagatgagaaaatggagcgaaatttcaaccgaagatttggcactcgtactcaaaattttggacctcatgaaaaagtttgggcccggcaccgtctatcgcaaaattggaaggcggaaccatttttaaaagcgccggagtgatctacaaagtgcgatttggcgatggaacagctgggcgcttccacgcaaatcaactccgcaggcgtcagacatcaactgatcagtgcccattaaatgtttttaatgatgcatttaatttgccaattccacgggaaaatttggaagacgggcaggaccctcaaaatatgcctgaccctattggggaaccggacaatgttgtggaacaacaaattgtagaagagcagcagaacattccgcaaaatcgccgcagtcgatcgccaccgccacaacaggtgcgacgtcgttctgatcgccaccgaaggccacctgtgcgattttcacccggatgagaagacttaaaaagggaggtgttcgggtggtaacacccaaggaccaaaaggaagacattttttgttcttttgttattttcttttgatgtctcactctctctctgttccatagtctctaatcgctgtctctgttcttctcgtactctgacctattgattaaatgtccatccttccccatgatgcattcattcatggtctcaatatatttttgttgttctctcttctccaaatattgtgcttctccgtccaatttaatttatttatttgttatttaattttcttcaaataaatttgtttgttaaattgttttt

SEQ ID NO: 43224 - DNA, 1169 bp, Heterodera glycines
tgaaatttaaaccgcaaaatatttcgggttcataaaaggcacgacgattttttcgaaactcgttcagttcaatttcatgtccgaatttaaaggtcgaaacaatattttcaaccgtgtgtccggtgtaagaagcccccggacaccccaagcccttaattatttctataaattttttaatagcattttcgcagtctatcagacttttcgtccccagacatatcatttttccggattcccataataatgccgtggctttgataggagttgtacatttgataaccgcggcattgaattttctagggttatacttaaattcgcattcggtgatcgtcagagagtttagtttaattccggtaccgagattagcgaaagcaattatatttacgattatcggtttttgcattttttgatacaatgtaccaatcaaatggtcctttcactccctttatataccccttctataaatagcaaccaaaaataaaattaaattgaaaaaatgaactgtccacataaaattaagtgttgtcattactgcccctgtcattacgagatttgtaagagatgtaaaagccacagtcttttgcatttcggtacatcattttttgataatttctggctatgccccaaatgcgcgaaacatgttccctatgaaaatataaataggtcaaataaataagatgcattaaaaatgtttcgcggtccgttcactctaattctctcgggggctactgggagtggtaagacccgttggctattacagtttttaaaacatcataagaatctaattgaaccatcgcctaagaaaattctttattgttatggtgagatgaatgatagtattttaggattaatcggggagggcgttgagacttttaacgggattccggacatgaataagattaaagaacaggaaaaaccccttttgttaatacttgacgatttaatgcttaatatgcagaatactttcctcgatctactctttaccaggggctcccataattggaacgtaagcgtaatttttgtaacccagagtctctatggtcgggacattaaaacggcaagagccaacgcacattatctggttttaatgcgcaacccttctggccaattacaagtgagaacattggggtcgcaactgttcccaaaaagactgaattatttcatggatg

SEQ ID NO: 43225 - DNA, 1238 bp, Heterodera glycines
ttactttccatttcacctcatttccgccaaaagtgtaagtggcacacgcccttcttttggttatttttatttttgaataaataaataaataaattgcttaaataaattattttttataattaattcgaacaaaacatttattaactttacgcaattttccaatcacgtcacacaaataataaagaatgcatatttacgtatcgcgttctttatttcgggttattaaatcaaaatcttctaggatttggattattttgtacaaaacaccgttattggaatatgctcctgaggtttggaatccatctcttctaaaaaatattaaaaaaattgaaaaatgtcaaaaatatttcaccaaaagagttctttttaaataaatgcagccttccacccattccataccaacaaagattagaataccttcaactcgccgacacttgaaagcaggcgaaagctgtctaatctgttcacggctcataaaataatttatggccgaacagatcttaatccctttgaaatattcaaaccttctgaacgctttaacattcccttttatagacttaactcgaaatataaattaggcaaaaaatttataccttttgcggggcgggtaactaaaatttggaaccaactcgataaaaagcttattgaaataaactcattaaatcaatttaaaaataaaattaaaactatttcattcctgtaaatagaccggaaaaattaaagtcgattttttaatccattcaaactaaaagtgatttggtcgctatttatttatttgtattgatttcatattatattttattttggcggtgatctcgttttaattgttttgcactttcttgaggacatttttaattaatgttttgtcctcaatgtaagcggattttcccttttgtggactcttttttctttactgacaataaacaacaataaatcatcgtcttggtagcaaaaaaacaacaacgtaacaccaaatcggccaagcaaatggcgtgctgaaagcttaaattaaaaaaaaatgcatagggcaatgaatagcgctggaaaatagtaagcttattgttagcctaagcctaggcacaagtaagctaaataattgtacgttttgcaattttttaattttttgcctgacacattgaccgatcccttttctacctgaggaaatcgtgtgcccccaaatgaacgctcatccgtcttgaaaggtcatcaatttggacagatgaggccagcgcaagcca

SEQ ID NO: 43226 - DNA, 1072 bp, Heterodera glycines
acacggccgtcgtcgtcaccttcatcgaagcccaaaagcgaaggtgagggcatccacgtctgcattagtgggaccagcatacggtgggccgcccaccgactatgacgacgacgacgatgccgaagaatttgggggcaacgacgttgacaatgacgacacttctgctcgctgatgatgtcgacgacttcttcagcgtggtcggtgtctgggagcgggccgactcccggtcgcgtgccacgcagaccgagaccatccaagtgcgcttccacaactgggagcggaggcgcggcgccccgacctactgctcgcacgctgcatcgcccgtctgatggcgcgcgtgctggacgggcgtgcggagccgctccgcgtcgggctgtccgtacaaccgcccggctgggacagctgcttccacgtaccaatgcgcccgccacagcagaacagtgcgcacgcgctggcggccgcccttgaggcgttcgcaaagcagtacgacgagctcgacctgttctccgccgacgtctgcttcaaagtgtcggcggtgtgggccttgcccggtgagcatcccccacccctgtccctcaacaaagtatgacccctccccccaccgtttagccgcgcgcgtggagggcgcatgtgccgaggacgagcagcgcgcacgtggcactgtccgctgccaatcctttgtgccggttgtgaacggggcgggcggcgaccgctggtgcatggcacgggccatcgtgctggggttggcccagcggcgcatctgcgtactggagcggcgcaacgtggtccacttccgcgccttctgtctggcgcagcgtggcgaagcgggcgcgcccgaagcacgccgtctgctggaggacgcagcggtgccgctggaccgcccaacgtacggggctgccgaggcgcaacgagtacagcgctggctggacgccagcctaggcgcccaccaagtgcggctggtcatcttcgcccgcgagctggcctaccgcgtggcgtgtaagggcgcgcgcccggcacgctttaacctgtgcttggtggtacaggacggccactacgggaaaatacagtgccc

SEQ ID NO: 43227 - DNA, 982 bp, Heterodera glycines
  unsure (1)..(982): unsure at all n locations
tttgcatatgagggggatgggttgaattaaaaaaaacaacctgaaatttactaaatcacattaacttcaactatgaaaacaaatgttcattgaagaaacatatatataaaaaatatcttctaatattccaatgtaatataaaattaaaaaaaagtaaaaaataattaatattattgaaaaagtttatttattttactcaatttttgctaaattctgggccccaattaaatcttttctcagattttcaagttttgcaacaatacactgatcaagagagttatattttcaaataatatgacaaaaaaaatatataaattaaaaaattttaatcttttaaatttataacatgattaaggagaaaatgccaatttatcacagaacaagatttatagaagcaaaacaaaatttaataaacaaattttgtaatcatatgcaaaaaaaaaatcagctaaagctgttcaaaaaatctcataatatttataaagagattctgatgtaatggcacacttattacaatttttattctaaaatttaaaaggaattataaattaacaaaaataaatttgattattatgaaaaagcattttgcaaatcggataaataaaaattgataaaatcatatgaaataaaagttttcaaaaacatattagaattcaatttcaattttatagaaaaacatctatttatttttaactataaatggtaatatggtgtaataaagaaaaacttatttaaaaataactttcggattgaaatagcagaaagaaagaatcggaatatgctaagaaatgttaaagaatttggaacattgagaaaatattccgtggtgagacaagtgacaaaaatagcaaagattgaaatatttaaatttaattaatattttttattttatttgataaataataagtcataatttagcttaacttatttaattaactaaacttggcattanaggtagtaagttctacgtatctctaccata

SEQ ID NO: 43228 - DNA, 767 bp, Heterodera glycines
  unsure (1)..(767): unsure at all n locations
cttttacaggacattggaaaccgtgatccgcttgaatatcttcggcctgtgcttaccatttgcacttttaaattgaattaagcattttttaaaaaaacgaattcactgacgaaatcgtccactgtcgaatttgtttgaaattaaataggcgtttaaatatttagtttttttgtgatgaaaataattaaatcatatcattttatggtgcttaagcccattttttgaataaaacaatttctcagctattaaaataaaactacacaaagaaaattatatataaaaaaatgagactgaaatataaatagccactgacgaaaatattcactgccgaattggaacactgacgaaaaaaatggaaaactgtgaaataaataaaaatcgttcactgacgaaaatgtttactgacgaaaaagtatagcgccattaggaagaatgaaaacaaaaaattaaattttcaataattaattatatgaatttaaataaagtattttcaaattacattgattttccaaaaaataatatattttttaattcgaatttttttgttttaaattcttgcgaatttgaatccattgataaatgggttaagtgatggtacaaattgccagcatttgtccacgatgngactgagttgngctgtgcccagctatttcttcgacctgtgccgtccccgcgctgtccgaaaagtccgcctcttcgaaattgtctccgtaatattccgcganttgctctttgaacgcgtccataactttgaagccctctctcat

SEQ ID NO: 43229 - DNA, 220 bp, Heterodera glycines
agcagcaacggcggcatcgccgagccttcggcgtagtgcagccagtagcggtaggcaatgcgctcggcgccttcggccggcatcggtgacggcgagagctggcgctgggtgtcgtagcggtcggcaaggtagtcaaggatcgcgccggactcggccagcaccagctcaccgtcctgcagcaccggcgacttgccgagtggatgcacgttgcgcagctccg

SEQ ID NO: 43230 - DNA, 1710 bp, Heterodera glycines
atttcgcctttcgcattattcgcattttttgggcgtttcccatttcgcttttcccatttcgctttttgggcgcgaaatgcgatttttacacccctaagaattggattaaattcccataaaatttttcaaaattttacctataaattggctaattttcagtgaaaaactgtttataaatgatcaaaatttccaattttttccccggcggcgcctatcggcaccgccgcgcccccaaaactcctattttttcttagaaaatggcccaaaatcgcaaaatttggtaatttgatgaaaaactgttctcagcggcgcgccaaaactcttatttctcattagaaaaatgataaaaatcacaaaatttgatcattttttagtgaaaatctgtcaacaaattttaatcaaattttcaaaaattttcccggcggcgcctgccggcggcgccgccccctcttcccaaaaagtttttttggaaaaagcgcgcctcaaaaaaacgttttattgatttttaaatttggaataaaattttaaaaaatgatttttgctttatgattttaactattaaaaagttgtagaaaaaatttcgcttttcgcatttcgcttttcgcattttcgcatattttggcttttcgcatttcgcttttttttcatttcgcatttttcagtttcgcaaatttcgcttttcgcatttcgctttttatttttcaatttggcctatctgaactggtgctcacccaggttggaatttgtcatttcctgcaataaatgtttttatataaaggtttaaaaaatttgatcgggtttagaaacgttcaacaaatgcatagataaattttttgaatattatacaatcgtgctttttgctctctatcaatttattataaaaaaattcaattcccttcgaaattgaagccagaatgcttatttgaagctacgcaaatataaattaatatttgctataagaactgactatttagtcaacagaaaataaataaatcataaaattagaacaaaaaatgattttattttagaatgcacactgaagatgcataataagctaatatattcgaatttattttgaaataactgttcaacaaatgattagttgtttctaagaaataatgataggaagcttatctgaaatgtgtgctcacccaggttagaatttgtcatttcctgcaataaatgttttcatataaaggtttaaaaaattcgatcgggtttagaaacgttcaacaaatgcatagataaattttttgaatattatacaatcgtgctttttgctctctatcaatttattataaaaaaattcacaccccttcgaaattgaaggcagaatgctcatttgaagctacgcaaatataaattaatatttgctataagaatcgactatttagtcaacagaaaacaaataaatcataaaatttgaacaaaaaatgattttattttagaatgcacactgaagatacataataagctaatatattcgaatttattttgaaataactgttcaacagattattagttgtttctaagaaataatgataggaagcttatctgaaatgtgtgctcacccagattggaatttgtcatttcctgcaataaatgttttcatataaaggtttaaaaattcgatcgggtttagaaacgttcaacaaatgcatagataaaattttttgaatattatacattcgtgctttttgctctctatca

SEQ ID NO: 43231 - DNA, 1222 bp, Heterodera glycines
ttcaagttgtagttcgaattcgggtccggggttcggaattgggcaaatccgagtcagattcgtgatcagcaccctcgaaaacccctgtatacctatttttagctcaaaataaaaaagttaaattagggacccccattcttcaggattgccgttcgaagaaaattcattttaaatagattgaagaaataatgatcagtgtgtttgcggctcagacaattgcgcccaattttttcaagtcctgatagcctaaacagcattgtataatttccgatctctagacacaacaatatccaatatacagcgtactcaaagaacaatgatttaacggaaattatatttaatgaatgggatatcaacgtcttcgttttcctcattctgggtcaacgcctcaagaacgatcgctcggcgatggtccggcactttgccacgagacacttcctcgaaaaccgcaataagactgaagtttgacaattaaacagaaacaaaaagccaattaaaactcactccatgttcttgcgctcggcaactttttctgcgggctgaaagaacgcatacaaaagggagacgccggaagaaatcattgaaacggtgaggccactcttactctaaacgaacagaaaaaaatgcaaaaagttaaacggtggaagcaatgaccacctcaacccaatcaatcagttgccccaatgtcatcggtccgtcaacttcgaaacggtcccaaagagtgaagtcaatgtcgaggtactgaaaagcggagaaaataacgaatgacggaaatagcccaaacagaatcaaaactcaccttcttcttctgcgctttgcccggctcgctgaacgcaatgaaaggcgtagccaagttgataaatgcatttttgatgtgttcgatctgagccgtcgagcgccttccatccgcctcaatggttttgtagagttcgatgcagacgagccctgagacgagcgcagttgtggtggccaacgccgggatgattttgcccgcaatttgttttgtctgaatgcgaaatcattcgggataaatccgtcgagaaatcaatccactttcatccgatcagccttttcgatgtcgtaattctcggctcgcaaattggaggcactcgtcacgaagtcgacgtggtggttggagtcgtcgtccttctcaaagtcaatgggcgtcatgcggcgaatttatgcaacttcagcctggccaatttcacgttcagatcgttca

SEQ ID NO: 43232 - DNA, 950 bp, Heterodera glycines
  unsure (1)..(950): unsure at all n locations
tccggaacggattagcatccggggttacgagatagaaaattgtcctaaaaagagatagccatttttctgagaattaattcacaatttctgcagctcttagggtaatggaaaaaattttgaagaggctctccggaacggattagcatcggggttacgagatagaaaattgtcctaaaaagagataaccatttttctgagaattaattcacaatttccgcagctcttagggtaatggaaaaaattttgaagaggctctccggaacggattagcatcggggttacgagatagaaaattgtcctaaaaagagatagccatttttctgagaattaattcacaatttctgcagctcttagggtaatggaaaaaattttgaagaggctctccggaacggattagcatcggggttacgagatagaaaattgtcctaaaaagagatagccatttttctgagaattaattcacaatttctgcagctcttagggtaatggaaaaaattttgaagaggctctccggaacggattagcatcggggttacgagatagaaaattgtcctaaaaagagatagccatttttctgagaattaattcacaatttccgcagctcttagggtaatggaaaaaattttgaagaggctctccggaacggattagcatcggggttacgagatagaaaattgtcttaaaaagagatagccatttttctgagaattaattcacaatttccgcagctcttacggtaatggaaaaaattttgaagaggctctcaggaacggattagcatcggggttacgagatagaaaattgtcctaaaaagagatagccatttttctgagaattaattcacaatttctgcagctcttagggtaatggaaaaaattttgaagaggctctccggaacggattagcatncggggtacgagatagaaaattgtcctanaaagagatagcca

SEQ ID NO: 43233 - DNA, 1060 bp, Heterodera glycines
  unsure (1)..(1060): unsure at all n locations
ttcgggttnnntagagcagttttcgcccttagttttgaccggacactatcaatcgggcttgtattttgtcacatgtttgatcaattctcggcataatttgtttggtatgccactaattgttagccaattaagtgccccccccatatttggcctgatcatttggtcacagactgtcccttacagatttgatcaacaacaaaaaatgggaaaagcaaacgcaccgacactcgggaagcagccttggagcaggtccccggccagcacaatgtacagaatgcaacttaatttgttggatacttaggttgtggcacatcggtggggcaaaaagataggtaaaagaattgataaattttaaaaaagtgccaaaaatgggggaagtttttttaaatgtcctattaatattcatttgcttttcgtctgcttacgtgctcgcaagttcggtcagctgcgcgatgagtacaaatttgccaagccccggtcgcaccgcctcggccacttcccgataactgaatttttagggacttcagtgtcgtttctgggcaactctgttctcttaggtaaaaatagactctcgaacatctccagcagggatggcattccgaggcacaaaatttttggaaatcggaattctgtgccatcccctgatctccagtgccttctgctactgcccaagcgttcacctccgtctcacttttcgtcgcctcttcattttctgctgcgatgagtgatcagtgccgtcagtcgggcagtcctcgtaaaggcactcgatcagaatcagaccctggcaaaatgataagcaaatgaacggtagaatatttggaactgggaccgatggagaaaagtgccaggttttggcattaggtaagaaaaaaaactaggccggtcggtgtccatgcaaaagtgatcaaaatcatgacgctaccggacgacagatgaacaaaaaagtactaacagtgcggtagcaaatccaggcaacgccggtcagcgcgagaatggcacaccatccgccaattttgacggcaaacggcagcccgacgatgaacatgcctggaagacagtt

SEQ ID NO: 43234 - DNA, 1197 bp, Heterodera glycines
ttaaaagaggtacaatagtgattaaaagaggaagaaccttcattagaagaggtacaaaagtgatgagaagaggcacaaccgtgattaaaagaggaagaacagtgattagaagaggtacaaaaatcattaaaagaggtacaatagtgattaaaagaggaagaacagtgattagaagaggttcaacagtgattataagaggtacaatagtgattaaaagaggaagaacagtgattagaagaggtacaaaagtgatgagaagaggcacaacatggtttaaaattaaataaataatgaaaagtttttataaaatcgattgcattttaatttaaaatttttttataataaaatactctttttattcattaaatataattttgaaaattaataattgaatatttattttgaaatgaaattcattttttataaattcaaaaaataaataatgaaattaaataaattaattaaataatttataaaaatcttgaaattaattaaaacattaaaaataaccaaaaaatacaaagaaaaataatgtacaccgcccgggtccgaacttcgcctatatgaaattctatcaattaaaaaaataattcatttaaacttataaaatttattcattaaaaaaaaattaatttaaatataatttttatttattaacccaaaaaatattttaaatgaataaaaattgaaaaacacgaaaaaaatggtagaaaaataatgtacaccgcccggcttcgaacttcgccccccccctcaaaatgatgcctcagaatccccaatcacacagggattctgagggcttaacgatgtaaaaagtaaaatctgatcacgtattcgtgatcagcggcccaaataacccctaaagacatatttttggaagatttttgtgagaaaaatttttccactcaaaaaccatgtgctcccccctttggtcccgaatcacaaaatcacttttatttttgtatcttttttttttaaaatgtgataaaaataccaaataaaatttatataatagagcaaaaaattgcggatttttgtagttttttacttttacagaatgacttttcagaagcgagttctgaaattttttctgaaaaatcttaaattttcagaatttctggaaatactttttttctttttttagaaagaaatcccaaataaaatccataaaaattctcctgaatttttctctatttt

SEQ ID NO: 43235 - DNA, 939 bp, Heterodera glycines
tttttaaattttaatgtgcggctttacggccttacttctaactttcaaagaaaaatgatttataaaaatcgatattaaattattgttattaatgaaaatgtatttatttttatgatattttacaaggtaattaaaattgtaaaatttttaattattcaaacattaaatttttcaatattttaacaattatatgaaaataatttaatattaaatgtaaaaatgctttaataacttattttcttatctgatatattttttaacgtataaataaatatataaatttaaaagtgaataggagcgaattaaatatggctgattataaaaatgggtttttttatttgatgaaaattttgcctttaattataatttaaatttattaagttgatatgtgtgttcgctaataataataatttacagtcttctttaactgtaaaaggaaatgatatacaaaaatcgatataaattttcttttttaaatatattttaaatgaatgatacaacaaaatattaataaaaaatttcatttttatataataatataatatatatatatatattaaattgttaatggttttttgcaattgaaggttcttcagtgcataggcaaataatataattcattttttctcgttttattaagtataattataaaatagcttcaattttattaatttgattctctcgtactgaaaatttttttgtcttaaggtaagtgttcgatgatctgacactgcttaaaacgcatttatatatataaagaattgttttgctttaagagatgaattttcttgtgaaaatgctgccgaaatatggatgaaaacataaggaaacactgataaaaaccaaaatataaaaaagtttaaaatccataataaatagaaaaccaagcttaacatacatgaaattacgacatttttgaccccgtaattaaggttacgg

SEQ ID NO: 43236 - DNA, 1104 bp, Heterodera glycines
  unsure (1)..(1104): unsure at all n locations
aaacatagtttttcgagctctatcgactggtattttttcggaaaaatttcggtttttccggggaaatagaaaaattttttggcctcagcgggacatttgagtcccgggcccataacttgtcagggcttggatttagccaaaaatcgtcttagaacatttttgtagagaattttaagctctatcgaacggtgtgctatatgcccggaaaatttcaaaaattttcgagctaggccccctagaaattttcagaatttttttttgggttgaaaatgggggtgaaattttttttctgggttattttggggtgctgagtacgattatgatgtctattttaagtttcataatttttggaattttttaaaattcgaaaattttttaaatttttttggtccttggaaatttggattaaaatttgaaaattcataactcggtgatggtttcatcgatttaactataataaagccttaaaaatagcaaaaaatcgggagaattttatgggatttatttggttttataatgttcaaaagaaaaaaagttattccagaatttctggaaatttttgatttttcagaaaaaaattcataactcggttctgaaaagtcatactgtaaaagtaaaatactgcaaaaatccgcaatttcttgctctattatataaattttattttatatttttatcacatttttaaaaaaagatacaaaaataaaagtgattttgggattcgggaccaaaggggggagcacatgatttttgagtgggaaaatttttccatcaaaaaccatccaaaaacatgtctttaggggttatttgggccgctgatcacgaatatgtgatcagattttacttttgacatagtcaagacctcagaatccctgtgtgattggggattctgaggcatcattttttgggggggggcgaagttcggatccggacggtgtacattatttttctatttatttttgagttatttttcaatgcttttaattaatttgaagnnatggttgtaattttaaattttttttaataaataatttcattattattttttatctgtaaaaaatatatcatttcaaatttcttaatattcattgcattcgattttta

SEQ ID NO: 43237 - DNA, 1034 bp, Heterodera glycines
aggcaaaaaattttttctatttccggaaaaaaaccgaaatttttccaaaatcccaccaatcgatagagctcgaaaacggttgcttgaaagtggtctcgtttttcccgggaaaaatcggcaaaaaatcataaaatcaaaaacccaaaaccttttaggggggcctagctcgagaaattttgaaaattttcgaattttttaaatttgaaaaaatcgggcttacaaaactctacaataagtccgctggccaccccccgctcagttcaaacgctaatgagttattcgcccggtactgaagtggacaaagttggtactgaaaagttgccaatttctgcagcccttcctattataggtagaggcctggaattttttttgaaaattagacaacacttcaacttaggttcctaccagcggaaactttttgatttatgtttcggaagaaaagttatgggccccgaactgcacgaaaaaacaggaaatcggtcccctaaaaaatcctatgctcacccctttggtcccgaatcccaaaatcggttttatttttgtaacaattcgtaagaaagtgataaaaatgttaaataaaatttatattataaagaaaaaaattgcggatttttgtagtattttaattttcaaaaatttcttttcagaagggggttatgaatttttttctgaaaaatcgaaaattttcagaaattctggaataactttttttctttttaagatagaaatcccaaataaatcccataaaattctcctgatttttctctatttttataatataattgcatgaaaatttatccacccttcgatttgttatgaattttcgaaaattaacccaaaatcccgaaggccaaaaaaattataagagatgcaacagtgattagaagaggtgcaacagtgattagaagaggtgcaacagtgattagaagaggtacaacagtgattaggagaggtacaaaaattgttggaatggtacaacaagtggttaaaaagggtacaatcatggtattaaaattaaataattaaggaaatcg

SEQ ID NO: 43238 - DNA, 1758 bp, Heterodera glycines
gaattttgccccagagccggtaaaaggttaattttggtttcaaatgggcccaattagcggtgattagtttaaaagtaaataattttggaggagttttgtcgaggataggagcaaaatagaaaatgccactaagcccaattttgtgattaccccccccccctcggctcattgccctctcccctttactttccactgcctaaaatcagttaattaactcatttttggtggttacatctttaaatgtttcttttgatgacttttccgaagcaatttccgcaaataaaagatgaatcgtcagcaaaaagatgaagatgagtggaactgatcggcttttgaattggtcgaagctttgaggaaaacattttgaggtggcaaaacaaagcatttgggtaattagtgaatgtgtggcgaaagtgccattgattaattaagccaaagaaaatggcaaaacgaatgaaataatcagcaattaatcttcacctatcaaattggtggtcactttgacaaacgaatgattcattctcccgaaaaggagaagccgaagaagaaacattttcttctgactcaccccccaatcagtgcaagttgtcctttattctcgcccatttcccgtaatcaaaaagtgggtgatggaagtgattcatcctttaagcaaataaattccgggcaataaaatgtgagaaatgcggcggggggggggggggaaccgaaacgggccagttaaaatgtgcaaaaattctgactttttggcagtgttcatgtttcaacttttttataagttgttcaatcgcttagaaataacttatcaaaagcttctaaacatgtagagctttcgaatgataccaaatttataaaatttggcccgcctgaaaaaaagttatgatgtattaagcttggctcagacgcaactgacccctaccgaatagtgggggggggggggagtccgacggcatcaataggtaatttttaatacgatttgttaatagattttgtccgataaatgaccaatttaggtgagtttttaatcaaatttaaagaaaaataggaacaataattctgttattagcaaaaattgatttttttttttcttcaaaactttgctaacgaacaaattatcggataaaatcattttctatcgctgaagaaagctgtttaggcatctgggattgaaaaaattttaaacacgaatatgtttctggattttgaacagtttacaaagagagcgatgtttttatcaaattgaacctttaataatatgttggtcataaaattgcaatagagttaagggtatttcttcccctcaagaaaacaaaaacaaaaaaggtataccaaagtagatttttctccaattgagacatatagcctcgaacaagcctacttatcagcttattgtcattaatttcaattttgggagttttataatttattgaaaatagattctaattttttctttcttttgacatttcggtccgcaaatgtcgcactacgcatttttcagtctcccaacactgattgattacctggctttttaatggcattaaccacggccccctcgttctgtgcatagacaaggaacacatagcggtggaggcttcaaaaccagtcttcatttttaacaaaacaaataaatgaatgaaaatatggcactccttattttaattgtttgtgccaacccgtccctttgggtgccggtcccatttaatcaatgagttgctctccctgcgcgacatcaatgcccggcacattgacaaccaacca

SEQ ID NO: 43239 - DNA, 987 bp, Heterodera glycines
  unsure (1)..(987): unsure at all n locations
cccaaaattaaaaaaaaacccggggcctttaaaaaatggggccaatgtaaattatcccttttcccaataattttttaaacaatgtaaattgattgaataaaaaatattctgaagagaaaattactttttaatttttggtttagtttaaaacttagtaattaaaatatttagaaaatttctattatttttttaattcaaaatttcagatttccgacatttttgggaatagaaattccgatttcctaaaatttttgggggccgcctcgtaatgccatccccgttaagtatgtataaacatttattttttaaaaataacctttttgacattttgtttcttgaaaaattcgtgttccaagcaataacaaattgaaaataagaaatttaaacatttttaattttcttttttagtaataataaaataatataaagactgagctaaaaattctttaatttatatatcagaattaataaaaagccaacaatatccttgtttctatttacttccgccatttttgccaacaatttttcacgtgaagtaatgaaaatgataaaataaggcagggttctcatgtctaaattttgaaaataattaggagggattgcaatttaaataataaaaaccaataaatatgtagataaaaaattaatctaatcgccaataaatagagagagaccgacttttgaggcatgccttttttctgcgcactagttccgatatattaagcataaataacactttttccacttggtttgagacttctacgttgattcgtgccttaaatgccttttttggcattttgccgttttggtgccttttttggcgtttttttccgaaaattcaattaaaaatgcaataaaatcgggaaaatacacccctaagaatcaaaatttcaatcaatcaatcaatcatttatacgcaaaagcgtgacgccgaaaaataaagaaataatgaaataataatatcaaaacaatcattggntcactttt

SEQ ID NO: 43240 - DNA, 1123 bp, Heterodera glycines
acggacccatccgcggcaccgcacacccaccggatttgattttcacgtcctcctcaccaccacaatcccagcacattatttcccaccaaaaacagcaaatcacattaaaagcagttgaccacgccgcagggcatggaaatggaagagaaagggagggaaagggtgggcaggataatgggtgggtgacctgattttccgatcaccttgaaaatgggtgggcggatcccctgatcagtcgggaacagcagcaagcaattttcatcactttcactctctgccaattctcgacatgattgacgacgcgacacataattttgcgtttcagaaaaaagagtcaaatccatcgaaaggaaatcagagagaaagtgacaaaataaaagcaaatggcactttaattgacgagaagggagggggggggggggatttgcaaatttaaatgccaaagagaattttcaaaatttatgtccagcagcaaagaaacaaacaaacggacaatgaatgagagagagtgaaaatgaatcatttttttgtgttataagagaattctcttttgtgtgtggaaaagtaataatacaaaatccattggattaaatccgaagttgcacaagaaatgatcagtggagggagggcaccatttggacacattaaaacttacaataacccaatcggggaagaccttcctttttgagccaaaatcaaaatcctagagacaaggggtccataatctacaaaagtgaccctgaattacagataaataaaccgttcatacactaaaatggtgggaggggaagggggagtcggtcgcagattttgatggctttttttgcttttcaaacccgcttttttcaaaaaaattttggtagggcttaagtgatcagcagtgatcagaattacatttttggggtctgtccgcttgaacactatgtcttgtgcaattttttccattcagtgtttacaaatgaacgcattccttcccccccccccctccaaatcaggaaattcggtccgaaaagcgcaaagcaactccaaaaccggtagcaacggtcatcatcattctcacaatctgtcggaggtcggaggtcacccctcctggacaaagtacttcttgaactcctcccacttt

SEQ ID NO: 43241 - DNA, 1258 bp, Heterodera glycines
aggcaaactacagggaaaaaacctaaaaaaaattcgctcccaattttcagtgaatacaagcggcgagctgaacaagggcggtgtacgtcatgacgaactgcttcccttggccaaacatgtcaaggaacagtgccactctttgacactgattggtgggtagaggcccaaaattggaaaaaaattatttgaaccccgctacgacttgcccttttccgccttttctcgaaattttcttataaaaattttgtgagattacggaatcgggaatcccgcattgcggttgtccacagagttggagctgtccatgggaatgagtgccgactgactatcaattgggtgagtgtgccaattcatctggcttttccgatcacttctcagcactgatcaaacagttgttcaatcaacttttaagcgatcaaatatggcagtacaaatgtgcgcatcggttcgaccatttttggtgcacgaaattatgccaaaaaattggacaccgaagagagcaaataaattttcaacaaatttacgcaatttatgtcatgacaaccgtacaacgaatggcttaggctaggcctagctttctttttaaattttttattgtacgaaatatcattttgtacgagtattacctgttttttcattccaattttttgtgtttatgtatttgaagaatttcgactccgatttttatgatggttaaatgctttttagtttcaaaaaacaaagacgagtctgatttgttttaatttcctatttttattttgtctaattttcggccataatgggccaaaaattcataagttaagaccaaaagagggattttagtttcaaccggaatttctataaaaatgttcgtgtgtaacctatctttgtctattctgattaataagaaattgaaatattcatattactttgcctcccttacagctttataatgaaagcgtcgttgtctattttggatttgccgttgcaattctgtaatttcactttggaatccaaaggaatttgattcgcttttacaaaatagacagtgccgaaatttgtagatcggctaaaccttaactgaaacataccatatcagcgagacgccatgctgatttgttgtaatcataataaaaaggcccctattgtttaattcggcctttcctataagcacaatgtgtttgatgggctctacaaaatattgcttgtgcaaaagcaattattttcttggaggctgtaattttctgtagtcatttgatatgcatctgctatttttcta

SEQ ID NO: 43242 - DNA, 864 bp, Heterodera glycines
ctgaaatttctgaaaatttccgaattttatcaaatttcggaaatcggaattccatgccatccctggtgtggccccacatttttggcaaatcactgttttttgtttccaaattgtttagcattttcttcgtgccaatgccatttcttccgtcagttacgaaattcatttttctgttcgcgtgccgtcaatgcaaatggtgccgtttgaattggtgaacgaatggacaaatgaaaagctgacattggccaaagcaaatgaaaatgaattggacaaaagttggataatgaaacgatgcaaaattattggggagacagcggcggtcaattgggaagacggaaattgggacaacaattgtaacaatgtgttcttttggcttgaaggtgacactaattgcattgggtgagcaattaaaaaaggcatttgtgtaataattagggctatcatttacatggaaatccatatttttttcctggactgtgagaggtctgaaacgtacgaaaaacatgttttttaacttggtttgaaactgctaggatggatttctatatccatatttttccatatttcgcgatttatgtccatataattgaccccccaagaaattttgttttcaagtgatgaaaatatgtttccaaggattttctgcttagttgatcactaattcgtctcccattttgaccaactccgaactccgaaaaccggacccgaactcgaacaaaaagtcaaaaactcaaatttcgtaattttgtttaaatacatgaaaacgaaataaagtcatagtgcttcaataaaaagtcatttaaaccattttgagactaaaaatggaaaatcgaaaattttgaaatttttttcgagaaaaaatga

SEQ ID NO: 43243 - DNA, 1010 bp, Heterodera glycines
ttaaagtgaattcagttaaaaatggaattttcaatttaaattatggcaattaaaacgaagaaaatattccaaaaataaaaaaatgaggccattctgtgcgctttgttagaataagcacggagtattcattctcaaaatgcctttgagacaccttttgcccattttttctgatgaatgaatggccctttcgctgcgttttttccttttttcgttaccctctcacatttcttctcattgctttacaaaaaataattggctttggcaaatttatttcacggaaaaggaaacgaagcacacacacaaatatgttatttcgcactttttcggcaaaacgatttacttaaaatggcaaaaggggaaaaattgaacaatttgagaggctaccaccggaaatttcgacagtggacatttggacaaaaacggacaattggacagtggtcattaagacagtgaatgactcatttttcttattcaaatggctagaaatgaaaagaatttttttttaattattaattttcttatcaactgtccaattgttccgttctgtccaaatgtctggtcacgatttgactctgacaaatgatgaacgaactcccgaaattccattaatatgttgattttaaagtttgttttgggggattccatttgaagcggtggagaggaaaaaaaaggtgcgaacatcgacaaaataccgtagtaaaaatgaattgcaaaaaaatgaaatggtaggagagatttatattttaagtgaagggagtgagtgtaaactgatgaggatggattgtgagaaactgagaatgggaaatattttcaaagaaaaataattggtgagacaatggcaaaggcccaatgcctttccgctcaccaaacagtgcataaataatttattggaatggcacgagaaaagactcggccgaagccctttcttggcactcattttggtggcattggcacttaaaatttgaacaaaaattttctctttttttcgattttaacataaatgggtcact

SEQ ID NO: 43244 - DNA, 458 bp, Heterodera glycines
atttttttatttcataaatattttttcagaaagtgctctaaagcgcaccaaattttatttacaagtcaattttagcactctgatgctttagtatcaaaaaggaagatggagaaaaaatttttttaaaatttttccttatattttggttatatcgttttgcttttggtggggtgcttggaacagtggaatcatgcgcacccgtccgatctggcaagttaagcaacgattgctgactagccaaaaggttcggtgccgtgatgaaacgaaccagcactgcttaccccgcggcacccggcacggtcccccgaaggaatggatttaattaaattctctccttcggggatttttttccattaggtcgtctgttagcgtttgattgttctagtcaatttttcaaattttttgtgaaatatttgtagtgctctgaagggcgggggggggggcggggccgaaggccc

SEQ ID NO: 43245 - DNA, 263 bp, Heterodera glycines
gtccggattggccagtcgccgcagcggcgccagcaggtcagtaggaagcaggccacgcgcgccatcggcggcagcggcatcgccggcgagtgcgtgcagcaaggcgccggccgcggccgcgtcgaacgcggccaggccctgcgcgcgcaggctggcaatgatgccggtgagcaggtcgcccattccgcccaccgccatgccggggttgcccgcagcgatcagccttggcgtctgcccgggtgccgccacgatgctgcccgcgc

SEQ ID NO: 43246 - DNA, 82 bp, Heterodera glycines
cgcaccgcgcgcaggaccagcaccaggctggtgatcagcacgccggcgaccagcagcagggtcagcgcgaacagcacgctca

SEQ ID NO: 43247 - DNA, 1075 bp, Heterodera glycines
aaattaccgccttttaagtagcgccgttttttcttaataaattttctacagacaagacatttttggatttcgcttaaactaaaaaaagatgtagccaaaaaacttgggctggcaccgaaacgtgggcgccgaaatgacccttccactatttttgttactgatcagcccattaacacccacttattttataccttctttttgttgttgttgttcgcctcctgctactaccccgctttttctgttgctgctctccgcgcttaattatctgctgctgatcagattctgctgctgctggcggcacagtttgccaatcgccccggcggcacgcttactggcgtcacaaaatgcgtgacggtgtcccaaacagtgccgggatggaaaagcgaatgtgtgcagtgggctttgtgccagaatttcctgtattttcttccatttcctgtagaattaattaattattgattaatactaattagtagggatggtaaaaatatggatataaaatcgcgaaatatggccataaaatatggaccaaaaatcgcaaaatatggacataaaatggcaaaaatctcaaaatatggaaataaatggcaaaaatgtcaaaatatggacataaatttttcaaaattgagtgcaaaatttcttcaaatttattggttgaaattgcatatgagataaatttccaaattttttgactcggtaaggcgctttgataaagacggctttcgttttgcaattagtcggtcaacattcggaaattggtctcgaattttttcggcaattacgtgcaatcattttaaaagaaaaaaaacataaaagctaaaatttattaatttttttagcgcaaaatcaacaacaaaagcgaaattttcgcttttttgcttatttttgacataatttattaatttttaaaaaaatttaaatttattcaatattctcgagaaattttggcgaaaaaatgattttttgaaaaatttttcgggttttgggctcaaaaaggagaatttagctgctgggggccgttctaatagaggtttttaaagaaatgccaaaatatggacataaaatatgaccaaaa

SEQ ID NO: 43248 - DNA, 1087 bp, Heterodera glycines
  unsure (1)..(1087): unsure at all n locations
cccccccccccccccccttaaaaatntcaaagatttgcaaaaaaaaaaaccagaaaatttcntagtaagaaaatttcaagaaaaaaaattaataaataattttttttaatgatttatttgtcccgccgtggctcctatttttaggtaaacctaattttatccattttgaaaaaaaacataaatttttctagaatacataatatcggaccctttggtgggcgagaattgcgacaaaatacataaaaacaaaatttaaatttttctataatttttcaataagaaaatgcattggattttgaaaaccaacaccagcacaagcacacacctcatcaatggtcaacgaatgggagatgaagttgaactgttccacgtcggtggagcggcattttgtgcagaaatggcgccgcagaatgccatcggcggccaactgatcaacatcgtcgtcatcgaacagaaatgcgtcgacatggacctgaattgaaagtgggcgtggataaaatgaaaaaataaaatttcaaggaaacgtagaaaaaattcaaaaaaattttctctttttttaattcaaaatttatgcaactcatttggctctaaaaaattttaggcttattgttagatagaaaattcctaaagaaaatctaaaatttttctaaaaaattcgcaagttttgagcctaaaaatttttataagcaaaaaaattttcagcaaatctttttaaattaaatttatagaaagttgaagtcgctttttaagtacacaagaaaattccttgaaaaaaatttcgatctcgagaaaaatctcatcttttttggtctcgagtctcggaaataattcctagaaacgaaggagatgagatgacccactattgctgacgactgaccgtgttttgcgcggtgcagtcggcaaacgcaccggcaacgggccaaacagtttgcggttggtgccgtttcagtgctgctaatgggctggcttgaactggcattgtcgtcgttgttggtgccatcgaatttggcacttttgccgcttctgttgtggctaatggtgaggggcaatgttgctgctgctgctgttttagctgattttcgtcaac

SEQ ID NO: 43249 - DNA, 981 bp, Heterodera glycines
gtttaatccaattatttttaaattagcttgccggttgatcaatgaccgcggacgtgcacgcactgatcgggacccgcgcatttgcacctgtccgaactgcttgcagatctgagtgccaagctgaaggtgccattcttttcgctgatcgacccgttggcacaccatttcctaaacccgtccgatggcaatctgatcaaagcaaatgccgatgcggatggcaacagcgctgaagcagggcaacaaacaacagcaggtgtttattttttaaaagttttttgtcttaattttccaaaagtgatcacaaaaccgctccaaaattcacagggttatttctcaatatttcctgctgatcaatcgatagggagggattttctgctgatcactttttttcatgactatttcaattggcctttttccttaaatatccgtttgcctctaagtacagtaaaggcttttgatgaatacagtatcacaaactttaaaacccattattttcgtctctctgtttaaagagcaagagattgtgcacattgaaatgttcccgcacacgcaactgtttgaagcgatcattgatctgatcaaatattggcgatggagccgtgtgattgttgtctaccgacagcccgaaagtgagacaaaaaggggcacagatcaccaatcaattatttattattactattatagaccaatgtagaaaatttttgaaaaaataatggttttcaacaggagtgggggccagggctgggcgaagctcggctttgcactcgaagccgaagccgaaggcgaagcccaatttttattcgaagccgaagtccgaagctcgaagcccaaaaaacccgaagagttcgaagccgaagtttcgcccagccctggtgggggcagatttacattctcgtgctatgtgaaaattctccccctttttatggaaggtgatacagttatctgaaaggaaccttattatgaacgagtcagaatccaaat

SEQ ID NO: 43250 - DNA, 1010 bp, Heterodera glycines
ttaataattttcctccccggaaggtactccctggccttcttcgcgccctggtggtggcctttccccccccccccctcccacgcccttcagagcacgacaaatatttcaacaaaaattttgaaaaattgactagagcaatcgaacgctaacggacgacctaatggaaaaaaatccccgaaggagagaatttaattaaatccattccttcgggggaccgtgccgggtgccgcggggtaagcagtgctggttcgtttcatcacggcaccgaaccttttggctagtcagcaatcgttgcttaacttgccagatcggacgggtgcgcatgactttctgaaaaaaatatttatgaaacaaaaaaatcgattttttcaagtgtccgtttggggtactcaaacatttatggggagcaaaaatccaacgcagaattaaagtacaggctatagggaagctattcccgaaggattcggtctccccataaatctgggcgcatcggttcggggggactcgccccgaaaacaaaaaaatcgattttttcaagtgtccgtttggggtactcaaacaattatgagggagcaaaaatccaacgcagaattaaagtacaggctatagggaagctattccggaaggattcggtctccccataaatctgggcgcatcggttcggggggactgccccgaaaacaaaaaaatcgattttttcaagtgtccgtttggggtactcaaacaattatggggagcaaaaatccaacgcagaattaaagtacaggctatagggaagctattcccgaaggattcggtctccccataaatctgggcgcatcggttcggggggactgccccgaaaacaaaaaaatcgattttttcaagtgtccgtttggggtactcaaacaattatggggagcaaaaatccaacgcagaattaaagtacaggctatagggaagctattcccgaaggattcggtctccccataaatctgggcgcatcggttcggggggactgccccgaaaac

SEQ ID NO: 43251 - DNA, 1270 bp, Heterodera glycines
attgagaaaatatgaatgtatttctgcgacgccttatatacttaattcggccataatgggccaaaaattcataagttaagcccaaaagagggattttagtttcagccgaaatgtctataaaaatgttcgtgtgtaacctatctttgtctattcggataagtaagaaattgaaatattcgtatttctttgcctcccttaaagctttataatgaaagcgtcgttgtatattactggattagccgttgcaattctgtaattccactttggaatccaaaggaatttgaatcgcttgtacaaaatagtcagtgccgaaattagtagatcgtataatcttttagagaaaaatatcataacaagcagtaacaaatgcgcaatggtgttcccccccccccctcttttctcattctccccaatttaccctcctcaaaaaagtcgacgttcttcagcaactgaagcgctttctccgccgtattggtggacccggtcagctccattagtccggcaattagcttttgtctgtccttttctccaatgccggcgcttctcagcatctgaatggctggctttgttggcgttttgttattttcaaattcaaattgcctctggcacattcacaatggaattgttgtccttttcctcgtacatggcgaacagtgtgggcgacagaatcgacttggggttgacggggccgcccttgtcgggtgcaagtggcatgaagcgggggctgaacatgcggtaattctgagaagcggaagcattccgcgcaacggtcgcttttgttggcatcgaatctaacaatttcatgccttcgtggatcagtcccaatttgcttctctgatgggtgatgtgaggaaagattagtggattgattattcaagggagaaacgcaaagagaggaactggggcgatgaatcatcgataataatcaaaaaatgcagaggcaattttggatggtgatcgaaatcagaatagaaaatagatcaacggcacaaacagacaagacaaaccttttcctttggactcagagaaggctcttcccggtccaacacgatgtcatacctaaaagaatgccaaattaacgattccccccccctcccccaaattttccgtgcatacattctcttctcaaaaacttttgtgccgggaaatttcttgcgtcgttccgtttcctccgccagtcgtgccaacaatccgtgcacttttgtccatttgttttccgccttttctcctctttcgcccatcattttaatcagcaaattggacacttttt

SEQ ID NO: 43252 - DNA, 1041 bp, Heterodera glycines
aggtcaaatcttttctcttttctccaacacccatgttttcgaaatactattaacaaatttaaaaaagccattatggaaaagtttcgaagaaaaaaaaaaataatttgttatatatctaaaataataaattagcgattggcgatttatttaaatttttatttattatttattaaacggaaaaatattaactattttcatttaaatcaaattaattatttaattttctttttatttctgatcactttctttgtcttaaggtgttctttggcaacgaaacagtgacaggcagtttgaagatcaaattgaagcaagagaccgttctgaatgctatccatttgcattttaaaggtaattattaaattcattagaaaaaataaatacagttttcggtatttaaaatataatttctttttaaatatttaaacattttcaggtgtagccaaatggattggcacgggacgaaaggaggacaaggagggccaaaccgagaaggtactttacaaattaaactaattattaatgaataattttctaaaatatttcggcacaatttattttaaaaaatataaaaataaatgaaaaataaaaaattgatatttttaaaaagtattttaatcaaattattaaaaatcacataaactcaagtaaaaaagctaaaaaaaagaactttaaacttatttttatttttctatttatttgtttataattctattcatttttaattatgtattaaaactttaaaaaatttccatttaaatttacaaaatatttttaaaaattattttcactaattttttcagatttattttgacaaaaattttgttttgctggaacgtccgcctggccatcccgggcctggccacttcaaatttgttgcccattttgcctattcattgccatttgagtgcccattgcccagcgggtgcgagacaagctacgagagtgggtcggcacacattcgttactttgcgcgtgccattctcgagaccgagcagcgggtcagtgccgtgacgtttttggcatttttgcgatttgtctttt

SEQ ID NO: 43253 - DNA, 454 bp, Heterodera glycines
cattgcttaagcgggtccgtcgttgaacaatgtcgaggacaaacaacaccaacaacaacatgaacaacaacggcacgggcaccagcagcagaaaatcagcatggtgcaaagcttggaggaggggatggacctgtgcgtgtgccaccaggactacaaccactgtgtgcagaacaacatcaacggggagattccggaagtgttgcccaccgccgacttggccatgctggactttatgcggcattttgttgaggaccaacaccggtggggcagcggaggacggttgagggcggatggcgtgccaacaactacccagacgccggaaattgtgcaagcaatgggctttgaggtgaatttgggaaaatgggacaaaatgccaaaaatggggagcggacaaaattccaaaaagtcggggggggggggggcaaaatggcgtaagtgggggagggaaaaatgt

SEQ ID NO: 43254 - DNA, 1234 bp, Heterodera glycines
cgattcgtcaactcgacgattcgttaacccagacaaaatgtgacgattcgtcaactcagccaaatgtcaacgattcgtcaactcgacgattcgtcaacccagccaaaatgtgacgattcgtcaactcagccaaatgtcaacgattcgtcaactcgatgattcgtcaacccagccaaaatgtgacgattcgtcaacccagccaaaatgtgacgattcgtcaactcagccaaatgtcaacgattcgtcaactcgacgattcgtcaacccagccaaaatgtgacgattcgtcaactcaatcaatattacttaaaaaatggaacttaaagcaattattgaatatttcatcggaaggatcgtgattttatgtgttcttgtttctaaattagcctaaaagaatgctataattgtgctaagcgccattaaaagctcttgaaactgctttttaaaactatttttggatgagttgacgaatcgttgacatttggctgagttgacgaatcgtaacattttggctgggttgacgaatcgtcgagttgacgaatcgttggcgcgccgtttaagcgctcaatcaactcgtcttgtccaactgccctctaccattttaaaaacttttgctgcgaaaaggcatttatggcgttttgtagatatgcattgttttgttggcttttcgtcatttaacttttctttgttgttgttttttttctgtaaaagtgagaggtaatttactaattgatcattctgatcagatatgcgttaatacctaaattaacatcaaaccgacattttggcgacttcaaaagacaattccgtaggtttgttggagatgttcctaaaagccagcattgagaggctgctaaatgacccaagcacgaggcgcaaagagcacgtcgcattgaaaaaagcatgtgaagaagcaatcggtaagaaatggcattcgaattggaaatggcgattaattgtaatgttttagagcaactcgattcacggttaaatggcattgacatagaggagggcgcatcagacgttttgccgaacaacaacaacaaatttctcgctgaccattattttcttccctttgaattggtgagtgagtcaatcaaattttaattcattttttgctagatattttataatcaattattggaggaacaatgtttttaggcctgtcagagtcggtcacaaaaattgtggtgaacgctttggaatcgtagaagtcttttactgttctttcatc

SEQ ID NO: 43255 - DNA, 855 bp, Heterodera glycines
gaaggtgctgcagctggagcagcgggcgttttgactgttgttgttggcttaacggggcttgtgacaggcggtggtggtgccgccgaaatttttgtttcttcaaaaggaggcggtgactcctcaagtcgttcgtcttcatttatattatacaaaggaggagagtcctggaggcgttttccactcgcgtcaaacattggcgttgatggcgtatctcttttctctctcttcagcggcggcggagaatcaagaagctttgttcggttcctgttcgcttccacctcacggggtgttggcaacagttttgctccgctgcgatttcgcaatgttaccgccaaaaagtctctgagctgttcaaccctgctatgcgatgccttaggtaccggtactcggatcacccgctgtctgtcctcatcggtcgctctgaggtcggtgaagtgaatgtcaatccactgcgcatccaatgtgccaatggttgaccatgagtaggggtaactgatactgtgcagtccgcacacccacgagccgttaaaatgcaaaggctttgggagtcggacacgaaatttgttgggctgattgtccggataatccgacacattgctgggcaaaaacacaaagaaactgttcgacatgattgtttatttttcaacaaaatgaaaaatgcatatgctttttatacaagctgagactcactaatccattcccgattgggatatcctataaatttgacaagcatctcggtggtcccgtccgaccgttttctcttcctgtaaaccttctcgatgcggtagcttgtctctgcatcctttcttacgcgcgccaactcctgctcatagaagctgcccttgaatttctccc

SEQ ID NO: 43256 - DNA, 881 bp, Heterodera glycines
  unsure (1)..(881): unsure at all n locations
ttaanagtacaggctatnagggaagctattcccgaaggattcttgtctccccataaatctgggcgcatcggttcggggggactgccccgaaaacaaaaaaatcgattttttcaagtgtccgtttggggtactcaaacaattatggggagcaaaaatccaacgcagaattaaagtacagactatagggaagctattccggaaggattcccgaaggattcggtctccccataaatctgggcgcatcggttcggggggactgccccgaaaacaaaaaaatcgattttttcaagtgtccgttggggtactcaaacaattatggggagcaaaaatccaacgcagaattaaagtacaggctatagggaagctattcccgaaggattcggtctccccataaatctgggcgcatcggttcggggggactgccccgaaaacaaaaaaatcgattttttcaagtgtccgtttggggtactcaaacaattatggggagcaaaaatccaacgcagaattaaagtacagactatagggaagctattccggaaggattcggaaggattcggtctccccataaatctgggcgcatcggttcggggggactgccccgaaaacaaaaaaatcgattttttcaagtgtccgttggggtactcaaacaattatggggagcaaaaatccaacgcagaattaaagtacagactatagggaagctattcccgaaggattcggtctccccataaatctgggcgcatcggatcggggggactgccccgaaaacaaaaaaatcgattttttcaagtgtccgtttggggtactcaaacaattatggggagcaaaaatccaacgcagaattaaagtacagactatagggaagctattcccgaaggatt

SEQ ID NO: 43257 - DNA, 1082 bp, Heterodera glycines
gaaccgaacattcacaaattaaggggcgggggatccttttaagcatccgcagtcaagaaataagcacatttaattcctaagatccgacccctccaaataaggacaaagtcttagaaataaggacaaatgaaagccctatgattttcaaaggacatcattaacaaaaggtgaacaaacattttgttaaaaaccagcagagtccaaataataaatccaacttatgtcaacaaaaatccttattatataaagcggaattgcgacatcaaaaaccgaaaagaaaatcattttaaattcatgcttaattaatctataagaaattagctaaaattatgcttaaaatgtttgttgtcgcccaaattgcaccgctgactttggcactgttgctcatcacccttttgatggcttctgatcgatgtgccgtggcactcaccgcggggcttggcaatggtgtgaatgtgcagcccagctactacaacagtggcaaagtgtcgcttggcctttcccagttgaaaacgttggcaacgaaagttaaaactgtgcggattgaggtggagccgttcattcccatttcgttggccaagcaatggatcagtgaggcggccaaaaacggcttttccatcattgtcacttatcataaggcgacagtgttgggctccaacgatgcaagtaagcagaaaaaatgccaaaagcatggaaaatgtccaagaaaatgccgaaaatgatatcgcgggtcgaaaattggatttttcagaaatctcggcctcgcttttgaattgttcggtcatttattagcaagacaaaaacaaaacaaaaagttaaattaaaatttttttaaatttagttagattattttttaaatttttaaattaaaataaaataaaatgaatttttaataaatcatatataaataaatatttaacctaaaaatcttaaaaataaattattatattatttatcattattttaagatgagttgcagcaagccgctaattggtggaagactaattataaatcattagcgcagtccggcaaatttgtgctcaatctgatgaacgagtggggtgaccacacgatcacatcaa

SEQ ID NO: 43258 - DNA, 1022 bp, Heterodera glycines
  unsure (1)..(1022): unsure at all n locations
tatataaaaattttaaatgtccttggatttcatgaattttccncactatgtccttgaaaatcggcatacccgtcctggaaacggaggatggacgatgggagcnctggtctagaataactcaaaaaatccttgtttttttgaacatttttggccatccttttttgaaagtttaacttttttttgaaattttgcaggcaaatagaaaacacttgaagctatcgaatgataccaagaattaaaaatttagttgctttagagcaaagttaaaagcaaaattttttattttcatggttttttaaacaaagtacattatgatgttttttaaataacgacatagcaccgtggtgattagtgatatgatggaccgattgatttgcacaaatttcttattgtggatatttgctgcataaattttgttgcttttttgtcacgtaatgttttaattttttttaattattaaacgatgagtagagaagagaaccaagtttttatggacgaaaatactccatttactaaaacccgaaaaatttatcagttggaaaaaaatagaaaaaaacttttcatgtttttagggggttatgaaaaattacaattatgactacatagagcgcgcatttttagtcacgaaaattttttgcgtaaaatttttaatattagaaaaaaaaagattgtttttctcagcaggatcacattttcttaaggcaattgtacaaaagcattaattatttcattaaaaaaaattatattagcattttttgcttcatcgttggtgttaaggtggcatattttgccacataatcaatctgtatcaatctcaaagtgagtgagagaaatggagtgagaaagagagagagagagagaaaaggaaaagagagagtgaagagagagagactgagagaaagagagagagagaccgagagaattgtgaaaaattgccaatttaagcgcagcggagaggcaaaataatcacaattntctaatcataaaaattcaaaccccatcaattctcatcaccaccataa

SEQ ID NO: 43259 - DNA, 1158 bp, Heterodera glycines
  unsure (1)..(1158): unsure at all n locations
ctgcgagttgcaatcaagctcaatgaagtgggtggcgttggcatcgtacacgctgtagtcgacatcgcccatntttctttatcacatggaggacaacctgtttgggaggaaataattttttaatttcaagaaaaagtaaagaagtgttttgagttccgaaactttatttacgagcattgaaaaagaaaaattgatttttttccgttaaaataaaatttgggtcctcccccaatcgggggccccaacccccgacatgtgctccccgatagttcccggcccaccgacattgaaaaaatgttttcataacttcaaaaacaaaaaatttgcttatttattcaaaaaatgagttcgaaaaaatttagaaaaattttttttaattagaaaatttagctcttaataaaatcatttaaaaacgacataaaaagcattgatgaattaaataaaatcaaaataaaatttcgttgatttaacctattttcagtcccaaaaaacgaggtggaataataaaatcaagttgaagttttgccatttgaaagcgatttctaaaaccaaaaagcggattttttatgatgaattttttgaaaatgtttatttttttgaaaaataaaaaatttaaattcaaaattgtcgtttcatggcctttctagcgccataattccgatgttcacagaggcttaaatcccagacatcccaaatcacccctgccacacgtaacgtaccacttctgtttctctgcatctcaacggcaacacttgacagttgttaggcgcggtgatcaccccgctggttgccgcgccgacttcttttgcttcgcacaggttgactccctgtaaatgcgattcgaatccgctccacaacacacaatgtttttatttatttattttcttacagttattcaaattggccattttgaaaatgaaaattttcaaagactcgtcacttttttctagtgcttcaatatgcttacaattaacatttacttaaaaaaaatttcttccaatcaagagcatttgaatgataccaacatactataatgatattgggaaaaacctttaaaactttttcaaaaacagccagttttcattttctgcaaatatgtaagtaaataaaatattggtgttttcaccaaaaaaattaccaaaatccatttgaaaattt

SEQ ID NO: 43260 - DNA, 936 bp, Heterodera glycines
taaaataggttatttctcttcctttcagtatccctgcaaagtttggtgcgcttctgatcagtttctgaaaaaaaagttaagcctaaactttttggcctgtttaaaaaggaattaaaaatttttaaaaattttattcatctccctttttgatagaaaaaacatcagagtgcctaaactaacatgtaaataaaatttggtaagttcagaaccctttctgaaaaaatatttaagaattattaagcaagaataaataaaattttaaaaatttgatcgtccataaatattttgtaatggatcaggggctcaccaaattttgcagggatacgtatgggaacactacaaatgcttattaattttcctagattttttaaacccggtgaaaattttttgcagacaccaccacttttgcacttaaaaaaatttcaaaaaactttaaaaattcatagaaaatttaaattcataggtactactgctaaatcaacgcagagacgcctttccttgacctttttaggcccctgcaaaatctggttcgcttctgatcactactcgaaaaatgagtgactgaattttcactaaaaagtcaagcctaaactttttggcctgtttaaaaaggaattaaaaatttttaaaaattttattcatctccctttttgatagaaaaagcataagagttcgaaattttcaattttttgtactctaagctactcaaaccggttcagaattcaataaaaataacattcacggtgcgaaaaatggggtatgaaaagtttattggggaaaaaagactttacaaaataatacccctgggagaagggagtgggaaacatgatttcgaaattttcaattttttgtaatgtaagctactcaaaccggttcagaattcaataaaaataaaaggacacggtgcgaaaatggggtatgaaaagtttattgggg

SEQ ID NO: 43261 - DNA, 976 bp, Heterodera glycines
  unsure (1)..(976): unsure at all n locations
ctagaaaaaatggtctaagtaaaaatcgtaattacgctcaaaaagcttctcaaacaatttnagcgcttccaattccttctacaatcgcctttatacatcncattatgagcgctaaaattatcagagtgccgaaaatcgcatttgatctaagcctagaaaaaatggtctaagtaaaaatcgtaattacgctcaaaaagcttctcaaacaattttagcgcttccaattccttctacaatcgcctttatacatcccattatgagcgctaaaattatcagagtgccgaaaatcgcatgtgatctaagcctagaaaaaaatggtctaagtaaaaatcgtaattacgctcaaaaagcttctcaatcaattttagcgcttccaattccttctacaatcgcctttatacatcccattatgagcgctaaaattatcagagtgccgaaaatcgcatgtgatctaagcctagcaaaaaatggtgtaagtaaaaatcgtaattacgctcaaaaagcttctcaaacaaatttagcgcttccaattccttctacaatcgcctttatacatcccattatgagcgctaaaattatcagagtgccgaaaatcgcatgtgatctaagcctagaaaaaatggtctaagtaaaaatcgtaattacgctcaaaaagcttctcaaacaattttagcgcttccaattccttctacaatcgcctttatacatcccattatgagcgctaaaattatcagagtgccgaaaatcgcatgtgatctaagcctagaaaaaatggtctaagtaaaaatcgtaattacgctcaaaaagcttctcaaacaattttagcgcttccaattccttctacaatcgcctttatacatcccattatgagcgctaaaattatcagagcgccgaaaatcgcatgtgatctaagcctagaaaaaatggtctaagtaaaaatcgtaattacgctcaaaaagcttctcaaacaatttta

SEQ ID NO: 43262 - DNA, 622 bp, Heterodera glycines
ggaaataaccaaaaaaagaaaatactttttcgagggcattatggttaattaattttaatggtcttctgcttttttaactccttttattcgcattaaattttgatattaatcccttatatatttggatatattttattttttaaacttactcgtatatttttggttatttttattttttaaaatcaattatttgtttcacttaaattgtagttcatattgttaaatttatttttttaattcactaaattatccgcaaatatcggtccgcaaaagtcggtccgcaaaagtcggtccgcaaatgtcgcactacgaattaaatgcttgattatattccgtagtgcgacatttgcggaccgacttttgcggaccgacttttgcggaccgatatttgcggataatttagtgaattaaaaaaataaatttaacaatatgaactacaatttaagtgaaacaaataattgattttaaaaaataaaaataaccaaaaatatacgagtaagtttaaaaaataaaatatatccaaatatataagggattaatatcaaaatttaatgcgaataaaaggagttaaaaaagcagaagaccattaaaattaattaaccataatgccctcaaaaagtat

SEQ ID NO: 43263 - DNA, 1218 bp, Heterodera glycines
gagtaccttcggtgcagaaaaattattaatttttaaaatttttttattgctttttaaatatgccaaaaaatgtaggcttaacttttttagtgaaaattcgatcactcatattttttgctaattgagcagaagcgtaccaaactttgcagggatactccccggtaaaggactaacttacactgaaatgagcgccgagctagctggctcaaaaaaattttcgaaaatctgagtctttcgtttttatttattttttgcaaaattaattcttaaatattttttcagaaagggttctgaaacgcaccagattttatttacatgttagtttaggcactctgatgctttttctatcaaaaagggagatgaataaaatttttaaaaatttttaattcctttttaaacaggccaaaaagtttaggcttaacttttttttcagaaactgatcagaagcgcaccaaactttgcagggatactgaaaggaagagaaataacctattttaaatattatctagtcagttcatttaaataatttttatccaaaaaatttttttttgggttttcggggcagtccccctgaaccgatgcgcccagatttatggggagaccgaatccttcgggaatagcttccctatagtctgtactttaattctgcgttggagttttgctccccataaatgtttgagtaccccaaacggacacttgaaaaaatcgatttttttgttttcggggcagtccccccgaaaaaaataatgctggtgtggtaagtgtgaagaactgtgttcctccaggcaaaaaattctaagaaaatttataagcatttgtagggttctcagcagtttccctgcaaaatttggtgagcttctgatcagtctagaacgttgggtgataaaatgaaaaaaataattaaaaaaaaataatgctggtgtggtaagtgtgaagaactgtgttcctccaggcaaaaaattctaagaaaatttataagcatttgaagggttctcagcagtttccctgcaaaatttggtgagcttctgatcagtctagaacgttgggtgatcaaatgcaaaaaataattaaaaaaaaataatgctggtgtggtaagtgtgaagaactgtgttcctccaggcaaaaaattctaagaaaatttataagcatttgtatggttctcagcagtttccctgcaaaatttggtgagcttctgatcagtctagaacgttgggtgat

SEQ ID NO: 43264 - DNA, 821 bp, Heterodera glycines
cattcaattataaatttaaataataattagtcattagaataaatcttcggtaccgaaatgacccgccccttcagatcaccactcattcggacttttcgcacttcgactcaccacgatcattattagggttgtaaattatatggactaaaaaacgcgaaatatggacattaaatatggactaaaaaagcccgaaatatggactaaaaaggccaaaaatggccaaatatggaccaaaatatggataaaaaatgccaaaatatatgttgtaaacccccaaaaatcccaaaaaaggtgtgcatatttaatatttgcttaaataaacctaaaaagtacaataaacaaccaaaaaatggggtttaaaacttaaaaatgcatattttttattgttgttcgttgtatcaaaaacacctccaagtttgccaaatttcgaaaaaattctcattaaaaaaaaagaaatgttcgcaaaaaaatgacgaaaatatttattgaaaatgccaaaatgacgacgaaaactcaaatttttcgtgttttgtggggtgtaatttttaaaaatttccaaaaagttgatctttaggggtgtatttttcgttttttttcatttttcttgtgaaaatttccaaaaaatggccaaaatatggactaaaaacccaaaaatggcgaaatatggatttattcccgaaaacccccaaaatatggatttatatggactaaaaaccttcaccaaatcaaaaaattttaacgcagaaatgctatttttaagcccctttcttcatagcatatgcgcagaaaaaatatgttaatccatataatttacaacccta

SEQ ID NO: 43265 - DNA, 872 bp, Heterodera glycines
aactcattttccatctcctttttagcttcgaagagttggcccggcccatctgagcggccttcccattgaccaagtgttgcaaatcgtccgccactatttgctatgggccagtgccatgctcatctacccaatttgcaccactaatatgtacgccaacgcaccgcaacagccgcacaatttcagaacgtacttcggcaccaattaattagccaactatagtattgtttataatcgaggataatttttgtcgaaaattggccgaataatctcggaaatttatgttctcgaccatttcgagaacttctctagacgcttttagtttttttgttaaatttattcaaacataaccaacatagtagtattctattgatgtcatttagtacagttttgacgccatttttattttagaggcacagtttggtgaccgtttcggctccgattgctgtcccatggccgatgtgttggaggcgttctcgccaccgtgctcgcttggctcctttcttcaggacatgaccatctacgcgggacgtccctctctgcacatgtgtaattaaaatgcgaaaattcgacatgtcgcaaaattgttgcttttaaaattctattgcactacaaaattgccaaatttcactatttaccattaattttcaaatttccagctttaatggtgtcttgctggtccaactgcacaccttctttctgctgccccttccatccatcgacgccaacgacagttacaaagccaaccagcagcaacacaaccacagtcaaagggaacgggggaggagggacagcggaacctcaaatgatgatgccgaagaagtcgaggaggggggagaggaggacgatacagaaacagcagcagaacaaccaca

SEQ ID NO: 43266 - DNA, 917 bp, Heterodera glycines
ctcattcagagagtatatactaaaagttccgaagtcccgccccgcgccgcttagaggaaattatacccaaagtaccatatcataccgtcgggcccatataaaaattcttgaaattttcacgaccttgaaaaaatatatattatttctcagctcattcagagagtatcgtactaaaagttccgaagttaagcttgtgctgcttagaggaaattatacccaaagtaccatatcatactcgtcgtgcacatataaaaattcttgaatttttcatgaccttgaaaaaatatatattatttctcagctcattcagagagtatgtactaaaagttccgaagttaagctagtgctgcttagaggaaattatacccaaagtaccatatcatactgtcgtgcacatatgaaaattcttgaatttttcatgaccttgaaaaaatatatattatttctcagctcattcagagagtatatactaaaagttccgaagttaagcttgtgctgcttagaggaaattatacccaaagtaccatatcatacactcgtgcccatataaaaattcttgaaattttcatgaccttgaaaaaatatatattatttctcagctcattcagagagtatgtactaaaagttccgaagttaagctagtgctgcttagaggaaattatacccaaagtaccatatcatacactcgtgcccatatgaaaattcttgaatttttcatgaccttgaaaaaatatatattatttctcagctcattcagagagtatatactaaaagttccgaagttaagcttgtgctgcttagaggaaattatacccaaagtaccatatcatacactcgtgcccatataacaattcttgaaattttcatgaccttgaaaaatatatattatttctcagctcattcagagagtatgtact

SEQ ID NO: 43267 - DNA, 1271 bp, Heterodera glycines
  unsure (1)..(1271): unsure at all n locations
aggggggaccagaaaancagaggacggaggggaacccgacgccaattgagcgggggagtgggatcatcaaacggagatttcactttataggcagcccctctcgccatttgcaaataatacgggcgatggaagtcacaaaccagttcctgttgagatgaacgggacacgaccggaacacttcccttctgtccagccgaatggccaccaccaattgcacgtccttttcctgagaggccgctgacgaaggtggcacattgcgaagctgaattccgccgattcggatggaataaatggcatttgaagggattggcggggagattgtgctggtggatggagagggagagcatcccccgacggaagggtcgtggaaagggacgaccgaggaagaagcggggggcgtagggccacaaatgaacaggggcagtgggggcggcctgtcacggcgcaggtggggccggggcgctcttctggagcttcgcggctggtggaactgtttttccgtagcttggcattccctttgccttccctcgccctcctcccctttttctgtggccatcgttccgtcttcctcaaatccttcttcaatttgtgttgccccatcctttctttcactgttcttctgttgaagaattcgaacagtacaacattctgaattcgcattaacaaaaaaacaaaacgaatgtttcgtatttttgatgccatacctttcgaacgaaaaggccaatcgcatttcacgttcagagtttcattctcccgcgcaagcgataagagataaacagtctccacttccattccaggcctatatttttcttcccccgttatctcaggccgatccgttgtgtctcctgccatttcaggcatatcctttccttctcctgcaatttcgggcttaggcccattagctgctccgctttctcttttatctccgacgaatgtttcgtcgtccgcttcttcgaagagtccttcgaaagtgaaaatgttctcctctctcacatcttccatgtcatttcgattttccttcttgtcctctctttgtttttcttctcttttctgtgtccggtgattaattatttcattctttgccatttcatttttcgaaattgcagtggaaggggcagcattaattgggcgaagatgaactcttaatttgcaaagtatcaattggacacggcccgacagaacccattgaccttaagannagattggcactttgacatcaaaacggcactctntcgcattgttccagacgccatttggacgatgatggcatt

SEQ ID NO: 43268 - DNA, 54 bp, Heterodera glycines
cggcgcgctgaccaccttctcgctggccaacgacgtctccaagtacttcgcgat

SEQ ID NO: 43269 - DNA, 1274 bp, Heterodera glycines
ttttgtcactccgtcctcgaatggtcggctttttttcttcattatttcacattttcccattatccattttaatttcggcttttcaattaccccccccccccattaattaccccaaattttgtgccgtccgtccctcactttcccacaaactcagaaagtgctcaattggcaacatcaacagatacattcatctcatcggccaactacaaaacaacaaacaatcagctcatttgccatttattcattcgttcctttcatttgattattcgacccattcgtcgtcgtttttccttttttctcacattaattgattgtttctctcaatttgctttgcttaaaaggggagtaattttgagaaattacaccctcaattggaaaattttttgtgcatatttcacgatttttagtgcatattttacgattttatgtgcatattttatgcgcatattttacgattttatgttatgcgcatattttacgattttatgtgcatatttttggcatccctatttatcacataaaattttatcaaaagtggtttaaaaagttaaaaaaatacaagtataattgtttgccttttatcccaagaaatgccattcttaagggtatattttcttgaaaattcactaattgcttgagactttcctcagtataaaaaaataaataaaatcagtagggttcagtttacggtagaaacttgaaagagtactcacccccgcgggggcgaaggtcgcgggagtctgagtcacgggagcaggggggaggcaggccaaaaaacctgtcccgtccccgggggatgggtcggggtctgaacactaatttagagcatggaaaagcctggaaaaaaaggcactataataggcaccaaaaaattaaataagtcatgaaaaggcacgaaaaagggagcaaaaacacaaacaaatctttggattcttcacattatttacacacattaggccaacaattaatcacaaatcatttgaaatgataacacagagatacaacacattgataatggtgatcaaccaacaacagacaattatggtcgcttaaacgataaccgggcgacaaatactgtacatacagtgagatacaataatacaatctgtacagttgggatcatatatgggaatagggtcagttgaatgtatcctcctcctccttcctcttcggcggttgtcttctgcatcctctcccatccatcggtcgtttgtcgtctcatttcatcgcgtgcttctgcgtccattcacgggcatttcggttgtactgctcgc

SEQ ID NO: 43270 - DNA, 1295 bp, Heterodera glycines
  unsure (1)..(1295): unsure at all n locations
tggcaataacctcatttaaaagccttcctcgaaacaagataaaaaactgattggtaaaaataccaccccatacttctgtaaaaagtcaactggacgaacggctgggccctgcttccgtctggctacagtctcgagagctaatctggcaaaagcctcattttaaagccacctcgaaactaaaaaattatttgggctcctatgacaatggcgggatcaaattcgggttcagcgcagccaataccccattcagcagattctcagttggatacgatcaataataaaaaactgattggtaaaaataccaccccaaacttctgtaaaaagtcaactggacgaacggctgggccctgcttccgtctggctacagtctcgatagctaatttggcaaaagcctcattttaaagccacctcgaaactaaaaaattatttgggctcctatgacaacggcggcatcaaattcgggttcagcgcagccaataccccattcagcagattctcagttggatacgatcaataataaaaaaattagtaaaaataccacgccaaacttctgtaaaaagtcaactggacgaacggctgggccctgcttccgtctggctacagtctcgagagataatttggcaaaagcttcattttaaagcctacctcgaagcaggataaaaaactgattggtaaaaataccaccccaaacttttgtaaaaagtcaactggacgaacggctgggccctgcttccgtctggctacagtctcgagagctaatttggcaaaagcctcattttaaagcaacctcgaaactaaaaaattatttgggctcctatgacaatggcgggatcaaattcgggttcagcgcagccaataccccattcagcagattctcagttggatacgatcaataataaaaaactgattggtaaaaataccaccacaaacttctgtaaaaagtcaactggatgaacggctgggccctgcttccgtctggctacagtctcgagagctaatttggcaaaagcctcattttaaagactacctcgaaacaggtacaataaaattcctaaaaattattttgctcctatgacaacggcggcatcaaattcgggttcagcgcagccaaaaaccccattcagcagattctcagttggatacgatcaataacagtataaaaactgattgggtaaaataccacccccaacttctgtaaatagtcaactggacgaacggctggngcctgcttccgtctggctacagtctcgagagctaatttggcaaaagcctcatcttaaagcctacctcgaaac

SEQ ID NO: 43271 - DNA, 496 bp, Heterodera glycines
atttagcaaaattctttcgaaaatttgagtgagatcttctttttgatgttcttttaaaactcaaattattaattgattgtcaaacattatgcccatatatcaaaatgccaaaaatttaacagattctggcgattttcccaaaaagcctcaaaaatccacaaaattctcaaaaaaaaaccacaaaaagcctcaaagcctcattttgaaaatttagctttgacctatcaaaaaccacaaaatgcggctaaagcctcagatctgcgagccttttaatgtatggactttgttcaatcatggtctcttcgactcccggacaatcggacagaggacaatcggacagtaaaatgcactaaaagataagaaaatgccgtcgccgaaggggaccgattgtgccggtatcaagaaaaaaggaaaataggcaaataaaaaagtgcgaatgcagtctaaaattgtttcgttctaaattaacttggattggtattttgtaagcgacgtt

SEQ ID NO: 43272 - DNA, 827 bp, Heterodera glycines
  unsure (1)..(827): unsure at all n locations
atcacantcggatgcngggagaaaagccttcaatgcattggcattggccttaaagataaaacaattaaataaaattaaatttttagtaataattcaacataaaattcattttgatcaattccattagtgttccatggatattaattaattaatttcttttccaatatgtaatttttgcaaaagaaaattccaaaaaaaaaaaaaactgacccttcacacaattcattccttctgctgcaccacattgctcatgatactgaaaaaagattggaaatttcgagcttcatctgtagggcgaggatttagatttactccccaaatatttaaataaatatttgagaaaaaatgtccaaatatttatattacatgttactaaagacctttttttttgctatttggactaaaaaaaacttttccagattattttaaaatttcagcgccggatatcaaaaatttgcccaaaaatgattaaattatgccattttgagggtctaaaattcaattataaggttgagaaatggaagaattcggccctcctccctggctacgggcggggtccggacaatttgtcagtggacaatccgtcagtggtcaatccgtcagtggacaatccgtcagtgaaggacaacccgtcagtaatggacaatccgtcagtggataatccgtcagtggacaattcgtcagcaaatttttttagagctatgatcaaaaatttttcaaaaatgattgttaaatttaataaatacaatttcttatagattcttaagatatctaagtacttttaattcaattaattgaccatctcgagaaataatcatttacttctt

SEQ ID NO: 43273 - DNA, 876 bp, Heterodera glycines
tcccctattttcaaattttctgttcaattttattcatttttttctcgaaatactttcttccgttttacttgttttctcttttattttttggaattttctaattgtttcacttttttctgatcattttcattttaaaaaactcccttatgtatgtactaatttgtttaaaatttttaaaattatatttggtaaaattacctgtgaaatccccttatttgaaaaactttttgagattttttgtaaaaacaagtttatagggatattttcttaagttgctgaccacgattttgacatttgttcacaatacgtaatttaatgccaattcttaatgttttcgaccgcagaaattttttaacaacctttaacaatttatgatgaacacaattgctccttgtgatcttcagcatacttacaaatgtatgtttgtgtcattaaaaacggtgggggccgattgggccctgctgattgtgcccggtccgattgggcccgatccgtttggccccggtcccattgggccccgatccgtttggcccccggtcccattgggccccagttcgttgggccccggtcggattgggccccggtacgattgggccctgttgattgggccccggtcggattgggctccgttacgattgggcccggtccgattgggccccgatccgtttggccccggtcccattgggccccgatccgtttggcccccggtcccattgggccccagttcgttgggccctggtccgattgggccctgttgattgggccccggtcggattgggctccgttacgattgggcccggtccgattgggccccgatccgtttggccccggtcccattgggccccgatccgtttggcccccggtcccattgggccc

SEQ ID NO: 43274 - DNA, 821 bp, Heterodera glycines
cttggatcgacaacagcaaatccatggacgaaaaactggtggccagaaagggggacgtacagggtggaagagaatgtgggcgatgactaaaagaatttcgatcgcgataaatttctcgagtattcgacatttttttttaaacatcaacccattcttttctattatacggtagtagaaaaaatcgaccaattctcagaagtccacgggaaaaaaccagttttttaatatgtgcatacatcgaaaaaggggggtgggtcaaccgaaatttttgcgaaggggtctggggggggggggggggcaggggccaattttgcgaaggggtccagcaatgtaaattgacgacctttttttggtatgtttcgtttcgtttccgttttcgaaaattatttttttggttttcgcacacccctggtccccatcaacaggaccacacattcacacacaatacacacctccttcgtgtcgtccatcaacagggcgtattggcgtgagatcagcgcgttctgttgctgctggtcagcggaggtgatcatcgccgccatggacgacggcacgccgctgccgttgttgcagctgacgctgctgctgttctgcgagccggacgagcagcgcgattcggtggccggcgacacatggaaatccgggtttttgccatgctttccgtccgtttggcagtcgtacaggtacagctgaagtcgcagacaatcacgtactgtaaaaaaaattgaatttgttagttcaaattgtggaatggcatttatgcctccgaaagaccatttaagaatttgttatcttttgaaaaaaaaatcgctcgaaaaatt

SEQ ID NO: 43275 - DNA, 978 bp, Heterodera glycines
  unsure (1)..(978): unsure at all n locations
ataaagcaacaaaatgaagccaaatcagtattgggacacatattttttaaactttaaactccttgtcaagaaataataaatagattaggtaattttttgagaaaatttttaatttattaggtgtgtgttttttgaaatttttgggtcgattttttagaggcgtatttttcttttttattgtatttttgctaataaattttccaaaaaatgttaaaataagttttttcaaaattgctttttgacaaaattaattttttaacctattttgacgcaaaatcttttacaaattgcacttaaatcttcaaaattttcctctacggcgtctatccgcactttcggtcacgccaaatctttttaatatgcttttaaattgcttataaaattattgaattttttaaataaaaatttgaaaattattttaaaaaaattaaaattttgaaaattacggattacggaaaattacggggttttttgacccccgtcatgacggattacggaattccgtaattgagaaaatcgccgtaattacggatttccataattgaaaatccagttacgcccagccctggttgggttgcgtctgtcctttttcggcactttaaaacaattgcaaaatttgaaaataaatgacaataaaatggtaatgagatgatttattattcccttttccaagtttaaacagtttaaatataatatgtatttgctatggaaatgaccttcactaatcgatcagctaacagcgaattaatggacaataaatgaaattaaataatgaanatttgnggttgnggggagaaaaaggaaagggaaaaacaaaagccataaatgggaaagaaagaaacacccggcgatccggaagaacaaataatggtaattaggacaggtaaatacgatcattgctaatgagaaaagtgaatagngcatcgctttgcttttgtatttgtcctcctttgatttattttcgtacaaaaatttctg

SEQ ID NO: 43276 - DNA, 867 bp, Heterodera glycines
attcttaggggtgtaaaagtcgcttttcgcgccaaaaagcgaaatgcgaaaagcgaaatgcgaaacgcaaaaaaatgcgaataatgcgaaatgcgaaaagcgaaacctcggcccatccctgttgcaaacgtgttttttccggtaataaaaatacaattgtaaatatcatctaaaacgcgtgttttccgattattaaattccaattgtaaaatacaactgaaaacacgtgttttcaggtaattaaattacaattggaaaataccacatgaaaatacggtgctgagttgttataaaaaccatcaaatggaaattttcaacaaaaaactacccataacttatgtcaatgccaaccaaattaaatcttggtatcaatcgatagccctacatttctctattagctgacctaaattttaaaaaatttggtcaagtttgagcaaagttatgaccaaaagtacatcatgaaccaggtcttcaaacttttttttttggcctgccttttttgaaaccagcgaaattttttgaaatttgcaggctaatagaggacacatagggctatcgaataatagcaagaaaataaaaatttctaactaaaactttttaatttaaaataaaattattttgatcatcaaaaattctactcaaaacattcttagaacgaacaaaattaagtgatcttgctatcattcgctaggactatgtttcctctattaacctgcaaaatttcaaaaaatttagttaagtttcaaaaagtcatgaccaaaaaggtttgaaaacctgttcctggtgtactattgatcataattttgctcaaacttgacaaaattttttaaaatttaggtcagctaatagagaactcttagggctatc

SEQ ID NO: 43277 - DNA, 1350 bp, Heterodera glycines
  unsure (1)..(1350): unsure at all n locations
acagtagttaatgccacaaaaatntaaanaattatatcactgacgcattttttggaggcctttaaacttcaaaaatttttttataccaccaactcaatcgttcgccgttttttgtgtaaattaattgtcgcgttgctaattggacaccgcaaccaattatgtcgccagctccaaatttgggctgcttcaccgcttttgtgtttgccgcgccaaccgtgcggaaaatgccagcgctgtcatatgcatatgtgccaacacatcggccaacacattcgtccaatggcatcaatttagtggcaagcccgacacacaaattccttttacggattaataagaaaaattaaattgaacgaatacaaaatggataaaaatgccgatacctgcccagataaaaaaaaatcccaagtatataaaatacacaaattcaaaatggataaaaaaataccgatactcgagagataaaaaatcccaaccattaaaatacatattaaacaattcatttagaaattttcccttttagcagaattttaggattttgttgaatagataatttaggtgaattttttttaaatttacgacattttaccataaattagcagcatagatttttggaataaaattacataaaaaggccatgaaatgatgccgcgatatggcatattaaaagtatatctcataccatcaaaacatatgtatctataaatttattataaatttttgcacttaccggccttgctgtatttttacttcaaaataaaggaagccactataatttgacaccatggatttggcacgcaccgaaaagccgccaaaatcgtctattgtattaattaaaaatatttttttattaattattcacttatgtactttgattttttgcaagacaaagaacttttaagcaaatggggtttatcaagtgaagctttgggatgacaatcgctgtaatttccaattatttttggcccaaaactgaaaccattaaaaaatgaaggttaatttgttctttgatccatcgatgatattacaaatttgtcactgattgagctgtgatggtcattggtctgagtgtctattttgttgggcgctaagaatttaattattattattattaattaattaattaattaaatggatcaattcaagtaggggattaagcccagaccctcgggataaaagtcggggatcggggaggaaatcccaaataaattttatcggggatggctggagaaattttaaaaatgtcgggaaaaaacaccctcgtcgggagtaaatttttttaaatcaaagccttacaaattcatttaaatacataatgattcagtttggagtgcaaaagaaggaattcaattc

SEQ ID NO: 43278 - DNA, 988 bp, Heterodera glycines
  unsure (1)..(988): unsure at all n locations
ggaggatgagtaggnaagtggctaggggagaaaggaatgtacaaatgagagagggtaggggtaggagagagagagagagagagagaggggggggagagaaaaagcggatggaaaataaatagaatacgttggtaatgatcagtgatcacctgtttcagttgggcttggatggaacgcgcgtgtttgcgcgcatacaaatacagcttggaatagaggaaaagcatcagagtggccggaaggaagaaagagagcagcgaggagaacacagcgtaagacggggacagagaaagttggcattgcgaccgcctggcaaagaaagaaacaaatggaaaccgaacggatattctttttctaatcttttctttcactctttctctaattctaatactatttctctctgtccctttttttctttaaattttattgccttccaatttctccctctttctgttgctgtttttcgccgtcttcgccattgttcacggcgccaaaggcaatttgagcagtgccaacgaaagcggaaaggagccaaatggcacaaatggcccagcaaatagcacggcgattaatgaaccttcaggggatggatgaccttccgaattaataccaaaaattcccttagtttttgttcagcatttcctttaaattataaattcggaaacattttcgtcccaattgccaatttgcaaaaaattttcccgatggcatttcctttcgtgtttaaaacaaacaaatagcaaaaaaaggaaagcattgaattgggcgggggagagaatatttgatgaccatttgagaagcggaaaaggggaaagaaaggcgaaggaaatggcaaacgaaaaatgaaaaaaagtgccaaccgatggaattcgcaaaaaaaagtcgtaaagtgtttcgaatgccaattccccccccccccctttctcacctggcatatcgcattggtctgctgatatgcacaaatctgtccaatgcaattgcaccctgaaaa

SEQ ID NO: 43279 - DNA, 975 bp, Heterodera glycines
  unsure (1)..(975): unsure at all n locations
tttattttgatggttttttgactaacgtcatagcacccacacgtttctattttaaaataaaaataagccggtacttagaataaatattaaagataaaaccaacagaattattatcgctatagacagcgcaaagcttcgattttgaggtaagagcttttaatcgctaaattttatcaaaaaaattagtaatcgaaagtcaattttttcgtttttgttttgaagcgcctttaaaaatttcgatgaaattaattagcgaatgcaacaattaaatgttttgattcgtttttgccaaagatccgtttgaattgtgaacggaatgccttttgatggtcagtgctgcaaataaaataaaataaaataaataaattaaattaaattaaaattttattttatttttttttaaatctaacatataaagaaatggcgcattactgctaaaagcaatcgtgacaagaaggttggtcggaaacttcacatagaactcaatgccaagcagatcaaaatttaagtgtggcaaaataatccgtgacagatttcccttaaaagaaaatggaaataaataaatcattttgaaaaagaaaatgtgttgaattattaatggcccattttaaaatagttttaatttggcgaaaaattattttaaattcaaagttcaccaatataatttagaaaatttaaagttttattaaaataatgcttgtcttttcatgctaaaatgcccaaatttttcaaaagtcaaagattttcttaaaaaaagtaccgtacctaattaatagccatttgaaattctagtggtttttttacacaaaaacaattaattcattttcgttaaaaggaatttgtgtgtccaaaaatatacatataataaatcgcaaaatatgtgcacaaaatatgcactatgcgaagtatgcacaaatatgcaaatacgcatatgggaaatacgtccctagaagcaccnaaacnnaatttaaaaaa

SEQ ID NO: 43280 - DNA, 994 bp, Heterodera glycines
  unsure (1)..(994): unsure at all n locations
actttttgttgaaagtgcgtttgattgcactcaagagttccaaaaaaatgatgccgtagaaagggagtgaccacaattctcgggaaaacaaaaattgtgccgttttggcgacattaatttactagccgatgtttattcattttttgctcgcttttagatcagcttatatgggtgaagggaaatgccacaaattgctggtgttaaatgcatgccgaatttgcctgattattagaatggtgagtgaccatcgcttataatgacaaaagtggaggaagagatttttttaatcaaaaatagcattttttcaaattttgcatttattaataaaaaaacgtattttttttaaatgcataaacttttgaaaaagcatttttctgaaaacgttcattttttcggggtttattttgtgaataatttgtcacttttaattcaatgatcatatggttttcatttttattgaatttttattaaaaaatttgtgaaaagcgccaaaattgaataaattttggatttcaaaattttttttggttttttgactaataaaattatcttaaaacagtctaggaaaatagagaaaaattatgaatggtatatacaaaattggtctgaccttttttgcttggcaccttcaccggattttagcccaattaaaaacagccagcgctcaattacagtttctgccaacctctacctttaaaaattcttacaaaaatgccaaaaaaaaacttacaacaaactttttggaagtgccaaaatttgaagctgcaaaatttttttcaatttttacaagctttgggtgagggggagctgctcatttatttatttatttattctcatcattcattttcatttctcaacaggtggccgccgccgccgccccccaaaagcggcaaaataatttacttggccacgcncgctttgnccgncgcgaatctttcgcgcgcacctttcaaataatgcattttgaatggatgtatttttatggggggggcat

SEQ ID NO: 43281 - DNA, 958 bp, Heterodera glycines
actaattttccgagctgtttaggtgccctgtcgtcttgtgcttcatgggtggcagtgtgctgctcttcaggccaagattggtttaaaatgcttaccactttttaaaaatggtgacaaattaaattatatttttgtatagcagaggaattcgtctgctaaaataaatattatcgtatccatccctttctgtccctcacgcattgccatatttccgatccttccaacacttctcctctttatttcttattgattttttatcgttaccatatttttaatgtgctttcacccccctattaaaatgtacgagatgaaggtccaggcgcagaagaaaaagaacccgaaggttgtgttccgcgactcattcaaccttatgccttgtgcgctcggacagctggtgcctgcctatggattggatgtggaagaaaagccgttcttcccgcatatggtcaatcgcccggacaactacggacgacaaatctacccgacaccggacgactatctggcacaaggaatgatgccagaaaagcggcgacaattcgaccaatggtacgaacaacaccgccaagcaccatttttgcttgacgaggcattggccagctactgtaaaaacgacgtcgacattctcacggcagcgctcgtcgctttccgccgtgaattttttgagataacaaagaggcaggctgtaaatgagacagacgaccaagaaagcaacgccggcattgacgttttgcgggagtgcatgactatcgcaagcgcctgcatgaaacactttcgcagcaaccacctccctgctgctgcaatacgagagcagcgatgatcaactcttcaaatcgtacatccgcgaattcatggcgcaaaaaatacaagcaaccggctttgacgcaaacatcaaaggcaacgccgacctcgaggagcaattcgtccgggaatgctacgaaaaatatggcatcacgatcga

SEQ ID NO: 43282 - DNA, 1215 bp, Heterodera glycines
  unsure (1)..(1215): unsure at all n locations
gtttgtgactagaaaaatagcagatgcatatcaaatgactacaganaattacagcctccnaaganaataattgcttgcacaaagcaatattttgtagagcccatcaaacacattgtgcttataggaaaggcagaattgaacaataggggcctttttattatgattacaacaaatcagcatggcgtctcgctgatatggtatgtttcagttaaggtttagccgatctacaaatttcggcactgtctattttgtaaaagcgaatcaaattcctttggattccaaagtggaattacagaattgcgacggcaaatcctaaatatacaacgacgctttcattataaagctttaagggaggaaaagtaatacgaatatttcaatttcatacttatccgaatagacaaagataggttacacacgaacatttttatagaaattccggctgaaactaaaatccctcttttggtcttaacctatgatttttggcccattatggatgaattaagtatagaaggcgtcgcagaaatacattcatattttctaaattcgggtttcagaaaattaagatttaaaagaggctgaattacagatgcttttcaaattttgggtgtatccgaatagaaagaagttggaaatcagtacttttcacgcctataaaattcgggccgaaaaatattggtgtttgtgactagaaaaatagcagatgcatatcaaatgactacagaaaattacagcctccaagaaaataattgctttgcacaagcaatattttgtagagcccatcaaacacattgtgcttataggaaaggcagaattatacaataggggcctttttattatgattacaacaaatcagcatggcgtctcactgctatggtatgtttcagttaaggtttagccgatctacaaatttcggcactgtctattttgtaaaagcgaatcaaattcctttggattccaaagtggaattacagaattgcgacggcaaatcctaaatagacaacgacgctttcattataaagctttaagggaggaaaagtaatacgaatatttcaatttcttacttatccgaatagacaaagataggttacacacgaacatttttatagaaattccggctgaaactaaaatccctcttttggtcttaacctatgatttttggcccattatggatgaataaagtatagaaggcgtcgcagaaatacattcatactttct

SEQ ID NO: 43283 - DNA, 422 bp, Heterodera glycines
cactttttcaccaaaattcccgttcaatcttttgaaatataaatttagaaggtgttattccaaaaaagccaaaaaaaatctgtagattttttaaaattgctatttttagtggggaggggagactttttgagtgcacaatgaacccgtacagataatatgcgaattagtggaccaatgaatggtgtaaatcgatgagaaaatgaacggacgttgggggcggggggattatcatctctcatcatcgattattatttttgagtgagactttttacttccaaaatttgcgaatctgtatacctaattcctacagatcataatcgtatttaacagatcgttaataatttacatttaatgaattttaataattttttttctttaattattactagagatcggaccggtcggtttttttcggttttttc

SEQ ID NO: 43284 - DNA, 1259 bp, Heterodera glycines
  unsure (1)..(1259): unsure at all n locations
ttntatgctgttctttagctttcggggcacattattagaatacnataattaaatgaacttttaacttttaccaaaataattattatacggcaaacacagtaattttgtttggcatttaatttgccattcttttctttggctcgtcattttctgccgaaccctctcgccgactgattggcaagtcgtgccaatagagaagctctcttatccgcccaaggggtttgtgtttctgttgggataaatcgctgtgtccctccaagggggggaaagcggaagacaaacggagcggtggcgcggaagggaggcgaactctgatgcagttgccgaaggggaaactgaattggggggggggagggaatggcacgcggacacggccaatggcaccctttgtttgccttgacaattttgccatttgcttttcatgcccatccgcccaccttctgctgcgttgttccaaatgggcttgtccaaatatcattcaaagacatcagcgcttcgttttgtttagctggtgcccacaacaaagtgccgtcggaatgcactgccaaattggctaatgccattgtcgcaaatgccccgaaaatgacgcacaaacaagaaatatttgcgttaaaaagttgcaccattctcattaaaaatgcacctaataaattggctaaattttgaaaattattagtttgccatttattaaagaatttaaacgcttaacccaaaaaacctttttaataatccgtgagatttgcaaatggcggggggggggggagcaaaagtaactatttttatgaaacaattggacaaaagacacccaagggattaattggaatgaaatcatcgcatggcacagaaagtgcgattgctggcgataaccgacggattgccacaacaattccccggccaattgaccgaacaaaggcaattcggagaatgaagcaaaaataatgaagcgaaggaaggattaagcccaaaaaggaagaaaaaatttgcataaattttgtgcaataatacaacagtttatttgttttgttttgttttttgcattgacccaaagaatgattctttgaaaaacttaaaacaccaatttttctgaatttctgagtgtgtaacaatggaattccgccttttctgattggccatcgatgccaattggcncaaatttgttgtgcttagtatgtggaaaataatgaaatcggaaaggagggaatggccaattcgcgaatgtttttgtgaatgaatgtaccccaacattttattattttaca

SEQ ID NO: 43285 - DNA, 869 bp, Heterodera glycines
tttataagccaatttacgcataattggcgccgtcaaccgccccaaacgtcatattggctttaatgatgtatacaataattggaatgatccatttctccgtggctttctctgttgttccctgatgagatgggctgacgccaaaatgatgatgcgatggatgatgatcggtggtgaacagagcagaagatggcaattggaatatgattgaggggaggggtgaagggttcattaaatcggcggaataataatggtacgaaaatttgagaatgccggtgccaataaaccagtcgttgatgagaaacagagacacattagacaatatgtgataattgttgtttgttcattctgcctgcggcagctgctgctgctgaacattcaaattgatgtggccgatggaagacggcccatgcaggaggaggcaccgcacaaacaggcttttccggaaaaagaaccgtcagtgccagccaagaagccgtaactgtacgagagctcctcacctttttgatgaagaaaaagaattgaaaatgctttaaaaatttgcattttttgtagctagagccccatatcatgtcgggatccagtcggggtttcccgaccaagttggtcccgagattaatgtcgggatcaaaacccaggcaaaatttggattgaatccagcaggtgtcgagaattaaatccggtcaaatctggcctaagatgttttgcttttgctgcaaaatcagtagaaagttcaaattgattttattccaaattaattagtggattattgctcgagattttcgctctctgtgttcgaaaaatgtccactctctcgaacaaacataactaagagaatgaagaagaaatggatgaggggggggggggggggg

SEQ ID NO: 43286 - DNA, 750 bp, Heterodera glycines
attctgcgtggattttgctccccataattgttggagtacccaaacggacacttgaaaaaatcgatttttttgttttcggggcagtccccccgaaccgatgcgcccagatttatggggagaccgaatccttcgggaatagcttccctatagcctgtactttaattctgcgttggatttttgctccccataattgtttgagtaccccaaacggacacttgaaaaaatcgatttttttgttttcggggcagtccccccgaaccgatgcgcccagatttatggggagaccgaatccttcgggagtagcttccctatagcctgtactttaattctgcgttggatttttgctccccataattgtttgagtaccccaaacggacacttgaaaaaatcgatttttttgttttcggggcagtccccccgaaccgatgcgcccagatttatggggagaccgaatccttccggaatagcttccctatagcctgtactttaattctgcgttggatttttgctccccataattgtttgagtaccccaaacggacacttgaaaaaatcgatttttttgttttcggggcagtccccccgaaccgatgcgcccagatttatggggagaccgaatccttcgggaatagcttccctatagcctgtactttaattctgcgttggatttttgctccccataaatgtttgagtaccccaaacggacacttgaaaaaatcgatttttttgttttcggggcagtccccccgaa

SEQ ID NO: 43287 - DNA, 941 bp, Heterodera glycines
aagagataaccatttttctgagaattaattcacattttctgcagctctaggttaatggaaaaaattttgaagaggctctccggaacggattagcatcggggttacgagatagaaaattgtcctaaaaagagatagccatttttctgagaattaattcacaatttccgcagctcttagggtaatggaaaaaattttgaagaggctatccggaacggattagcatcggggttacgagatagaaaattgtcctaaaaagagatagccatttttctgagaattaattcacaatttctgcagctcttagggtaatggaaaaaattttgaagaggctctccggaacggattagcatcggggttacgagatagaaaattgtcctaaaaagagatagccatttttctgagaattaattcacaatttctgcagctcttagggtaatggaaaaaattttgaagaggctctccggaacggattagcatcggggttacgagatagaaaattgtcctaaaaagagataaccatttttctgagaattaattcacaatttctgcagctcttagggtaatggaaaaaattttgaagaggctctccggaacggattagcatcggggttacgagatagaaaattgtcctaaaaagagatagccatttttctgagaattaattcacaatttctgcagctcttagggtaatggaaaaaattttgaagaggctctccggaacggattagcatcggggttacgagatagaaaattgtcctaaaaagagataaccatttttctgagaattaattcacaatttccgcagctcttagggtaatggaaaaaattttgaagaggctctccggaacggattagcatcggggttacgagatagaaaattgtcctaaaaagagataaccatttttctgagaattaattcacaatttctgcagctcttaggg

SEQ ID NO: 43288 - DNA, 1210 bp, Heterodera glycines
ccccggcttttcaactcgttttccacccatcgaatggcttcttaagatttgtttagttgcccgttttgaccgattacggccgcagcgaacgaaagtcatcgctgggagttgcgcaaatggccctgcacgaactgcagccgagcaccgagccgctgctcgtctggttcaaactgttcccaagttcgagtctaaccggaggggcgcaaccgcccctcgggggagaaccgtcccgcaaaaacagcgaagggtcagcaaattgagcgaagggcccaccgaccagcagcagaccagcgaatgtcttaacacaccaaatgcgatcggtacattccccccccctttcctcccctcccctttcccccaattgttcccatttctcatttttggcatttctcaccccaaagacaatatcgctcgcttgtccaattccaagtcttacccttttatcacttcgcattttgctatctcactttttatttcccattcaaagcatcgtaaatgattttttatcactgtccaattgaatttggcatcatttcaattgctaatgtttaattgcctaatcatggcggatgcccaatcattcaccgtgggtgcacccagtccaggaggttggccatcagctgtgccatcgccctttctcccttctccgccacatgccattccgcgttcgccgtgttcaccgcttcttcatccgtcgctgtttttgcgccctctttttgctttattagcacaattttcatctgcttccgttcgtccttcctcaattcgcttttcttcaccaaatcttcgggtcccttcagcaaaatgatggcatccgttcggtcttttctgaattcgctttttatttttggctttttctccgccttcactttccgatcagttctttggccgtgtcactgctcttctgtcctatgcccacaatgaccaaattatgcagcttttcaagcttggctatttcccaaagtgtccgtccgatttcgtcagtttctgtgttcagttcggtttccaccacggaatggccacttgcggaaaccatttggacaattgacgggtgtccgtggtgccaattgggccaaaaagtgccttaaggggagagcggcattttcaaacaattgctgaccaactattatcagcgtaattgaaaagtatcacggcaccacgctgaatgatcgcaaacggaggacgagaaatatctgtagaaacaacggaa

SEQ ID NO: 43289 - DNA, 996 bp, Heterodera glycines
atttgggagagattatatcgattttagtgcgctaggttcgatgaaacttttaaaatataagcctaacttttttggcctgtttaaaaaggaattaaaaatttttaaaaattttattcatctcccttttgatagaaaaagcatcagagagccttatttaacttttaattaacatttggtgcgtttcagagcacgttctaaaaaatatttatgaattaattttgcaaaataataaataattaatgaaaaagtcagaatttcgaaaaattttaaaaacaacaagcgttggcattttttcaggttaagttagtcctttacaatggagaaggcctgcaaaatttggagagattatatcgattttagtgcgctaggttcgatgaaactttttaaaatataagcctaaactttttggcctatttaaaaagcaattaaaaattttaaaaatatttattcatctcccttttgatagaaaaagcatcagagagccttaattaacctgtaaataaaatttggtgcgtttcagagcacgttctaaaaaatacttatgaattaattttgcaaaataataaataattaatgaaaaagtcagaatttcgaaaaattttaaaaacaacaagcgttggcattttttcaggttaagttagtcctttacaatggagaaggcctgcaaaatttggagagattatatcgattttactgcgctaggttcgatgaaactttttaaaatataagcctaaactttttggcctatttaaaaagcaattaaaacttttaaaaatatttattcatctcccttttgatagaaaaaacatcagagagccttaattaacttttaaataaaatttggtgcgtttcagagcacgttctaaaaaatacttatgaattaattttgcaaaaaataaataaataatgaaccacagttaattattttcctgagcctaaaattttaaaaacagcgaagcgagtggcattttttcaggttaagttagtcctttacaa

SEQ ID NO: 43290 - DNA, 1888 bp, Heterodera glycines
  unsure (1)..(1888): unsure at all n locations
atgatgaccatcatggaagcgcagctgatcaatttccagctgggagattcatttttgaatgccaaaaagacnttaaattcaaatacctaattaatggtttattaatttgttaatcaccgttatgttgttggaatcagccataattcatacgatcgaaaaggtgctttttgttgaaaattaaatttcagcgataggatagaaagggtaagaacgtcaatgttcttgaactgttaatgaggtgcttgactctaatggaaactgttggcgtcaaaaaaagcagtaaatatcgaaaatgtatccagacaaaatcctaccgccatttcttgtaaattgtatcaaattctcacttttttaaataattcttaaaacgaactgttaatgaggtgtttggtgttagacttttcaaactgtaacgtcaaaaaaaggaagcaaatataaaaaatgtgttcagaaaaaatcttaccgcactattcactctttatttgtatccaattataatctttttttttattaatgaggtgcgtgactctaatggaaactgtggcgtcaaaaaaagcagtaaatatcgaaaatgtactcaaacaaaatcttgtactttttttgttagatcttaaactatagcaggcccatgttagttgtattgggataaaacccgcagggcttacattcttccttggatggcaaagacgtccttgaaattggaccctctcacttgaaaatttaaaaatttccttgatgcattaaaaggtttttttggaaaaaaacgcgtcgcaaaaaaaaaagagcatatggtcattttcggcaaagtacggttctctttgtattcaaataacttttaattatttcaaatgtttgttgctccgcagacttacaaaagcaaaaactaattaattgacaaaatttaaattttttgtaatataatccatatttatttaaagaaatcatttaacatcattttaatgtttttgatttacccaccttcgtagttaataaagattgttttcaatttttttccctggtctatgagcatcttaatagccttacttaattatgtagcaactttaattaataccgaatcgactacattggtgtatacaaagaccaaacgtattgaatgaatttcagagtattttttctctgaaggtttgggacaccgtactgattaggaccgccgattcatttgttaaaattgcacttttcgagaagtgccttttttgtgacgtcatcattttttcacttttcgcgcaacgacctagcaccacagagagccaagggcaaatttttggactcatttttggcataaatttctaattttttagataaaatatacaaaaaaattgcaaaatatgaaaagtgagggaagcaaacaaaaataataataataataataatcatttgaacgctacctaacatcatgtaaatattagcgtcaacatttaaattttctcttttttatgaattactgaattaattgctttagtaaagtttataatttttagactaatatcaataaacatattttttaataattttcatcatttcctttcatttaactcattttagcaaaattttcaacaaaaaacaaacaaataataagcatatacatttacgtgtaaatattaacaaatcgattagctaagctagagaattgctttttaacattcaatgttcattttataataaaatattacatttatttttatacaatattataataatttaaaaaaagtaaatttgaaacatattanatttgtgggataatttcttttttttgatgattattaatttcccatcaattgatctacctattcctaatangttaatgattattanaaatattttttcattagtctcagatgaaaatcagtgtaattataattggactgac

SEQ ID NO: 43291 - DNA, 951 bp, Heterodera glycines
ctgcccgggacgcgtccactgtaaaagtaagttcttggccaatcagtccaacatcgagccttaaaaaagcaattaattattagcctccattaaatattttaatttcttgtttatttattacacccacccataaacattgaccagcgaagcatcgaacacttggcaagggaacggcgaccccttaatgtgttccccctcgtacagaatgccaatcagccaattgcctgtagttcaaattagttaaagctattaataaactcaattaattaatacccaccgattctgtccggtgtaaatgtgctggtgaaggcattttcgcgccgaataacctcacacttttgcttaagcccagcgggggaagtggcaaaaattgacacttcgcccggggcgacgccggaggaaccgcccttcgtattgacctgcaaaaattataaataattataattaattatcgggatttttcttttgattgttttcacaagaaaattgtgatttttgaaaaagttgtttacttattttctttagctttacaatttttgtaatattaaattggatatgtttattatagagtgaacgggacaccgggaccgggaccgggccgggaattcccggtcatccgaaggtcccggtcccggttcccggtcccgggttttgaaaagctcaggtcccggtcccggtcccggtagggcaaccgggaaccgggaaaaacaagcactggtaagaatgggggtctgagtgaaaaattagtgaagaaaattggagtcaaagggaaaaatattaaataataattaatatattctttcaaagaaacaatagcaattgtgcaaatggcctagtggctagtcaattcccggtcccgtggcactctagtttattattttaattattatttacaaaattgcccaccacaacttcaaccagtgagttcacagagcacggctcattcagtcc

SEQ ID NO: 43292 - DNA, 996 bp, Heterodera glycines
  unsure (1)..(996): unsure at all n locations
tcgtgatcagcgcccaaataccccctaatgacagttttggaagatttgggtgaaaaaattttccactcgaaaaccatgtgcacccncctntggtcccgaattccaaaatcacttttatttttataactttttacaaaaaaatgataaaaagatgaaatgaaatttattaaatagagaaaaaaattgcggatttttgggctatttttattttacaaaatatcttttcagaaccgaatagtgaatttttttctgaaaattcgaaaatttccagaatttctggaataacttttttcatattattgatagaaaactcaaataaaatgcataaaattctccgatattttctccattttttgagcctctaaacactaaaatagacctgatctaaactgagttatgaattttcaaactttaacccaaaatcccgaggacaaaaaaagtgaccgattttcaaaaaattttaaaaaattccaaaaaatctgaaacgagaaacaaacatcatattcatgctcagcacctcaaaataccccggaaaaaatttttcacccactttctctaccacaaaaaaatttttgaaaatttctagggggcctagctcgaaaaattttgagaattttcgaacatgtagtacaccattcgatagcatttaaaatgctctacaaaaatgttctaagacaatttttcgctaaaatcaacccctgacgagttatgggactgggactgaaatgtcccgctcaggccaaaaattttttctatttccgggaaaaaatcgaaattttttcaaaaatatcaccaatcgatagagctcgaaaaacggttgcttgaaagtggtctccgtttttctgggaaaaatcggcaaaaaatcctaaaattcaaaaacccgaaaaccgttttttaggcctaactcgaaaaattttgaaaattttcgaaattttaaaatttcaaaaaatcgagctttcaaagctctacaataaagtcgctggccaccccccgctc

SEQ ID NO: 43293 - DNA, 991 bp, Heterodera glycines
tttaatcccttactttttggataatttaaaaataaaaatagcaacaacaaaaaaacggtgggtggtcttttgccgcccagggtcctggacattttttcccgaaatttgcagaagaaaaattaccaaaatgcagggaccaatcatcgaattgggctgcatttgccaattttcgagaacaataaaaaagtaaatcaaaatttttttaaagaattttcaataaaccaaaatttttctcaaaaaagtcaaaataaattttcaaagctaaaaaaacaaattttttcaaatttttttttgtcgcaattgctttaataaattaaaaaaagattttctgagggattcagaattaaaaatgacaaattctaagaaaaaattttccttaatttttgcgacatccgttttcagccaaaattcaagtttaaagaaatcactaaatttatccttaagacatagaaaacccaaatatacgatgatcaattaattccatgctaaaaataacattttctatgagcacgtcaataattattccataattcaaattgatcgatcacttctcagcaaatcattcattcacttctgtctgctgatcactcgggccgggatttgcgtcgagaagcctaaaaattgaaaacgcaataaatttggattttctgaaaaatcattcgcttacccgtccccaactttgtcctcgttataaatttgaatgtcaatttgattccactgatcataaaatcgccagccaatcgcttcttcttcccattttgtccatttgctttcgtctcgcacaattggacaacggacaagcagaaaacgatggctattgtcagttcttttcaatgccaattgttcccgagtcaattcgttggtcagcacaaagggcacaacggagtcagcaaaaggcggcggaaagcgaatggtgacaatgaaattgacgggagatgaagccgagggaaaagcctaaaacatggaaaaattgattaaaaatacgaaatga

SEQ ID NO: 43294 - DNA, 572 bp, Heterodera glycines
ctctccctcttctcctctccccctttctctctctccctcgctctctctctctctttttctctttctctctctcgtactccgcactctcagtccgctttcccttcccttacactctctctgacttattccctttctgtgtctcagaatcgcacattttggccaatgctcaggagcaaattcagcacttggaattttcgctggtcaccggcggcaaaggaatggagagggaattggccagccatcggttggacgacaatgtcgccacggaactgaaacttgtgctggccgccggcctctacccgcagttcggcgtcgtggacccgaccaacaatttccgagtgcgacgagtagcgaacaggggcgtatctagaaatatttttcggggggggggggggacccgacctgaagaccttttttttttttctatttaaccaataactttttttccacagctgggtaacaactgcactttttcactaaaaatgaccctattttggccgttttacggcaaaaaacttgtaaaaatagtggcaaatgtaggtccggcggtgccgataggcgccgccggaaaa

SEQ ID NO: 43295 - DNA, 654 bp, Heterodera glycines
tatgctgtttatgctcaagacaaacatagatgaaagaaaaaaactttaaaattttttttttgaaaaatgttcgaatccgggttcggggttcagaatcggtcaaaaataaggtcggattcgtgctcagcacagtaaaatagccctagaaaaatttttccatgatttttaaagaaaaaaaaaacgggaccagtaaactccatgattgccgtattaccggcttaggcgccggctttgagattaattttaggatgatgtaattaattctgaatacttcataacctttctgaaatattaaagaggtgttgatgactccttaattgagcctatatattgtgatttacaacagtatttcctctccttttttcttaattaagctgacaaatgttttcaattgttggaaaaaaggtcttcaacactacctcgtgcaattttctttcgaaggcattttacgctcatatgagcaaagatgaaataatgtggcattggcctgcgcagagtaaattttggttgtttttttcaattttgaatgtttgtctaaatgttacaaattctcagaatttgaccaacatttcatcgattacttgaacaagccggacattgacgggtgggaaatccgaaaaggtacaaaacaaattttgaataaattacacattt

SEQ ID NO: 43296 - DNA, 1439 bp, Heterodera glycines
ttaatagaacccggaaatttcaaattggcggatcctgttgcaggattggaattcaaaattttttccaggacaggatccggcaggattaatcctgcaaatcctgcatttaaaatctgcaggatcctgcgcaggattgcggattttaggaaatttcaaaaaattctgtattaataaaaaagtctttcaaagtataaaaaagtattcaaatatatttttaaaccaaaaaatgatgaagatgaaacattaataacgtttttttgcttacactccaagcaatcgactgaatcttctttaatgcgtttaaaaagaccgatttgccaaattgggtggctcataataatagcttaaattaaagtaaaataatttttatttaaatttctttgcaaaaaagccataatccattatgtatagggatgggatttttaggcacaaaaaatcgcgaaataggcacttaaaaaggcagaaaaatcctaaaataggcacgaaaatagtaaaaaaaaattttattaacgctttttaggtagcaaaacacataaaaaattcaattgtataaacttttttctaataaggataagtttttaaacgaaaaatttttattaagaaaaaaatttttgaaaaaagaaagtttctgaatatttggcattctatttttaaaaattttcaaaaaatcaatgcaggatcctgctgaatcctgcataaaaatcaaatttgcgggtcctgttgtaggattggaattcaaaattttttacaggacaggatccggcaggattaatcctgcaaatcctgtattttccaaaatatgcaggattgcggactgggatcctgcaaaatcctgcgcaggatcctgtcctgcgccggtctctaataataagtatttatttaaattcaaatcttttttggtaattgtctaaatgctgcgattttatatattttagtttcgttagactttgtactttcgaatgataataaaaagatagggtttgttcgaacatgaacaaagtcgtggtgagtcgttgcacaaaaaagctcagtgtgggcgttccacaaaaaactcacaaatcagtgattgattggttattttccggaagcctatcgcaccactttcggggcaccaaaagtgcctgatccggaacccggaccggcccggttaaggttcagtttttcaagggctatctcccaggccgggtccggttcttgatccattcacttggagcccgtcatgggtcgggcacatctgccggtggaccctcagcctcgctgccgaccctgtcgatggccaacccaagcaagcttgccggtaacaccggcttttttgtacagctcgatgagctctacaaaacggtatctatcaatcgcgtcaggctatgtctactacaaatggagaaaatttgcgagaagtgagaagaaatgaaaaattaaaaaattgaaaacgacttgcg

SEQ ID NO: 43297 - DNA, 1143 bp, Heterodera glycines
gttatttgaaaaatttacaatatttaaaaaatattctggactctcctggaaattttctataatgtgccaattcttaagaaaaacataaaaatcataaaaattaaaatctttgaataataattattatatatacatatatatatatattttttttaatatgtataattaacttcgaaattacatattttaaattaatgacttataaatgaatttaaaataaaagtggaaaaacctataaataaggtttatcaaaattgaatacaaaaatatacatttttaattatgcaattttataaaaaattccatcttttaagcgcgatcccgaaccagaagaggaccactacaagttatatgcagaaaaataattattattctaaagttattatttaagtcaaaacacatatttataatttaaagcaaaattcttatatttcaaaataaaataaatttttttattcattataatccaaataaaaacatataataataataataatataattcttttctatttatttaacttcattttctaatttaatgaaccacataatgaataaatttaatttaaaaaaaaatttaatgaaaaaaaattaattttgcatctaattacattttgaattttattaaaatatatagaaaaaatttttaagaatataattttatgtaaatatatgatattaatttttttaaatttattatttgtttgaaaaaatttattcaggcgaaaaatacaaactatttaaataaaaattaatcatttttcattgcatatgaatttttttttcaattaattttttttcaaattgttttttttattgcattaaaataatatatcaaaattatgtatataaatgttttaacgcaaactgcttgggatggagcttaagcagcggttgcctgcgcaactgtgaaagaatgggccgttgggagataggattttgagaccaaatcgttgtccgattaaacaatcgactaattgacacgcgagtatatagccggttaaataaccggctaattggccagttggctgtgcttgacctgatccaacggcgtcaattggtcctcgacttttgtgggcagcgatcagttggtgacggcgatcggtgaacaccggacctggtgatgctcggacagaggcgaaga

SEQ ID NO: 43298 - DNA, 1536 bp, Heterodera glycines
  unsure (1)..(1536): unsure at all n locations
ttcgataattttgcttcctcccttcagcagcagttcaatctcttttgcccccccccccgtcaaattcttcgatcacttttgcccgccgttccttttcccctcagcccattgatcggccgaccccctcccttttccctccttcgatcacttctcttccctcctttacactctcaaatcgctccccctccccctcttaggtcgcttttccaattcaacaaagcccgatcgcgttcaatagcagcctattctcccactctttgatcatttttccctctcattccccgctgtgccgttctctctcacttacacttcgtcgggcgctctctccccttttcccattctctcaccaattcactaccccttcccccgtccccatgctttctctctctctctctctctgctgattccagctgatcactcgcccctcccccgcgctctgatcatttatttggccattcccccgccaaattctaatcacttatccatttcagcacataaccatcaccaccacaacaagcatcaccgtcaacaacaacagcagcaccagcatgattgcccctctgtttctgatcacgtgatcggtgtgccgagcgtgtctacttccgcctcttccgccacagtgccgccgcccagccgcgacaaatttgccgtcgcttcgccgcgtgtggcgattgtcagcagcacagcggcacactctcacagcagccagtgcccagaactcgccgggcgcctcctcaaccgcgtcgtaatcagccgccaccgcagcgacaccgcccncctccaccgctcattgtcaagcagtaccagcagcagcaacaccaccaccacaagcatcatcaccaccaccattctcctgctgctgctgtcgctacaataggcagtcccactccgccgctgatcgctgtacggtcgtacgtcgccggcggcaccgctgccgccgcctcttctccgccacagagcagcccaatgcgctctctgtcaagtgcctcaggcggtaagcgagggatgtaagcatttgaagaggaggaatgagcgtgaaaatctcacccattgattcaagaaatttctcggttttttgccatttttaacctgctcgtttttagtggtggcatttttatattggaaaatgctaacccgccctaaacgaaaggaactaagggatttcttaggggagtatccgttttgaaaataggcattccttggggggggggctgatgttcacatttgtgccctcgtacatgtcttttcttaaacggcacagggctttacgtcagtgcgcctggaaaaatcattctgttcggcgaacatgcggtggtttatggacggacagccattgcgggttcaatcgatctacgcacttatctgtgagtgttttggcctaacaaacacctgctaattgaatagggagaggactgcccataggcattacgcgccgaattgcctggggcaatttgaaagagcaaagccaactcactgtataaggctatcaccgccgttcgattgtgcttttggtcctaattttctcaaantatataa

SEQ ID NO: 43299 - DNA, 1400 bp, Heterodera glycines
agttgaaaggaacacaaaagtgttgaaggaggcgctgtgcaaattggtgtcaatctgacaattaaaaacaattttaaaatttgattttaaattcaattttccatttgattggccccatttcttacaaaataaagtttataggcggtaatgatcggaatggatcccttcgatgggtccgctttatcaagtggggccaattggacaacagtgatcaagcgatgcgcagaaaacgcaaaagaaacgacaaaagcaaatgcaattactggcttacaagcacgacgccaaaactaaaaaaaatgaaattaaatcacaaattaatacataccgtaactctaatatgaatagattttggtcaaaaatgatcattttgaggaggacttttggtaaagaaaaaacctaagagcacagatattgttagaaaagacagtgctagatttcgacagtaatttaaaaattatgaaagtttaattgtttttgatttttgtttgttcaaatggcgagaagtttcattatactcgaaaactttgctaaaaaatgccttttgcgtatcagtcagttttgtttcatgtttctcgagttgattccttctcgtgatttgagtcctcgaaattttttagcgaatagacataaatttcatctaaatatttcacttcaaatccggtataaaatccgtactggctttttgtcggaccggcacccaaacgcttgaacatcggttgagtgcgatggcaatgtgcagcatgtaaattgggtagttgaagaaatagatcagaaatgtgccgacgttgtaaaatgccgacggcgaagtgccaaaccatgaggaagtggggccaaaaatgggcagccgatagtacacaacgtcgatgatgtaatggccaatttccttaattaatgtaaaaaatgtataatatttttaattttagttttaccaaaatgccaattacgctcaaaaagcggaagaatggcgaagaaaactccttttttgtgaccaacacaaaaatgacgcgtaaatacataggaattgagacgatttcataaatggaatagccgacaaaggaaagagttgaaatcatttgggaaaagtcagcttaatacattaattcgtgaaccaattaaatgtggctaatttcttattcagttagtagtttgtcagaatgactttaaattagggttaagccccgaccccgagctccccggtccccgaccccgatccccgacatttttgggcctattctccaccccggcccccgaccttttgccccccgactccccgacactaattcggggaattggggactccgagcgttgtagagatttataaagttatctacaacgattgggggaaaggttgataatttatgaaattttgaacaatttttcttaataaaattaattaaaaa

SEQ ID NO: 43300 - DNA, 1208 bp, Heterodera glycines
  unsure (1)..(1208): unsure at all n locations
cttgaagtgatcaaaattactataaaatgcactgtttctttaaaattacagaaattttttgctgttcgaaattgaacacctaaattctcatcgtacataagtcgtagagaaatacggtttttcgtattttgtcacaaattttttatatctttgccattttcctgctgtttgtgccaatctttcgggtccccgtttgcncaacactcaaaggcaaaaaaatgaaataatgaaagtcagaaggtttagacactaagccaaataagcatatgaataaatgtttaaaatgaaataaataatttattttttctaaaaaaatctccttctccaccaatttccttctattttctcacccagacccccattttagtcccgccgggaccagggactggcaaaaccggaaattcccaacccggttccgctccccctcagctctactattaacacgaaaatcccaaaaaaggcaaaaaaacataataaaattcaacgtagaagcttcaaaccaagtggaaaatgtgttatttatgcttaatatatcggaactagtgcgcaaaaaaaggcatatgactcaaaacttcggtctctagttatgagaaactcgccgaagcaattcccatttactaatctttttgtaatacagtacgaacagaaatatacagtaagccagtattaataaattcaaatttattgcaaaaaatgaaaagcaaagtacaaaaatatattgtattttggtgagataattgctaatttgaggggagggaggagaagaaacattcgttttgtgctcactctcctcctgcttcacattgcttttacatatgaaataaattggatgaattaattacccgtctaattggcattaaattttgggtttgttatccgtctgagcttttcctcttcatttgtttccttattcaccggcggcggcactgtctgatcgattagcacccgttcattgtcactcattggcacctccgttcgatcagtgccaacagtcctcccctttagccccacttctcattgtgaaatgctttatgtcgtcactgatcagctcatcactgtcatcttcttcgtcgtctccgatacaatccgtttgttgttgttgctgatcagctgcggttgttctcctgctactgctgatcaggctgcttctgcttcttctgctgatcacttcccctctgccggtgccgtcactctccggcgccattgtc

SEQ ID NO: 43301 - DNA, 1104 bp, Heterodera glycines
  unsure (1)..(1104): unsure at all n locations
tgactttggcggacagcttggccttatgatgggtgttcnagtgatcacaatcatggaaggtggcattctaatcagtgagctgctggttttgttttttgtgccaaaaatggtccacttggctgagtcgattgttgaacattgtcgttggcactgatcgggtgccgtcgggcgatggcccaatgttgccttctggcgacacggacnccaatgtttgcatttaatttttaataaataaataaatatgttgaaaaatgtttatttaataataataaatatgatttgattcctaaaatattttaatatatttaattgagaagttttatttcattttttaaaattaatatttgatttatttaattaatttctctatttttaacacaaaagaaataattttaacctttagttttcctataagaaaattgtaaatattttcaagtgtttaagggctaagaaaaggcgtgttttggtccacaaaggctctgttatccgttgggcagccgaatcagaatgttgcaatgctggaaaattaggacttggcacaaccaactcaaatggcgagggcaacaaatattactcgactattgatgattaaggccaccggactgattgatcagtttgatcagtgatcggatgatattcgaatgttgggggattattagagaaggggacactatcacaaatgatgcataaatttgaatgatttatttatataatgtctcaaaaattgtcaaagttaatcacccttctgctgcaggagggaatcgtcggccggcggttcacccccagggacgggcgaaaacttcgcgtttttgggcttcgttaaaaaaatcacgaaatgtgaaagaaatatgtacaaaacctcaaaaatatctaccaaaatatgtaaataaaaatcgtaacttttgttcaaaaaaagcgtttgtatgaatatggaaaaaaattatttacatgaaattccagccccactacgtaatcaatcaaaataaataaataaacatacaaaccagggctggccgtgattgaatttccaatcacggaaatccgtgaggcgtgatcacggggctttaaaacatatccgagacccgagaaccgcgatcacggcac

SEQ ID NO: 43302 - DNA, 1047 bp, Heterodera glycines
  unsure (1)..(1047): unsure at all n locations
cccatcatcagcaattccatcggggaatagaaaaccgaaatcgatgaaaatcaatgatcaagatcagtgagaagtgtcggcgaagtgcgacggcgcaaattgtccaaagcatcggcattatgaagacccaaatgacgaatgtttgtcgcaaaaagtggccaaatttgacggataaaaacatcncaaatcggttggacatccgtatcaattgcatacacaaacactttcaatttggtgcctcttctgtcccaaattggcttgttggagcggagaaatttgatcacggaatggtcaatgtagctgaaaagggggaacaatgaagaagatgaccaaccatattaagtaattggtttctgtataagtttgatttactcaatccgaaggaaacgaaaacggattttgtttggcagcgaatggtccgacaacggaaaatccacaaaactgccatcgatctgtacagacagtttcgcttttggtcctttgtccttgcgaattacgacacttctccaaattgtcaattcgctttttctgtcgaaatgtttgtccaccaaaacatcgaaacggtcggaaagcaatgccattttgaggccaagttgagcatggtcaaatgatgggagaatgtccatccaaacgtcgctacaaagccaactgaaacatggaaaaaatggatgggggaaaatgaaaatttgtaattttaaatgaaaatccgtaatttttcaaaatatttgctgaccgtcggttcattttgtggttcaataagcacaggtctcaccaattttttcaattttatttgtgtgtcacaaagggcaaaaaaaactgtgttaacttaaagcatagacaattaggaaaaatgagagagcaaaaagaacacaaaatttagagaaggtatatgaaaagtgaaaaacagtaatttcacattaaaaactttgaaattaccgaaaaggagaaaaaatggcaattttatactaaaatattagcgtacatttgagtaccgataaaatgccaatgatttggtgagatttaagcgggccaggacgtttcgcgtgg

SEQ ID NO: 43303 - DNA, 423 bp, Heterodera glycines
atccccaacctttttgttttgtcttaaaatatttttcatgacatccgtgcctcctcccgaaaactcatccccgaaactttattttcctaccattgatccccttttttctacttttgatccctcaatttttgagtgtcatttccctccattccgtccccaacttttttttttgccgtgccggcgccgaatgatttgagagaacagcacttcctcccccccccccccccccgctcatacatcataaaattcataatccatccaataaattgtgagtgttcgtctcctcccccttcccatcatcatcatcatcatctttgtaccatcatccgtcatcatcttcaaagcacaagcacacactcagattcattaattttcacatggttttttatccaaaagcaattccccccccccccccccccaaat

SEQ ID NO: 43304 - DNA, 190 bp, Heterodera glycines
ccgggtgaggtatattttcaatttgtacatgcgagttagaaatatttggcaataatttaatataaaattggtttaaaccgaataaaaattaaataaaattgaaatataaaattttacctaaaatattttttatttgaataagatatgaaaattatattcaaagatagaaacacatagaaaaattaaaact

SEQ ID NO: 43305 - DNA, 1000 bp, Heterodera glycines
gggtttggtatacccgttttagaaatagcgtagaaaacagcttcgatatcagaaaccaagtcaagtccagaaaggaatattttataacgatttcgttttgttttggcattatgataccgaataactttcggaaattatggaaacaaaattggagaaattcgaataattttttgactgcaaatttttttccttttttgaattgggttcaaaaaaattttaagagaatttttgattattaatttgaagtcttgaatttatttgacaaatccaagacttaaaactgggagaagcaaggggctgtggctgggggcctaaaatttgggccacattggagaattaattctgatttctgaaaaagtcccagaaataactattttttctttccataccttcttgtagagctcgagctgctctttccaatggtcttatcccggtctcgatccgtgccgaactcacaaagttatggagtgaaatgtgaaatattgttttcaccacaaggcattttttctgaaaaccggattcaaaaatctggggtttggtataaccgttttagaaagagcgtagaaaacagcttcgatatcaagaaaccaagtcaagtccagaaaggaatattttaaaacgatttcgttttgttttggcattatgataccgaataactttcggaaattatggaaacaaaattggagaaattcgaataattttttgactgcaaatttttttccttttttgaattgggttcaaaaaaattttaagagaatttttgattattaatttgaagtcttgaatttatttgacaaatccaagacttaaaactgggagaagcaaggggctgtggctgggggcctaaaatttgggccacattggagaattaattctgatttctgaaaaagtcccagaaataactattttttctttccataccttcttgtagagctcgagctgctctttccaatggtcttatcccggtctcgatccgtgccgaactcacaaagttatggag

SEQ ID NO: 43306 - DNA, 1114 bp, Heterodera glycines
  unsure (1)..(1114): unsure at all n locations
atttgaatgaaataaaataaattttacctcaagtttttgggcatgagttaataattttataaatatgcaatcgattggacacntaaaatgcaatagagtagcgtataaaatttgcaattttgccagttgcactcacgctcgcataccatctcgcgtatgagcggctggcagtggtgcacccggagattcgactgtttcgtgacgactcagttgaactccggggctcgatgaacgggccgtcgtgcggactcggcggattcgtcgcgctgatgtcgctggccctcgggcgtccaccattgcaatacgcactgagtggaatcctcggtgaccatggccaaggcaccgaggtcggcggcactgaggagaagttgttgggagcgaggcgcgccggtgtcaaccacgtgcttctcccccacgacaatgctggagaagtctgggccatccgtgaagcgcttccggctgaagatctgccgaccacgtacgaatacgccggtcacgtggacgaagcgatgcccattcttttccagctagccattttttttttgcgtaaaacattaaaaattttagtgtcaatttttttttgcatccgatcgcttaacatatgattagaaaattttccctaaatgacatgaatataataaaagttggttggcaaaaaaaaaaaacaattttcaaaaaaacagaaattttgaaacgctttgattttgcgggaccagcaaaatcgattggggactgggacccaccaaccaattcatcaattttttccgaggaccgaaaaatttatttggtgtcaaaacgccagaaatgatctaatgaaataattattaaatacaaatttctgatctgtcctgcgctataaacattgaaataaaaggcagcatatatcatcgatcatttaacgaactcattcatcccaattcttttgttgtcacagttccaacttcggacgctcattttgggtagaatttgcggcccgctttggcgtagtctgaaatttacaaagaataaataaaatgaatccaattaaagtgccgaatgtcaaatcgatggtccactaaattcagactanatgcacatgaatgattatattttttaaaattttatttggcgccct

SEQ ID NO: 43307 - DNA, 1318 bp, Heterodera glycines
tttttaaaacacagattatctttaaatcattaaaaatctggtcgcaaattttttaatataagagaattaggtaaatgacaatgccaaattgtgtctgaagatagagttgtcttttttatgtcaattttacgacttttgttgtatgaaaatttgacaattttacgcagaatttaggggaaatatttagtaaagcgaaatagcaggaaggaacaaaagcgattggacacatttttgtaattatgaagatgaaaaaagggtggagaaacatgactgatcggcagaagcagcagtgcttttttcggagtgtgcaaattagcgcgtctggggcgaaaacgcgtaaaaaattttgctcaaagtatagagctcgcccggcacggaacgggatcctgcgcgggattttgcgggatcccagtccgcatcaatcccgcagccgagtctacaattttacatacaaaattttttttttgaattttggaatccagaaatttttattcatcagaaacacttacaccttttttaattgactctcaatttttatttactttagaaaatttggttattcgatttttaatggcttcttcttcatctgctgcttatcccatgctgaccttcacgcaaaaacgggcgggcgatggtgagttattggcacataaaacaaaaaatatttgtcgccgggcggtccgaaattttggaattttcgaccctttgaatttcatacgaatttttttttctcccacttttattcatttttaattttttttctccccgaatttagacaaactttgggtgttctactggctcagcgatgagtcaaaattcggcatcgccagcttccccgacacagtgtacgaaatggacgcggtcagagagatgagagacattttggggtaagttgaatatttttgttttgccttcgaattgactgttcactgatttcttttgtttatatttttgtttgcctaccccaaacggccctcaaaacttggaaaatacgttatgagaccagaccgctttacgataccgaaaattttaaaaatttcttttatcggaccgaaagagtaaaacggaaaattttttatttatattgaccaggcttaatttgtgcaatctctttccccggaataggacaatgttcatggagggccggaccgagatcaagcaggtcaacgacgagtacgccagcgtttgctacgccttcaaccactccctggagttgccacgcgtggacgacgcgacggcacggcgccaacgcattggccaacttttcaatttttttgtcgacgaagcgctggagaagaagcacacggaggtacaaatt

SEQ ID NO: 43308 - DNA, 1189 bp, Heterodera glycines
attttgcaaaatctttgattttgtctttgatttttcatcaactacctgattttaaaaataaaaacttgacttcaagacattcaatagctcattcgaaagctcattttttaataacattttccttcacttttagactttctcaatgtgaaattgaatattggaaaaggaataaatctgttaacttttatttggagttagaatggcatctcaacaaccacaacaaagcgtgacaaattactccttgcaatttcggattaatgcccaatatatgaatgaacagttcagagactccgtaaggtgttgtctgaatggtaagtgattgttcgttctgttctgagtggttttttcatttcttatcaaaacaaaaggttctcatgaggattctttgccttttcctcactttgcattcgctgaattcctcgctgattcggcagttttatcaggtcaaatccgaaaactaaatgggaaagtgccctcgctttaggcattcgtcgtgaacttcaatccgcggcatggatgcccaaaaacaatgacctttactccctcagtcaaactgtggatttggccgattttcatgccgagcattacccaattttaaggtcccgcaaacactcttttagatttatttaatgtttttacatttagtgcttttcgtgattttatgttggaggacgtgcgaaagtggctaatgcgtgtgacgggagtgagtcttgacgaccgattggcactcaccgggtcgcgttattcgtcgggcgactgtctccttcctcacgatgacaaactcgaggttttttccccttttttcacttcgtattcgcttttatatagggccgtgcgtttgcctttgtgctttaccttacccccggctgggaagaatcagacgggggacagctttgtctgttcgactccgacccggcgaaaaattacccgggcgaaatcgttaaacgaatccaaccgcgggagaacactttcagtctgttcccagtgcagcacaactcgtggcattctgtgtcagaggtgctcagtgaacagaaacagcgcctttcccttaacggatggttccattacgctccggggacggcgaatgttgcacagacagggccaaattgcgctgtggaagagccgatttgtcgggtggagccatcgatgaatatcacggcaagtcggacaaatacaaacaccttcaggc

SEQ ID NO: 43309 - DNA, 1009 bp, Heterodera glycines
caaaaaagagatacccatttttctggcatagagaataaatttaaaaatccctgtagaatagaatggccatgctctccgcgcccctctgcccatgctgggaacatttgtatggtacaaaatttctcgcaaaaaagagatagccatttttctggcatagagaataaatttaaaaattccctgtagaatagaatggccattgctctccgcgcccctctgcccatgctgggaacatttgtatggtacaaaatttctcgcaaaaaagagataaccatttttctggcatagagaataaatttaaaaattccctgtagaatagaatggccattgctctccgcgcccctctgcccatgctgggaacatttgtatggtacaaaatttctcgcaaaaaagagataaccatttttctggcatagagaataaatttaaaaattccctgtagaatagaatggccattgctctccgcgcccctctgcccatgctgggaacatttgtatggtacaaaatttctcgcaaaaaagagataaccatttttctggcatagagaataaatttaaaaattccctgtagaatagaatggccattgctctccgcgcccctctgcccatgctgggaacatttgtatggtacaaaatttctcgcaaaaaagagataaccatttttctggcatagagaataaatttaaaaattccctgtagaatagaatggccattgctctccgcgcccctctgcccatgctgggaacatttgtatggtacaaaatttctcgcaaaaaagagataaccatttttctggcatagagaataaatttaaaaattccctgtagaatagaatggccattgctctccgcgcccctctgcccatgctgggaacatttgtatggtacaaaatttctcacaaaaaagagataaccatttttctggcatagagaataaatttaaaaattccctgtagaatagaatggccattgctctccgcgcccctctgcccatgctgggaacatttgtatggt

SEQ ID NO: 43310 - DNA, 1026 bp, Heterodera glycines
aaattttattcacctccattattgatagaaaaagcatcagagtgcctaaactaacatgtaaataaaatttcggtgcgtttcagaaccctttctgaaaaaatatttatgaattaattttgcaaataaataaaaacgaaagactcagattttcgaaaaatttttttgagccagctagctcggcgctcatttcagtgtaagttagtcctttaccggggagtatccctgcaaagtttggtacgcttctgctcaattagcaaaaaatatgagtgatcgaattttcactaaaaaagttaagcctacattttttggcatatttaaaaagcaattaaaaaatttttaaaatttaataattttcctgcaccgaaggtactcactcggcctcttcgcggcctcgtggtgggccttcgccccccccccctcccacgcccttcagagcacgacaaatatttcaacaaaaattttgaaaaattgactagagcaatcgaacgctaacggacgacctaatggaaaaaaatccccgaaggagagaatttaattaaatccattccttcgggggaccgtgccgggtgccgcggggtaagcagtgctggttcgtttcatcacggcaccgaaccttttggctagtcagcaatcgttgcttaacttgccagatcggacgggtgcgcatgactttctgaaaaaaatatttatgaaacaaaaaaatcgattttttcaagtgtccggttggggtactcaaacatttatggggagcaaaaacccaacgcacaactaaactacaggatatagggaagatattccccagagattgagtctcaccatatatctggacgcatcggtgccgcgggaacgccccgagaactagaaatcgatattttcgagtgtcgcgtttgcggtactcaaacgcttatgatgagaaaaaatcccacgcaaaattaaagcacaggctgtacgaacgctattccctaaggattcgatctccccataaatctgagcccgtcggttcgcgaggactgccccgaagacaaa

SEQ ID NO: 43311 - DNA, 1262 bp, Heterodera glycines
caaagaaaaagtaaaaaggacgacaaaaactgaaaagcaattggaaatgcatccaagggggggggagtcgggttgggcatttgaatttggcgcataaatgaataattgatgggaaatgccaaggcaaaagcggaacggaaaattggcatggatttgaagaaaagttgagcaaaaacagttaagctactcgatgagaaatatcaaccgggtatgacattaaatgccaaaattggaattttccattgagtttgggcggcgattggatgagagaatgggcggcggacggagtgacagcgatgacggcaattccaattaagcccaaattgccaaaactttcggagacggcaagacgaagtgatgacaccagcgacaaatgaacatggggaaaatgaggaatggcaaagaagaagcagaaaagccgaaaaggaattgtgggcctgggtttgcacggcactccctcccccgaacttcggccttttttggccgtcctcagaccgaacagagccgacttaagacttttttatttgtatttttgattgacatatcactgacataattagtttgcttaattagtttgctccaatgtctcaattatcacttcaaatgccctccaattccttccccaatttcgctctttccttccctttgtatccatcgatgagatgaccttgtgccgatattgttttgatcgggcggataactgcccatccgatcaaatgatgaggcgagtctgtctcttcgcttctcttcctcttcttcttcattcgttcttcccttcctttgcccttttcctccccctctttgatcataaatgtgaatttcttcttttgcacgtcctttatttttaatttatcttaaattgctccttctttccttccctcccctctttctttccttctttgtttctttcacttgtctctccgtttattacccctctttttcttttctcactctctctctctccctctctctctctctctccctctctctcttctctctctcttctctctctctctgtctctctctcttctctctctctgtctctctcttctctctctctctgtttctctcttctctctctctccctctctctcttctctctctctctgtttctctcttctctctctcttctctctctcttctctctctctctctctctgtctctctctctctctctctcttctctctctgtttctctcttctctctctctccctctctctcttctctctctcgctctctctttctctctctctctctctct

SEQ ID NO: 43312 - DNA, 680 bp, Heterodera glycines
  unsure (1)..(680): unsure at all n locations
tttgccgagctgacatttttggcgacatgttcaaaaaaaaattcaaaaatttttcactaaacaaatcagtcgaaaaataatcccacagtttctttaatcacgcagtctctaattatcccctgtattctgaggaggttgaaaaataatcccccatgggctataattagagcatatacggtattaatcgagataaatgcaatactgaagaaaaattagtcattttttgagaatattaaactgggataaaactttggggccacacatttaaatttaaaaaaaataacataaataaagagcgggatgaatattcaaatacagccctttagctatttgagagtcataaaggcaaccatttgggccaaaagatcattgaatgggtccatatgacgattttttcagtcctcaggccaaaggaatttgcactgatttgaatctgtggccccaaaacggaaaagtaccaaatttttattcggttgcagcaattaattgttatacgaaatttattgtttttttaaatttgctattcaaggaattgccaatgtgccatcatcgttgaccagtggtcggggtcagcagaaacagtattattacgattacggtggtttggacaacagcagcaacagttacggtggaaatgggaaaagtggacccaantaataacaacaaccaaaacaacaaca

SEQ ID NO: 43313 - DNA, 989 bp, Heterodera glycines
cccccccccgaaatgaaaatttttaaaaattttccagcaaataatggaaaattttttcgaattccccccccccccaaacgaaaatttaaaaattttatagacaattttcgtaacaaatagcactcaaattttccgtaaaacggccaaaattgggtcctttttagtgaaaaagtggagtttttacccagcagcgggaattttttttaagcagccgccgccgactaccaaacagtagaaaagtctacaagtggaaaattgcagttatttgcagatcgtaaacaacttttatcaattttattcagcaaaaaaaattatggataaatttgcaaaaaaaaaaaaggtcttcggaccggacccctccctttccccccccccccccgaaaatttttcctggctacgggcttgattgtatgcgaatttgagtcgaatttcgcattcttgaatgtcagttataatacaatttttagctttataatgaagtgtcggctctgtacgcgacctccgaccaaatgattgttggtgaggaacctgcgccggctcaagcaggcgctgctgcggaggatgccgccaacaaatcggcaaaacgcgcagcacttgccgctcagaaacgacagttggccctggatagggtatattcttagacgaacgttattatttggagatgttagaatggaaattttattaaagaaaaccccgaacaattattagacagccattatagtcctcatttttaagtagataaataaacctctaattctaagaaagtcagaaatgaaaatttaaatttttcgaacggcgggtggggagcaactgcttcccgtcactatgcccaaatttaataatccgttaaagaaaaaataactaaaaattatcaaaacatttttcttttccattagatgaaaaaactgcagtcgtcgttcaagtctcaacaccctgacttggcagaaggctcttcaaccgccagtggaggcagtggcacaccaaaaact

SEQ ID NO: 43314 - DNA, 1263 bp, Heterodera glycines
ttttcatttaaaattgctttattttcattggtatttaggtcccacggcatggatggctcgaaaacgcactttacgtgtgcctttattttgaaccgggccatgatacgctgaacaaccaattcacgacgatgcgtcaaataatcgatcatttttttgccaatcgatgggttctctgagggggcgcaatttattcggacaaaataaaatcgcacatttacagatccttcatttgcatgtcgattttcaaggtttccaacaaagaaaaagaccatttcctatttgtttgtttaatttattttaattttcagtcaatttgttccaaaaatgggggcgctttaaggctgccaatgcggcgatcgccagcacttgggacgcttctcgtgcgaatgccttcgccgaaatgcatttctccacaattcgaagtgccacttttcctacctccggattgctttctttggaaatgttcgacgattatgacaaaatgctaagggcaatgagcgaggcaatcaaatggcttatccttcaccttccaaaaggtcgtttcgtttataatcaaaaatctttatatatatgtataagttttcagatgaatttatgtcgagaaataaaagatttaatctttttgctattgctgaagattctggagaaattctaaccgttttgaaacagttgtcgcaatttgaatataaattccgaaaagttttcaccctttttcactaaatgtcattttttaaagaaaaaattaaggcaataacccatttgaggaacaatcgtcaagattgtattaacgcacttcatgtacgaatttcggacaacttctcgcagattattgcctttttgcgcaactctttgtctgtcaaatcagaccgaaggaccggttggtttacttatacttactgaccctgacaaatggtttcactccctctattcatttttaattaaatgcaaacagaattaattattgtttctatgagggatggcatggttaaggaatgtcgcactttggtttggcttattttcggtttttgtctgatttaaggaatttttcccttttttggttggggtacgtaatcgccgtttatcccgtgggttggccgttccataatccttggatttttgacgtccttggtgacctttgttcctccatgttgcttatctcaaggccgtgtcatcagttggcttgagtcggtgaagtgttccgtggttggcctcgtctcgtccctttgctcttccgacggcgattgcaccgccgccgcctccgtt

SEQ ID NO: 43315 - DNA, 1291 bp, Heterodera glycines
ccccaatttccctccttccaaagatgttctacttctgccagcgtgagaacccgttcttcgaccccaactcggacaatgcgatgattctgatgcaaaaccagggcattgggccggcccaattggacaccgttcttaagtgggggggggacaccaaatccgtgccaaaagccaattcattcattcattgaccccttggggcatttagggcgatgaccggcatccaatttgtgctggtcgagccgtgctcaccgccactttttctcgtcagaaaacagcagcggaacggaccggacaaaagtcagtcggccgagggcatttgttggtccaaataaacggttcactaattgtctttaattggtcaattagtgccctaatctttcgtgaaaagcacgcgttgattttccaataaccctttcttttctctccccttcacagttacgcctctttgccacttttatgttttggatggtacggtgtaccaggcgcccgacatgcatacggtagctctttgcttacagtactcattaatcatttgtttgcttataaatcgtcttttcttggacaatgtttacctcttgttgttcacagttgctccattctcggctgattggtgtgatggaccctttgcgctgcgctttccaagaagcaggtgagggaggagctgatcacaatcagaaactgacaatgagtcaagccgagccgaatcgattgcaattttaatgattatcctaattaatgaccattttaattggtttaccatatccctcttggtcgcttcaatcactttggcttaattatgttacgcttttctcctttctctctaactaatctttccatatctatctctccccgtgtctaactccctctctctctctctctaattgtgcccttcccccctttttcattgtccatgttgcgtttcacccccgcccgtggtcatttttgggagtttcgtacgcgtcccgctcgccgcgcatccgcaacggcgccggacgacgcggaaacaaacgatgaagagatggctgagtttgacgaacagttagacacggatacgaaggagaaggaagggcacaagcgcacgcgtggtgccgaaccgttgacaacgcgtgcgacgccctaccaaagtcagcggacacatgcgctgctggccgcgttgggcgagcggttcaaaggcggcgacgaaactggaagaggcgccggagggcaaacagccggcgaagggagcgccacgaaaatggtaacagacggagagccaaaataggcaaccatactaatcagaatgatttaggat

SEQ ID NO: 43316 - DNA, 1236 bp, Heterodera glycines
cattttaaaaatgtaaataaatattcttatagaattatagtaaatttatttaaaatatataattatacaaaaaaatttgtcggaattaaaaaaaaatataaagaattgatcataaaataatagttaaataattatgcgtattttttaaatttaaatatatcttaccacaatcatcgtaataatcacagcggaatttatgcggaacacatcggcgattcttgcctgaatgaaaaaagtaaaaatttaaattaattaaataatcaaacaatttttacattgaaaatcgccagtttggcatgctggaaattggcatgtcgaaggttcgtcctggcatttgaacaaatcaatttaaatttttataccaaaacttcgcgcactgaccgatttgtctgcctgaattttaaataaatatatttttaattttattttttttttaaattttgctcacacaatctggcgttccatcacacacccagaccttctgaaatgtgaaaaaaaaaccaattaaattgtccaattttaatgaggccgacctgaatgcattgtgttctgtccgcgcaacgaaattggtaaggaaaacaagcctataaataaaaacataaatttataatttttaaattatttttaacaaattggccatttattactcttctaaaagcacatcaaaacacacaataaattttaaagggataatagggagacgaaaagaaaggcttaaaggagatgcagaaataattatttaagattttgaggatttagatttttctcttttttaaagtttttattttcttcatttttaaatttccccgcgcaattcttttaaaattaattatttttaggatttttcatactgaataccaaaggggaaatagcaccgtacaccaaaggtactctgaaccgatctcctaccgtatgatttgttgcgcatgaatccttttcatcgctgaggtcacgacagtcgtagttgccgtcacatttccgtgcaattgggaagcattggcggccgtccgcgcagctgaacaccgacccatcattcacctcacagttcaccggacttgcggctgaattttgttttttttttttcataaaatttgaacccttggctgatttcaaatttgaattgttttttattttaaaattttatttttattgtgtccaaatcgtccccgccccccttctccatcctttccaaattttcaagaatttttgcaagaaatttgaaaattctgaattttg

SEQ ID NO: 43317 - DNA, 1199 bp, Heterodera glycines
acatggtctattagccttacaaaaagcgaaaagattttcaagctgggaaaatttgcatgttttttgaaattattggtttaattgagacgaattcctgtaaaaaatgcacatttttggaatattttatgattatttattgtaattgcgtcttcaatttgattgaattggtgcacttttaactaattatcttactttcccctatttttaataatatttttcatcaacttttaccaattttgttcaataaattctctcaatttaatgagtcgcgactttattttggcaataaacaaataaacaggaactaattagcaattaatagtcaatgatttcagacactaattaattacctatcatcaatcaacttccatcgatgaatgattatgattctgtttggcgtttgttttcaataaattttcgtgaaaataaaaggacaatggaatcaaaaacaaaaattaattggactatttaagcgtaaaagtgagcagcaaaagtcaccattcaatttaattatacccaattaaaaaaagtaaatcctctttaaaaatgaaattttcaataattttattgctttccttggccttttgtgcgttaatcatcgatgcatgtgagaaaaaattaatataatgaattatttttaatattttaaatagatccatcgggaaatggtaaagatcttgaagctgacaacgaaaaaacggaagtgaaggaagagaagatggaaaaaagagaagcggaagtggaggaagggaagaaggaaaagaaagcagcagaagaggaggtagggaagaaggaaaagagaggaagtggaggcggaacatggggcaacggaggaagaggaaacggaggaggaggacacggaggaggaggacatggaggaggacacggaggaggaaatgacagcagcggcggaggtgatgattagaagccatagctaaaaagaagaagcataatatggaactaagaaaagaacgagcacacaatgcttttagtcgcttattttttgctgcatttaaaatgttaaattttaaaaataaaaataaatttttgtattttttaattcatttctttttacccgcataaaacaaaattagttcttccgttcttttgacagtatccctgaaaaatatttaatgatgtaatttattcaatgctttttttatcgtatataaacgctgacaaatgtgtacagtaatgtt

SEQ ID NO: 43318 - DNA, 1151 bp, Heterodera glycines
gattgactctttaaacacaaaagtggggggggggggagaagggaacagcagaaaagcaaagaaagaaccgacgaccgactgaaaatgcaaagcaaagcaaagcaaatctggaagaagcttaaattgtctgccaacggaggcgagaggcacaaccatccgtcctcccttccttcccccccccccctcattattctcattacaattggcacagcttggctggagcaagcaacagaggagggggaaaggagggagatagaagaaagaatgggaggaaaagtggaaggagggcaatgggagtgtccgtccccttgtcgcccctcccattcggtggttccctgctgcccgccatgcatccccacttccgtccatccccttcggcaatccatcaccagcagtccctcttccccccccccccctccttttccgttttcgtatcgatccgtccgtttgctttgccctcccacagcgtttagcagccaaatccgccaaattttatccttctgtcccgactcatctgctgcttctccatcttttcacttccattgttattcgcagcatttggaaagtatcaaaaggcggccaaattgagaaatgggtaaaaaaggagggttaaaatttgtggcaaaagcaataaaaaagtttcaggaaagaaatgccaaatttgcaagaagaaatgttccggcgaaatcgtgcggacggaaggggacaattaccttcacatcgaatgtttcatctgcaaaggtgggcttttctcctcctcccccactttcacttctctctttcgcttcagtctgtggccgttctctgtccgacttgggcttttacttaaattccgacggcgcttacgtttgccctgaccacgtccaacggcccaactcggccgcctcgggccaaccgcaggcgacgccatcgaagaaagaagcgaagaagaagtcgcgcagaagcgacgtctccctcccgctgagcatcgaagcggacagcgaagtgtcgcggccgactcaccgcgagtcgcttcagccgtcgctcggctcgcccgtcagctcgacaagttctgttcggcttggtcgccttcggtgtgtattttcgcccttgttttagcatgtgccggctgcggagaccattttgcagtcggggcaaatactcctcgcgct

SEQ ID NO: 43319 - DNA, 1049 bp, Heterodera glycines
cagaaaaatggctatctcttttaggagatttttcttctcgtaaccccgatgctaatccgttccggagagcctcttcaaaattttttccattaccctaagagctgcggaaattgtgaataattctcagaaaaatggctatctctttttaggacaattttctatctcgtaaccccgatgctaatccgttccggagagcctcttcaaaattttttccattaccctaagagctgcggaaattgtgaattaattctcagaaaaatggctatctctttttaggacaattttctatctcgtaaccccgatgctaatccgttccggagagcctcttcaaaattttttccattaccctaagagctgcggaaattgtgaattaattctcagaaaaatggctatctctttttaggacaattttctatctcgtaaccccgatgctaatccgttccggagagcctcttcaaaattttttccattaccgtaagagctgcggaaattgtgaattaattctcagaaaaatggctctctttttaggacaattttctatctcgtaaccccgatgctaatccgttccggagagcctcttcaaaattttttccattaccctaagagctgcggaaattgtgaattaattctcagaaaaatggctatctctttttaggacaattttctatctcgtaaccccgatgctaatccgttccggagagcctcttcaaaattttttccttaccctaagagctgcggaaattgtgaattaattctcagaaaaatggctatctctttttaggacaattttctatctcgtaaccccgatgctaatccgttccggagagcctcttcaaaattttttccattaccctaagagctgcggaaattgtgaattaattctcagaaaaatggctatctctttttaggacaattttctatctcgtaaccccgatgctaatccgttccggagagcctcttcaaaattttttccttaccctaagagctgcggaaattgtgaattaattctcagaaaatggctatctctttttaggacaattttctatctc

SEQ ID NO: 43320 - DNA, 852 bp, Heterodera glycines
tcataaaagtcgattggaatcataaagtgcattagagcctctaatagtcacataaactgagaccatttttggcacattgctccattattcgtgcattccgaccccttttcctccacctgaaactcagagttgcttctcagccgagccaatctctcatcttgttccgccaattgcttctcctgtttcaatttcttttcataaagctggctaatccgctcatcctgttcggcactttccttcttcagacggcgatattgcgctttcagatcaccagcagaatggtcaagcgattggtcgtccatttgggggagggagtgtttgcaatggcaccgaatgaaagaattggatggaattgaatgggatgggtgctcgagagcttgtcagtctcgactcgaacagcaggggccaattttattttgcttgaaaatgtgaaacattattattctttttacacaaacaattattataataattattggtgaaacaaacaaatacatcaacatcacaaatggaaacgtccccgccgggcccgttaccgggccgcctgggcctttatttttcgggaataccaccgccgagcccaggtcccacgacagcccgtcttggtccaatttccatggccccgtctcgtcattttgggtctaatgttacatcaccctaaataaattacctaattaccgtgaagtaaatagttctaatgttatggaatccggcttattataaattttttccgtggtcaatccaatcaagtgccgtaaggtatacaacagggatggagttccgaggcactaaaaattttcggaagtcggaaagtgaaattccgatgccccaaaaatttttcggaaatcggga

SEQ ID NO: 43321 - DNA, 1198 bp, Heterodera glycines
caaaaatttacaataaatgtcaaattatttataaaaatgattaatataaaaaataaattcactaattttcttaggttcaaaattaaaaaaaactatttgtttttttttaaaaaaactaaaaaaaaacgatttttttcatttaattatttaaaaaaaaatttttttgataactttaaactcgtggtttattaagaaaaataggcaatctattttttaaacaaaaaaatatattacaaaatcaaaaatgaagaatgaatttttgaaagtttttaaaaaagcgtaaagcttattcaaatttaaatacgtaaaggattagaaaattctcaaattcaaataattcttaaataatgattatcttattttacacataaatttttttggacaaaataatttctcatatggaaatgagtattttaatttaatttttcattatgcaattattttaaaagccaaaatgaataaatatgcattattctggtaaaagtctggatcatttcacataaaaaaggggcaagaatgctcgttttatgtgattgtgccattgcaattgcgcaataatgcagaaagaacgaccatataaaaatattttattatgatttcgaatatatttaaaaaatcaattaaaatttacttttacgtcatataaattaattccgtagcatttgagaaagcgttttaaaataataatctttttattatactagaaataaaatttaattaaaaaatgttaacttaaaaattcagtatcaaaataaaaacagaaaataccatatcaagtttaaacacagctcaattaaaaaaatatttcatgatttatttttaaaagtaatactttttataaaactttgaaaacattaatttaattcaataatatttgaagaatgaaaagatggatttaaaaaatattatatgttttatataatataaaaattgattattgtatctgctatgggccagtgtttgtcaaatatttgtaagaaatttgatttcgctaatgactaaagaaaagtgaaaatatattaattattttatattataataaaaaaaatgatttacttcacagttctggtttaatatttataatttattttctccaaaactaaattaatatagtaatagtaataaatgcatattttaccacagtaattaattggtgtctatgtaatctttgaatttaaaataatctattttttaataa

SEQ ID NO: 43322 - DNA, 1050 bp, Heterodera glycines
tttttacacaccgagtcaattttgagcccctagttcaaaaagtaaatgcatatgtggcgaaatggtttttgtaagatagtaaagggacaaagggtggtggttcgagtccgttgtgcaacacgaatatttttatttatttttgtccaaaatattaaaaaatgacgaattttgggaattatttttgaagctttttcccaaccaaattggacaatcttagtatcattcgaaagctctttatgaggagaagctttttctaagcaactgctaagcaattggattgattaggaaaaagatatgagggttcgaaattttattttttgaataactttttagaacaacatttaagctataaaaacaaacagagaaaacgatgcagaatttttttctctgtcgctatgcaaaatttgaagcgcatttaacataggacaaaaaaactaaacatagaaatgtaaattccgtttttctctattaacacagataaagaaatagtacgccaaaaagagatatgtttttttctctgcactctctctttattgacacatgtctcgttttttgactcggtgtgtttacctgatcttaactcatataagccttaacttcaggttggaagcgcctggatatcattcaatcgttgattatccgatgtcattttcaacaatcaatgacaaaatagataataatatgtacttgaatttggatcaattcaaatctgacatttgtctggtttctgacaacgcaatgctttacaataacacaggaagtgtttattttttggcagcgcaaaaattgaaagttttggcaaaatattatttttccgagaagtatcttttgttcctcgtctattcgttgccctttggaaaagccttaactgaggagcaacttggaatacgcttacggaggaaagaggagcaaacgccgagacaactcaaagagaaaagtggcagggaaaggccgttgccttttctgaggcaaagcctggcctttataagggtgaaaataatgaaacttattttagtgacagtcaaaaaactgaggaaatactaaatacag

SEQ ID NO: 43323 - DNA, 773 bp, Heterodera glycines
cacaagaaacaagaagagatgatgaaaatgccaagaacgttgtgcaatacggaaatgccacaagaaacaagaaaagacgaggaaaagataagaacaagaagagataatgaaaatgccaagaatgttgtgccatagggaaatgccacaagaaacaagaagagatgatgaaaatgccaagaatgttgtgccatagggaaatgccacaagaaacaagaagagatgatgaaaatgccaagaatgttgtgccataaggaaatgccacaagaaataagaaaagacgaggaaaagataagaacaagaagagatgatgaaaatgccaagaatgttgtgccatagggaaatgccacaagaaacaagaagagatgatgaaaatgccaagaatgttgtgcaatacggaaatgtcaacaaacaagaagagatgatgtgataagaaatgttgtggcataaaaaatgccacaagaaaatagaagagacaatgaaaatgttaatgttgtgccttaagaaaatgccaataaacaagaagagctgatgaaaatgggttgagtgccagtgattgaaatgcaggagaattgagtcccagtgattggaatgatggtgggttgagtcccagtgattgaaatgctggtgggttgagtcccggcgattggagaaaaagccaagaaaaggatgcgaggccgcgaaggccgagccagtcgattttatcattcataatcctataatacaatcgtactacctagcgggggatgcgccgaaggcgctgaccccgctagttt

SEQ ID NO: 43324 - DNA, 1266 bp, Heterodera glycines
  unsure (1)..(1266): unsure at all n locations
tctanngagtcatctttcaataaacattttttaatttgtttttatgtgattttattgggactattcagaaatgtttatcaaaatattcgggcgtattaaacttttagaggacgagagcaaaaatattaaacgacgaaaacatgctgatactatccaaagaactttttttgcaagaaagaaatcatcttttagcaagccttaacctgcttttggctttacacaagaaaaattttgctgaagcgctgaaagaacttggtattactgtaatcggttattgggatctgttgtacgagcgtgtttctgaactgtaatgaaaatggaagtaaaatagtcctgttttgagcatacacttcaaaatttcataggaatgtttggcgaatggtacactgatcaaagccgtgcaggttttggtacattctaacagttcagaggctatttggacagttttagtgtcccacccgccacaaaacaggaaagtaccgtagtaatacctcactcatattgttattttgctatttcattgtgctgtcatttttcttattcgacaagggataaataaataagtacttcaaatttaaaatttgttttgtttaaatatgtgcaattttagtgcaattttttctatttttagaaaggggttgggagcagcggctgttttttcaaaaaaaattttgtgacggttggtggcctgctgtgctgccaatagacgtcgcctggaatttttttattaatttggtaacagattttgtccaaaaatggccaaggcatagtcccccaaaattgggaaaatgacctagtcaaaatacggtacggtactttctccaagccgaaaaataaaaaaaggtgcaaaatcgtttaaaaaatgcaatttgtgttttttttgtatttttaattcttttccaaatgcaaatatattgaaaaaatttactttatctactcatgagtcataacactcaaatttttcgaaaatttggtggtagatttttggaaataaaaaaagtaagtcaaatagcagggatgctgatgtttcgtattttcgtgattttagagcatttcatgttcgtgttttgtatttttatattttgcaattttccttataaaacttgtcaaaaattggccaaaaatagcgaaatatgcattattctcaaaaccgctaaatatgtatttatatgcattgaaatttaagaaaattgaataattttaaagcaaaaaaatatttcagaggggagaaattttttagtaccattatttgctaataatcaggga

SEQ ID NO: 43325 - DNA, 939 bp, Heterodera glycines
tgcagggatactccccggtaaaggactaacttacactgaaatgagcgccgagctagctggctcaaaaaaattttcgaaaatctgagtctttcgtttttatttattttttgcaaaattaattcttaaatattttttcagaaagggttctgaaacgcaccaaattttatttacatgttagtttaggcactctgatgctttttctatcaaaaagggagatgaataaaatttttaaaaatttttaattcctttttaaacaggccaaaaagtttaggcttaactttttttcagaaactgatcagaagcgcaccaaactttgcagggatactgaaaggaagagaaataacctattttaaatattatctagtcagttcatttaaataatttttatccaaaaaatttttttttgggttttcggggcagtccccctgaaccgatgcgcccagatttatggggagaccgaatccttccggaatagcttcactatagcctgtactttaattctgcgttggatttttgctccccataattgtttgagtaccccaaacggacacttgaaaaaatcgatttttttgttttcggggcagtccccccgaaccgatgcgcccagatttatggggagaccgaatccttccggaatagcttccctatagcctgtactttaattctgcgttggatttttgctccccataattgtttgagtaccccaaacggacacttgaaaaaatcgatttttttgttttcggggcagtccccacgaaccgatgcgcccagatttatggggagaccgaatccttccggaatagcttccctatagcctgtactttaattctgcgttggatttttgctccccataattgtttgagtaccccaaacggacacttgaaaaaatcgatttatttttgttttcggggcagtccccccgaccgatgcgcccagatt

SEQ ID NO: 43326 - DNA, 944 bp, Heterodera glycines
  unsure (1)..(944): unsure at all n locations
ttgaaaaaatcgatttttttgttttcggggcagtcccnccgagccgatgcgcncagatttatggggagaccgatcctttccggaatagcttccctatagcctgtactttaattctgcgttggatttttgctccccataattgtttgagtaccccaaacggacacttgaaaaaatcgatttttttgttttcggggcagtccccccgaaccgatgcgcccagatttatggggagaccgaatccttccggaatagcttccctatagcctgtactttaattctgcgttggatttttgctccccataattgtttgagtaccccaaacggacacttgaaaaaatcgatttttttgttttcggggcagtccccccgaaccgatgcgcccagatttatggggagaccgaatccttcgggaatagcttccctatagcctgtactttaattctgcgttggatttttgctccccataaatgtttgagtaccccaaacggacacttgaaaaaatcgatttttttgtttcataaatatttttttcagaaagtgctctaaagcgcaccaaattttatttacaacttaattttagcactctgatgctttagtatcaaaaaggaagatggagaaaaaaatttttaaaaaatttttccttatattttggttatatcgttttgcttttggtggggtgcttggaacagtggaatcatgcgcacccgtccgatctggcaagttaagcaacgattgctgactagccaaaaggttcggtgccgtgatgaaacgaaccagcactgcttaccccgcggcacccggcacggtcccccgcaaggaatggatttaattaaattctctccttcggggatttnttttccattacgccgtgccgataacgttcaattgctctactcaatttttaaaagtttttgctgaaatatttgacgagctctgaagggcgg

SEQ ID NO: 43327 - DNA, 944 bp, Heterodera glycines
  unsure (1)..(944): unsure at all n locations
ggggtcaaattttaactttttttttttttttactttagactattcaaaaaagaaagtntaggcaattaaattttttcgatgctatgacattgggcaaaaactatcaaaatgggcgttagtcaaaaaaccatcaaattaaaaaaaaaatttttgctaaaactttgctcaacagcaaccaaatttttagttttttttttaaatattaatcttagcactaaatttcttttgttctccttcaaaatttttcaaatttttcgttaagttttaaaaatgttatgaccaaaaatcttcaaaaaatttttttttggtttatttggatgaagttatgaataatttctgtcaaaaagtttccatttgatggttttaatttaatttaatttttttttcgtacttttttccatattcttttagagtccgcctgctgagaataaggaacaggtcgaagaattgcagaaagccatcgaaaatactcgcgaatttcaagcgatgaaaaaggataagcaaattaaagagatcaaagaggataaggatgttcggcttgcttggtttggtccacaaatgtgggattttattacgaaaaaagaagaaggaacaacgagtgaagcagcagcacagaaaggagatttgtgatcggaagaagtctttggcatacggtagcgaagtgagagtgagtggatcagttggttggttggcggcatacggtaggacgagcatgacgtcattttgtctatttattctttaacccacaacacactttgtttggcctagcaaacattttttcttgatcctctttttgctgttcatcgtctgtccttggccttgatggaccacacagggatagtaacccgggatatgtgaggtacggtactccactccaagacctccctcacccaaatttatcaaaaaaaaatttgataaattttacaaaaatcaaaaaattatca

SEQ ID NO: 43328 - DNA, 885 bp, Heterodera glycines
acgatatttgaaacgcaaacaaaaaaaattcttgaccaaataatggctatctcttttttctcatttttttaccgcaaacttggtaccaacagttgccttctcttgtctggccctatcaaacaatcttacgatatttgaaacgcaaacaaaaaaaattcttgaccaaaaaatggctatctcttttttctcatttttttaccgcaaacttggtaccaacagttgccttctcttgtctggccctatcaaacaatcttacgatatttgaaacgcaaacaaaaaaaattcttgaccaaaaaatggctatctcttttttctcatttttttaccgcaaacttggtaccaacagttgccttctcttgtctggccctatcaaacaatcttacgatatttgaaacgcaaacaaaaaaaattcttgaccaaaaaatagctatctcttttttctcatttttttaccgcaaacttgctaccaacagttgccttctcttgtctggccctatcaaacaatcttacgatatttgaaacgcaaacaaaaaaaattcttgaccaaaaaatagctatctcttttttctcatttttttaccgcaaacttgctaccaacagttgccttctcttgtctggccctatcaaacatcttttttctcatttttttacggcaaaattggtaccaacagttgccttctcttgtctggccctatcgaacaatcttacgatatttgaaacgcaaacaaaaaaaattcttgaccaaaaaatagctatctcttttttctcatttttttaccgcaaacttggtaccaacagttgccttctcttgtctggccctatcaaacaatcttacgatatttgaaacgcaaacaaaaaaaattcttgaccaaaaaatggctatct

SEQ ID NO: 43329 - DNA, 812 bp, Heterodera glycines
  unsure (1)..(812): unsure at all n locations
tgtctcgtcggcatttaaaaatgaacaaaatgagcacgaaatcaaaatcggactttattcactcnggtttttcaaaatgtctaggaaatttgggagtaatttaagctcaagtcaaaaaatatataaatggaaaaaataatgaaattaaataaaattaaatcgaaaaaacggaaaacaatttttatgatatgaaaaagaaagaattaattgaacgagtcgcataattcgttaaattggattttaaatttttgttattccatcattcatttttgttttgagggcgggggaatgaatgattgttatttttattttattttatttatttaaaataattaatcttgttaaagttagagtgaccgtgaccgggaatttttcgggaagaaagtacctggatttttgatcgggaccttgaccaaccgacacttttccgtttaaatttgatgacgctttgtatgaacctttcagcgcctcaattgcaaaaatttcaatcaattagaataaagtttaataaatattttattgttcactcctttttacaagttgaagcagcaaattagggtcagaaaatatttaataattaaaaataaataaataaatttttagataaaatattttaagtaaaaagtgaaaatattttaataaattttattttgttttatttttgctaatcggcggtcaaaagtttattttgtttgggcggcgaatcggccgaacaaaacttcatcaaatttgaaaggaaaagtcccggttagtctcggtcccgatcgaaatcccggccccggcttttcaggttccggcaaatactggtttta

SEQ ID NO: 43330 - DNA, 1001 bp, Heterodera glycines
tttttttgggttttcggggcagtccccctgaaccgatgcgcccagatttatggggagaccgaatccttcgggaatagcttccctatagcctgtactttaattctgcgttggatttttgctccccataaatgtttgagtaccccaaacggacacttgaaaaaatcgatttttttgttttcggggcagtccccccgaaccgatgcgcccagatttatggggagaccgaatccttcgggaatagcttccctatagtctgtactttaattctgcgttggatttttgctccccataaatgtttgagtaccccaaacggacacttgaaaaaatcgatttttttgttttcggggcagtccccccgaaccgatgcgcccagatttatggggagaccgaatccttcgggaatagcttccctatagcctgtactttaattctgcgttggatttttgctccccataattgtttgagtaccccaaacggacacttgaaaaaatcgatttttttgttttcggggcagtccccccgaaccgatgcgcccagatttatggggagaccgaatccttccggaatagcttccctatagcctgtactttaattctgcgttggatttttgctccccataaatgtttgagtaccccaaacggacacttgaaaaaatcgatttttttgttttcggggcagtccccccgaaccgatgcgcccagatttatggggagaccgaatccttccggaatagcttccctatagcctgtactttaattctgcgttggatttttgctccccataattgtttgagtaccccaaacggacacttgaaaaaatcgatttttttgttttcggggcagtccccccgaaccgatgcgcccagatttatggggagaccgaatccttccgaatagctccctatagcctgtactttaatctgcagtggattttgctcccataatgtttgagtaccccaaccgacacttgaaaaatcgattttttgttttcgggcagtcccc

SEQ ID NO: 43331 - DNA, 1236 bp, Heterodera glycines
  unsure (1)..(1236): unsure at all n locations
ttttatttttaagggctggggtggctacggctatggctatccctacgggttttatggcaaacggcaagccggttttggtccatccggaaatgctggcacttttggtgacggtggagaaggaaatgccaacggaggaggagaaggaagaggagggccatcgtcaccaaacaatttttgagagagaaaaacaattacaaaaaatggagatattcttgatttccaaaaacggatttttgattaatatgataaatcttggccaaactttatttttcttggaaaatacaaaacaattctaggtgaagttttaaaaagttcttcttaagtttatttgacttttgtacttttgatttatgttggcaaaaaaataaaattcaaattcaatcggatttcctatttatatgattattttataatgatttaaaatttctttatgcataaaaatgaacataaatttttaatatatttaaattatttcatttttatttctgaaaatgtgaaaaattttataaaataaaaaaggaactcattgagagtggggataagagacaatatgctgaccaatttaaagaaatatgcgagaaactttgcgcaagttcacgttcaatttatgattggagaacgaaatttggtttggtaagttgtaaaaattggggccataattttattaattaagttattaaaatgaataaaattgtgacaatttaattaaaaaggtcatgaaaatgtgtattattatgatcaggatcgccaaaaaatgcctagtaaatttgagaaattagaggaaatatttgtggcaaagataattcaaaattggaattgaaggtaaatttaattaaagtataatattcaaatctccagaaaattcttggtgatttatgatttttgggcatgaaaaccaccaaagccgttttaaaaaaatgataaaacaaaaaacgactaaacaataaataaaattaaaaatattattttttttttctctgaaattatcaaagatcttcttttttattatttcaagaattgagtacagtacgctcccaccgtttcttaccgaagaaaaataaaaatggaactgttgcacaaaaaggagaaaggtgcatttgcgaccaaatattttgaaaaatgtcttttttaaatttgatttgatttgtttggtctctaatttttggttcgttttttcaatttattctattntgtgcatacgggaattaattacattagtttttttaaaataatgac

SEQ ID NO: 43332 - DNA, 1019 bp, Heterodera glycines
gcgagtttggctctgaaaattttgaaaaaacgtctatctctttttctgctcaacactcaaatgaactccaaccacattttcggaataatagcgacgaccctaatttttatggattttctttctgggcgagtttggctctgaaaattttgaaaaaacgtctatctctttttctgctcaacgctcaaatgaactccaaccacattttcggaataatagcgacgaccctaatttttctggattttctttctgggcgagtttggctctgaaaattttgaaaaaacgtctatctctttttctgctcaacactcaaatgaactccaaccacattttcggaataatagcgacgaccctaatttttctggattttctttctgggcgagtttggctctgaaaattttgaaaaaacgtctatctctttttctgctcaacactcaaatgaattccaaccacattttcggaataatagcgacgaccctaatttttctggattttctttctgggcgagtttggctctgaaaattttgaaaaaacgtctatctctttttctgctcaacactcacatgaactccaaccacattttcggaataatagcgacgaccctaatttttctggattttctttctgggcgagtttggctctgaaaattttgaaaaaacgtctatctctttttctgctcaacactcacatgaactccaaccacattttcggaataatagcgacgaccctaatttttctggattttctttctgggcgagtttggctctgaaaattttgaaaaaacgtctatctctttttctgctcaacactcaaatgaactccaaccacattttcggaataatagcgacgaccctaatttttctggattttctttctgggcgagttggctctgaaaattttgaaaaaacgtctatctctttttctgctcacactcaaatgaactccaacacatttcggaatatagcgacgaccctatttttctggatttcttctgggcgagttggctctgaaaatttgaaaaa

SEQ ID NO: 43333 - DNA, 1003 bp, Heterodera glycines
ttcaccatggccttggtgaattgttccgcgaaatgcacagtctgaccaattgtccggagttcacaaatttcgccctccttcaccaaatgatcacttctgcaaccgcaaattggagacggaaatgttgtcactgcagaaccacaatgcccgatcattgaccaaataaaactgacgtctccgcccataaaccttttgaattcaaaaaatgggaaaaaaacaaattttaaaatttaccactttactcgtttgcccgccaatgtgccaattccgtcaatttgtgcccaaagtgtgcttccatagcgctccaagttttctcggctatccttcgcggggaaaacggcacagacgaaattgtttgatggagaatttgaccgagcagcctggctgaatgagatggtaatcttcgtacaactctggccatggtcgccgctcagcttcatgtagatttcgccgccaaaggtgatcagattgtctttggcagacaaaagacgcgcctccaaagctgccccaacatcagtgacacaaatccaacacccacattggtctcaattggtgcgtattgcaatggcccacagatacggcgtttgatgtcaagcacctaacaataatcaatggaatttttaaataatataaaaaatgctaaaatatgtttttacttttttgagtggcggaaacacatcaagtttggcattgatcagacgaatagtgccttttagtcgtctgtaagccttctgtgtaccgacaagcccgaggatcagaagagcatcctctgggtcaaccgaatcgttttgtcttgtttgttgttgctccttcttttttggcgtgtaatgggcaaatttgtgccgaacttcccgactgatcccttcgagggacgcccggctggcggaacgtgatctgtcgcggcttattacatccgcaatttgatctgccaatttgcgatgtgaggtgcgctgcaaatgatcgacattcatctttggtcgtcctgttggagttgctaaaatta

SEQ ID NO: 43334 - DNA, 676 bp, Heterodera glycines
aaacatcataacttttttttcagctggccaaattttataaatttggcatcgttcgaaagcccggcccctacatgtttagaagctgttgataagctatttctaagcgattgaaaacttttttaaaaaattgcaacatgaatactgcacaagggtcagaatttttgcatatttttacttataaattttttacatgtccgtatatctttgtgttttttggaaagccaatagagcttgttaagagctttcgaatgacaccaagtttattggatttggtcaataaagaaaaaagttatgatgttctaaacttgtctcagactaaactgtcccagtctgttttctataatttgaaatgagaaaccaaaagaaacttggcaatatttaaagacgatgcgaaattaaattaaaaaaacccgttaaataaaataataggaaagaaatgccgaaattgcgaaagatgcttaaagtaggcgaggaacgcgtgagaaaatggagaaatgtatttgcgaattatttaaaaataaaataaatatttcaaaatttttaagccgaacgtaattaagtgtggaagaaaacgtttggaattggaatttaccgaaaggaaaaaaacgaaatttttaattcggtgattttggagtaccaaattaaattattgttaattggtgtgtatttttgtgac

SEQ ID NO: 43335 - DNA, 949 bp, Heterodera glycines
agtttctcaagcagactcggcgccacacacaccgccaaagcgttggtgcccatttttgtgtgttcttcgttggcagccacgcgacgcaacaaacggaggacagagcgcaactgaaaaagaaacatcaaatgagtgcaataatgccgtccgtcttggcatttttcagtccttcccccccccccaattccatggcatctttcgagtgttttccgtcacctccccaatttccaaaagtcgccctccccccaattttccttcgttggcctccgtctcaccagcactgtgtgcgcgggagggagcattgtgagcagttttcggcaccggcaaatgcgctgttcgtcgcttagtccgtccccattcgcttccatccaaaggcggtaattgccggaaatgagcagctgacccgggatacagcgcaaatactccttcaacagcgaggcggtcacgtgaacattgaactgatggaagtcagggacttggccctgaaaaaagggggaggtgagaggggaggggggaaatgccaaagaatgacctggtccaactgctggcgaaggatgcgcaccgtttgctgtttgggcgatttgcggaaaattccctccgtctccgagccgtacaacagcaaatggtcgatcatcgtcagaacgggctgaacaagcaatgctttcctttctgtgccctttgaattattttctgcttcacctgcggtggcattgtgccacggagctgacggccgaacaaacgcttagtgcgcgagttgccaccggtggcgcagggagggggtgcggcatgggcggaggacgaatcggcacggcccaaaacacgcctaaaagggacaacggcattcgaatttcgaaaggagagagaggcaccaaatggaaaacaaaaaggaaaggcacccgggcagaccgaaatgaactgatggacaagactcatcgctgctgcgcttggc

SEQ ID NO: 43336 - DNA, 1003 bp, Heterodera glycines
gattttcaaaatctgagttcagattcgtgatcagcgcatttttttaagcctagaaaaaatacctgcaaaatttttaacatttttttttcgccgggacaccaattcttgaccattgccgggggtagtacacccaatttgatgaaatacaaaactaaacaaaaattggtaatgaattcaagcggtaacaaaagttggaccaccttctcctgtatcattatactaatcaaaatgaacgacctttatctcaaacccaattaaatttcgaattgccaatttcatcgcttttattgaccttcattttcggtaattccggaaagtaatcgcgcacaatcaacttctccaaattctgcacatattgctcctcgggtagcacttttcgtgcctctttcctcgtctccaatacttttgcgccgagttttactaatttctttttgcgtgacgactcgggaacgtccataagtgcgtccgctttgtcaaaactattaaaattgtcggcctctttggacatttttgccaataatcagtccgtcaacagaaataaatgaacaaataaatgcgttttgctgaaatttattaaaagaaaaatattatgcgtattggtcacttttaacagttcatagggtcagccggtttcgaaaaaattaaattttttaaacacggcgattcaattttgggctccaagtagagaccggaaatttcaaatttgcggatcccgctgcggggctggaactcaaaattttttgcgggacgggatcccgcgggattaatcctgcaaatcccgcatttaaaatttgcgggatcccgtgcgggattgcgggattttggaaaattcgaaaaaatttcaattaaattcaaaaaatttccaaaaatcaaaaaatgctgaaaaataaatttttaggggctggcgggatgcattaaaaggggctgatgggtcgactaagatttttcgattggatccgacagtaaaaagttgatcggaaatcaaattattaacggttcataa

SEQ ID NO: 43337 - DNA, 736 bp, Heterodera glycines
  unsure (1)..(736): unsure at all n locations
aattctctaacataaagtataacncatttgaaattaaatttatttaaattagtgttttggcacaatgagagcttgaccataatttcatcactcatttttggattttctactttcatgtgccgatcattttaattttctcaatttttttatttacagtgatcatttttctatttatttcgaattgtttcatccgtctcataatttcatcacggcaaacttcaattttcttacaaatttctgcataattttgttgccattcttttctcgaatattttcttctcttttgcttatattcattttttatttctataattttcgctattatttgtttatttctctctactgattgatcacattggtctcaattaatagtcaacaaaaaataatgcacccataaatcagaaatttattgaaaacgaaatcgtgtaataaaacaatatggcagcataaacatgaattgaaataatccccaattataatgtatggtatgttttaaggaatttcttcatttttaaaattacattaaaattaaaatttttaagcatattaaaataattccgaatgagttcttgattcaccaaattttatgtttaacttcattcgaacgctctacatttatgtgcaatgccttctttttcggctgatttgtattttgccatatatttttttttgtttttgaatttcctggattcttatggtacaaatagtaggaaaaacacttactttatatgcttct

SEQ ID NO: 43338 - DNA, 488 bp, Heterodera glycines
aaacaacattcacttcgctctatagaactttttttccgccttacagaatttcttcatatttttcatatcgatagagaaaaaaatactgcatctgtctatagtgaattcatttttgtctatggtcaaactcaaaagttataaattttataataaaaaaaactattcttttatttagattttatggctaagaaaagtgtaataaggaaactacaaagcaaaaaaggggcccaaaagcgttggactaaatgggagaataagcgaacggagcgacatgcagctgcgtttttcaagaactgctgttcttcatctacctccatataacaaacaataaatatatttcctgctggccacctttttcgtcctttctttacggacggtcaaaattaattatcgcggcgagaacggcggtgaaaggaaagggggggggggcaacggaggtcgaaggaaatggcaagcagcagagatgggttaagggggggggggggggg

SEQ ID NO: 43339 - DNA, 1450 bp, Heterodera glycines
  unsure (1)..(1450): unsure at all n locations
gtggctaaattgtaatgacaataaacaccaaacatctgtttttttggcttcttaggtgattttttggtccattcccttcattgcttatcaattttttgaacacatttacattattaaaaaaaaatttttcttttggcttgttcattggctttatccgatggaatttttagaccctgatttacgcttttaaattaataaattaggaacaacaatttaaatcccatgaacacacctctaaaatcgtattttactttaaaagaataattttctaaaattctttttgttatatatttataaaattgcattatttattatttggcttataaaaatttaaataaatgaataaattacaaaattagtgcgagttttttccttgtcttcagagatgacatcatctcttattgaattttatgcccatattcataaaacaaatatattttgctatgcatttttaagccctcgtcactaattaattccttttttcgtcatgaattcattacctttttatttttatttatttaagattattaattgtcattttaatgctaccactcattacacaacatcaaaaacaaattccattgtcttcgatcagtcgcggcacaactgtacagtttggcaatggaaaaagtaatcaaagaaccggacaatgctcaaagtgaacattttatgaaacaataatattaatcaaattaaaaaaacattccgtatcattttttaaatgttaaaatttttcccttttccaaaagaatttttgccttttggctattttcagttttttatgcattttttccattttggtgccgttttcatctttttttaattttagtgccttttaggcgattttttgccaccaaatactattctagatgaggtcaaaaaaagacccaaggaagcggagtttatggaatgttcgacatttaacagtgggagaaaatgtccatattacggttttttaagcgaattgcttaccaccagcaactgctgctgttgtaagccatcgctgcagcgaagaagcggatgagcacgtgaaaaggccgatgaagtaacaaaatttataatttttgttggttttttcttgaattttacaataaaataattgattttttatttcacttgaattaatcattgaaaagtgtgcccatttgtcagtgcctttatggtgtggtcgcgcgggaagcgaaagcgaatggcggcggacaatccgaaaatgcacaattcgaccatctccaaacagttgggccacgagtggaagctgttggacgaagctgacaagcgtccgttcattgacgaggcgaagcgcctgcgacaactgcatatgtgaggaatttgcattttttatttatatatttttcaataatttaaaatttaatttggaaaattatcaatgacatgaatatgattggaattgctttcatccaaaatgtgggccanagaatttctttgtcta

SEQ ID NO: 43340 - DNA, 1629 bp, Heterodera glycines
tggtgttgtgttgttgttgtttgctctgctggcgcattttgtgatttattaaaagtattcatttttattttacaaaaaaaatttcttgtgataaaatggttttgcgtcatatttgcgtgcttttatattgcgaaaaggtacagtactgcgcgctacgtaaaagacaaagttacggtgctcttacgcacatataaaagtgcttgaatgtgcacaaaatctcactttcgcgcaatgcatttgcttatcgcattctcgcgcattttggactgttccactgatgaagtgggctcgcgaatttgtgctagtgttgcggatcgagaaaaattgttgaaggaatttgcacacagtaagctcatcactacatactccgaccgtaatggcttcacccacacgctcttctttgctggactcactgaagagggcgccgactctgtgcttgcttatggtaacctgaggcgcccctacaatgtttgcgttgcggcccattattactcgcggcaccgtattatgctaaagtacccgcaattcccatgtgtaattgagaagtgtttcggtcaaagggatgacggacccttgcacaaatattacccgcttgaactggtaaaagtcatcgatgacttctttccgcctgtgtacgttaattcgttgtctcaaaagcgtgacggcgcatcattgtcatcatcatcctcgtcatcattgctgcgaaatttgccatcaccttcttccgatggtgctgatgatgacgactatggtctctggtttggctcgatgcccacacaaaacagtgttgcggaaacaccacctcctccgtcttgtggttttgtgaaaggaataatatggattgaaaaaaagcaaatcaaaaatattctaagtcaagcagttaaacatgactaattgtgcatttttctacctaaaaacatcaactctgtaactcagatgatgatgaatctttttaatatttccaaaactgctacttctcttactaaattatgcatttttctacctaaaatttgcaacttctcacgcttcattattttaaattgtaatcttccatttgttaattatgcatttttaaaagtacaattccgtataaattacgcctttataaaaccaaaatcatgtacaatagcattcatccccacaacccccttagttacaatagggcgatagcgtttcgacagcttaacagaaataaccgtcccgtccttaatgttgggcctcaggaaattggggtactcaatcaaaattgaacaaatgtcatcatcatcatcatctcctcttcatcatcctcatttgaatggcacattgcgtagcgtaggacactcctcttgaatgtgtcaaagtggagaagctgacaggcatcggcgctcagtgttatgccccgtactttgagcaccgttttctcctccccgctttggcggtgccgcatccgcagggcgtactgcttgcacccaccggaaacaaattccacgagctcgtggtccggccattcatccgaaaggtcgcctaggtggggtcccgtctccagagggcacccgtccgcctcacgatgggcgaaacacacactgtccgtgtcggtgtagatgagcaccgagtttggtgcgcgcgcaaccgtctgcattagccgca

SEQ ID NO: 43341 - DNA, 1188 bp, Heterodera glycines
ttgtgataatattcttgaatcgcagtctttggaagtcctccgaaggtgtgcgaattgcgaacccaattaagtcattttccaccaaatgaggaacatcttttttttactgatttaaaattttacgatgaattcgagccatggcttgggttcatcaggtcacttgattttttgagccaatttttgtgtttaaagcgattggcggtgatttgcatccaaaagcatcgcttcccaatttgatcttacgaccatattcattagtgacaagggaatagagtactcaggccttttacagagaccaccaataaagtgattttctcgattcagcatcgttcccgagcactccttaataatggaacgcctccttaaagttcaagaaattttgaaaaaatgaaatcgggagaacatggaaatgggaaactcagacttaccatttattttaatatgaagtggatttggtaatcacttctttattgcttgcaattagaagcttctcgtcttcaaaagcttacgaatgctatccaaagagcaaaagatttaaccggcaaaaatagaatttttgagattaatttaatgcattttttctctcaaattttaatgaccatttgtcattggtttggatccgctttttactattgactagggctaatatttttaggctctaaaaactgccaaaataggtaggctttaggttctaaaaaactcctaaaataggcactaaaaaacctcatttttaggggtgtaaaatgacaaaatgtattcaaaaaagtaaaaaaattaggccaaatctgtattgaggtaaataatttttaaatcacaaattcaattttaaaaccaaaaattcttgccaagaaaataaataaaaaattttggagatgaatttttaaaattttttcatttcttacggggtgtatttttgaaaaaaattttaggtcgattctttggggtgtattttttgttgttattgcatttttgttaacaaattttgggcaaaacgccaaaataggcaaaaataggctctttcaaaattttttaggctttttaggctctaaaaataaaagcctagaaaataggaacttataactcgaaaagtagcttaacaacagcccaaaaaaacatgtttttcgtgcgtttcaggccacggggagctcaggaaaaaaataggcttttgcataaaaagtgcatccctaa

SEQ ID NO: 43342 - DNA, 1036 bp, Heterodera glycines
tccagtaattctgaatttaaaattttttattaattttcatagcttcactattttatttttttagcaaaattaattcataaatattttttcagaaactgctctgaaacgcaccaaatgttaatttaaagttaaataaggctctctgatgctttttctatcaaaagggagatgaataaaatttttaaaaatttttaattcctttttaaacaggccaaaaagtttaggcttatattttaaaaagtttcatcgaacctagcgcactaacatcgatataatctctccaaattttgcaggccttctccattgtaaaggactaacttaacctgaaaaaatgccaacgcttgttgtttttaaaatttttcgaaattctgactttttcattaattatttattttttgcaaaattaattcataagtattttttcagaaagtgctctgaaacacacaaaactttatttacaggttagtttaggcactctgatgctttttctatcaaaaagggagatgaataaaatttttaattcctttttaaacaggccaaaaagtttaggcttaacttttttttcagaaactgatcagaagcgcaccaaactttgcagggatactgaaaggaagagtaataacctattttaaatattatctagtcagttcatttaaataatttttatccaaaaaaatttttttttgggttttcggggcagtccccctgaaccgatgcgcccagatttatggggagaccgaatccttcgggaatagcttccctatagcctgtactttaattctgcgttggatttttgctccccataattgtttgagtaccccaaacggacacttgaaaaaatcgatttttttgttttcggggcagtccccccgagccgatgcgcccagatttatggggagaccgaatccttcgggaatagcttccctatagcctgtactttaaattctgcgtggatttttgctccccataattgtttgagtaccctaaaacgacacttgaaaaaaatcgattttttttgtttcataaatattttttt

SEQ ID NO: 43343 - DNA, 1031 bp, Heterodera glycines
  unsure (1)..(1031): unsure at all n locations
atattatcgtaataatataaaaaatgttattttctacaaaagtaactatgattttttgtttcttttatgaatatttttattaataaagcaaatttcatgatttttttctgtattttttgaatgattttttagtggtattccatgaccttaattcccaacaagaaattaacatttagagcagaaaattggaaagtattagaaaataagctttaagaatatttttaaaattatttaaacaaaatactatcttttttatccctttctaaattcatatttttttttgtcaagttagtaaaaaactttaatctaaatagcaaaattgaattctgaaaaaccgatttagtaaaattatataaagccgagaatgattgataaacaaaatttacatttacgcaattttatttgccaatgaaataattaatatattttaataaattttaaggctttaaatatcaaaaaacgttggtataaatatttaagaaattgattaaattatttaataaaaatatttttgtaaagtcacagagcaataaaattttaattataatatttttataaagaaataagttaatacatttgtttatatttattatgccatttattaagtttaattttagttataatttttattttttaaatttatgagttaattctcacttgaggattgttcggaatggcggatccttctcaccatcgtataatcgaggaaatacggtatttttaattaataatatacgcttcttttgcaaaaaattattactaatggatagtataatagtattttcataatattttatanttataggaggtgttaattttataaagaatttgttatttaccttatacaaattattacttattttaataataataaaaattttaattttgatgatatatttgtgttttataataaattaattttgttcctttattagaacagatcacaccccacaggtttcatgaaaatttattgctattttataattactatttcgttttgactattaaagctaaaaataatttaaaatttt

SEQ ID NO: 43344 - DNA, 1176 bp, Heterodera glycines
ttgcggaattgggcccgagataaaaatcatgcaaggcagaaggtgtagccaccaggccatttgtaattggacctatccaaaaatagagaaaacattacggaaggaaagaaagagatctaagaccttttttcgcgcaagtatttgaatgtttgtgggttctcaaaagcaatatgcatagggcagtattctcaactctctcctctcgtcccaaaaaacgagaggcgagagacgagaggcgagagtaccaaaaatggcgagagttggcgagaggcgagagacgagaggcgagagttgtcccacccctgatgtgtagcccaaaaaatgttttggctttaacttttcttggaagcaacaaaatttaagtaatttaacaaatgaaaaaaaacatatttttttaaattggacgaaaatttaggacttaattaattcgaaattttaacagatagaatttcggaattttttttatgaccttacgcttacagtgctaagaactgcaactgtccataggccaaaatttatctctcctctattccactaaaaagatttcctgaaagtgtagaagtgatttaaatatgggggaaaacctccaaaatttggcactttagaccgcttcggcactaattaatttctaatgagctaattacatcgaatatacataataaaaatctcttgaagcacgtagaaatattcaaataaatctttttattcgaagcgaaaatatttggaaacttaaagaattgggaggctcattaaatcacccataaaataaaatgctaccccccccccccccccacaaatacaaaaatagaataatggtattcatttgtcagtcctaattaatctctaatcacctcctcaatgttcctaaaatatttccataaagcatagaaatgtcaaaaatgttttgaaagtgaataaatcgcctaattgatactaattaatctttaatgagctaaataatctctcataaaaatactcgaaatgcaaagaaatgtttattttaaagccaaaatatggaggaaattatacagaatttggcccataaagcacccaataatcgatttaaagaaatcctataggaatttagaccttaaattgctcatttttgcggaaaatccataggaatttggttggtagtgttaaaccaccataatcaggcctaattagtttttctaa

SEQ ID NO: 43345 - DNA, 1136 bp, Heterodera glycines
  unsure (1)..(1136): unsure at all n locations
taattcacaatttccgcaactcttgcggtaagggaaaaaaattttgaaggggctctgcgaaacgatttagcttcggggttacgagatagaaaattgtcctaaaaagagatagcatttttctgagaataaattcacaatttccgcaactcttgcggtaatggaaaaaattttgaagaggctctgcggaacggattagcatcggggttacgagatagaaaattgtcctaaaaagagatagccatttttctgagaattaattcacaatttccgcagctcttgcggtaatggaaaaaattttgaagaggctctgcggaacggattagcatcggggttacgagatagaaaattgtcctaaaaagagatagccatttttctgagaattaattcacaatttccgcaactcttgcggtaatggaaaaaattttgaagaggctctgcggaacggattagcatcggggttacgagatagaaaattgtcctaaaaagagatagccatttttctgagaattaattcacaatttccgcaactcttgcggtaatggaaaaaattttgaagaggctctgcggaacggattagcatcggggttacgagatagaaaattgtcctaaaaagagatagccatttttctgagaattaattcacaatttccgcagctcttgcggtaatggaaaaaattttgaagaggctctgcggaacggattagcatcggggttacgagatagaaaattgtcctaaaaagagatagccatttttctgagaattaattcacaatttccgcaactcttgcggtaatggaaaaaattttgaagaggctctgcggaacggattagcatcggggttacgagatagaaaattgtcctaaaaagagatagccatttttctgagaattaattcacaatttccgcagctcttgcggtaatggaaaaaattttgaagaggctctgcggaacggattagcatcggggttacgagatagaaaattgtcctanaaagagatagccatttttctgagaattaattcacaatttccgcaactcttgcggtaatgggaaaaatttttgaagaggctctgcggaacggattagcatcggggttacgagatagaaaatgtcctaaaaagagatagcccattttt

SEQ ID NO: 43346 - DNA, 1011 bp, Heterodera glycines
aaaacaaaaaaaatcgattttttccaagggtccgttttggggtactcaaaccatttagggggagcaaaaatcccaacgccgaattaaagtacagggctataggggaagttattccggaaggattcggtctcccccataaatctgggcgcatcggctcggggggactgccccgaaaaacaaaaaaatcgattttttcaagtgtccgtttggggtactcaaacaattatggggagcaaaaatccaacgcagaattaaagtacaggctatagggaagctattcccgaaggattcggtctccccataaatctgggcgcatcggttcggggggactgccccgaaaacaaaaaaatcgattttttcaagtgtccgtttggggtactcaaacaattatggggagcaaaaatccaacgcagaattaaagtacaggctatagggaagctattcccgaaggattcggtctccccataaatctgggcgcatcggttcggggggactgccccgaaaacaaaaataaatcgattttttcaagtgtccgtttggggtactcaaacaattatggggagcaaaaatccaacgcagaattaaagtacaggctatagtgaagctattccggaaggattcggtctccccataaatctgggcgcatcggttcagggggactgccccgaaaacccaaaaaaaaattttttggataaaaattatttaaatgaactgactagataatatttaaaataggttatttctcttcctttcagtatccctgcaaagtttggtgcgcttctgatcagtttctgaaaaaaaagttaagcctaaactttttggcctgtttaaaaaggaattaaaaatttttaaaaattttattcatctccctttttgatagaaaaagcatcagagtgcctaaactaacatgtaaataaaatttggtgcgtttcagaaccctttctgaaaaaatatttaagaattaattttgcaaaaaataaataaaaacgaaagactcagattttcgaaaat

SEQ ID NO: 43347 - DNA, 443 bp, Heterodera glycines
tactatagaattgggcccgctaaaaaaccacacaaaacgcattccactcaatctctaatgacctctaatcatcgtaaaaaatattctcgaggtgcggaaatgccaaaaaaccggtttttgaaccggtttaaaactcgaaaatttgagtgaaaaggggggctcctgaccctttaaaacggtcaaattcggacaaatttggtatcattcgaaagctcatgacgagcttagtctaaaaaaacaaggtataaatcgaaccgacgacatctgataatgataggtttttgaaccggttcaaaatcaatgaaaatttgggcaactacaaatttaaaaaaaaattgaattttgcttattgcgctaaaaaaccgccgcacactcgactacggcggccagtaggtggggagagactacgggctacggaagaagtccgcgcgtgatccgcaggc

SEQ ID NO: 43348 - DNA, 1258 bp, Heterodera glycines
aaaaatttttaaaatgagaattcatgcgagtttttctggaaataagcttaatagggcctagttaagctgtaaaaaaaatttgggggcgatttgaaagagaataaaaggacccaggttcgatgaagttttggtaagccaaaaaaaattccaaacatttaaaaaatctataaaaaatttaaaaatgagaattcatgcgagattttctggaaataagcttaatagggccttgttaagctgtaaaaaaaatttggggcgatttgaaagagaatagaaagaaccaggttcgatgaagttttggtaagccaaaaaaaaatccaaacatttaaaaatctattaaaaatttaaaaatgagaattcatgcgagattttctggaaataagcttaatagggcctagttaagctgtaaaaaaaatttggggcgatttgaaagagaatagaaagaaccaggttcgatgaagttttggtaagccaaaaaaaatgcaaacatttaaaaatctataaaaaatttaaaaatgagaattcatgcgagattttctggaaataagcttaatagggcctagttaagctgtaaaaaaaatttggggcgatttgaaagagaatagaaagaaccaggttcgatgaagttttggtaagccaaaaaaaaaaaatccaaacatttaaaaatctataaaaaatttaaaaatgagaattcatgcgagattttctggaaataagcttaatagcgcctagttaagctgtaaaaaaaatttggggcgatttgaaagagaatagaaagaaccaggttcgatgaagttttggtaagccaaaaaaaatgcaaacatttaaaaatctataaaaaatttaaaaatgagaattcatgcgagattttctggaaataagcttaatagggcctagttaagctgtaaaaaaaatttggggcgatttgaaagagaatagaaagaaccaggttcgatgaagttttggtaagccaaaaaaaatccaaacatttaaaaatctataaaaaaataaaatgagaattcatgcgagttttaaaaattaataaaaatttttaaattaagagttactggcgttagcatcatagcggtgcttttccttgtctttttgatgcccttgcaaaatctggtgcgcttctgatcagtttatataaaaaaagttaagcctacactttttggcatgtttaaaaagaggcaggttcgatgaagtttttggtaggcaaaaaaaaatccaaacatttaaaaaatctataaaaaatttaaaa

SEQ ID NO: 43349 - DNA, 959 bp, Heterodera glycines
  unsure (1)..(959): unsure at all n locations
aaatgcagctgatgccgtcggaaaagctcngatttttgggggaagtttttttctntcagtttcaccactgattgttgaggcaatttttttcgccaatttcttttgtctacaaacattatttattgcgtttcatcctgtagtgtgtaaaaaattttcaataaaaaaacttgttatctgaatatttacaagcaaaatttaagaccatttccaaagaggaaggaacaaaaatttttgcctaaattttatattatattgttgaattgtttgaaatgcatctgttgtctgccgttttgaaatttttcaacttttcgcgaaaagatttcccagaaaatgcatgggacaaataaaaattaaacttctattatgatcaatttaaatttcctatcagtttcgggtttgctttaaacacgctggccgatgaaaaaatggagttttatggatgtcaaattttgggacttttcttcgacgtggccatcagcgggttgtttcgtgacaaaaacaaaccagtttgatgttattcgaatgagctagacgcgctctacattttcaaatgtatcaacaaagggtctaccgccactccctggcgagatatggcctgtcaaagcagaacggggccaataaatttgaatttttgttaatcttcggcagttgcctttatttcgagcctactctacttgtgcatcttttcccaatatggcactgcttccgaattattgaactgtttcacgactgattgttgagataatttttttttccgattcctttatctccaagcatgagccttataagtgattgttcatatccttctcttgaaaaaaattgtcagtaaaaaaaacacgttttctgaatattaacaacaaaaatttttagacactttctaaagaggaaggaaaaaaatttttcatttacctaatatttatttatactgttgaactgttggaaatgcagctgatgccgtc

SEQ ID NO: 43350 - DNA, 962 bp, Heterodera glycines
  unsure (1)..(962): unsure at all n locations
atgtcctaaatatggtaattaaggaagtgagatatagcaaaagaagcttccccgaaaggaagattaatggaccaatttaggcaataattgattctatatggtcgagcaaattggggagctcgttcatatattcaggggaaataattatattttgaattttagaggcccgggaagtgtgcgaagaatccatggaattggccaagaaagtgggcaacaagccggtgttcgcgagagccttggccagcttggcggacatttgcagtgagctgggcgagacggaggcgcgcgaaacagtcacagtgagtgccgaaacgaacaaattggcatggcggactgttcatttttccgccttgggtttccttttccagaaaagctgggcccgctatgaacaagcttttcgtctgctgcgcaagctcaacgaccgaatgggccaagtgacggtgttggcacaggtgcagtggcagagcgaatgattagcagagtttaggcagagagcaagaaaaactttcggtgcaattgagggaccattttaaatggggctgatgccggccaccctaactgttatttgcacaggggaagctgatcattaaagtgatcagcatcacctttgcagatcgaattgaaaaatctaagcaaaagtgccaaaaaccatttagtgccaaaactctccgtttgaattcaatttactcgcagatggccaaatcggccgccgaaaataaaggcgtccattacggcgggtcgggtgcgagtgccaggcaatccaactgaacaaaaaatggtctggagatggccacntctgatcggggccaagggtggggatttggccttccgcatttggatttaaaaatcggatttgtccactttcagcatccngatcatggagtgccatcaacggcttcaagaacttacatgtgagncggattgtgtggatggaaatcccaaaaatgccattaaatattgat

SEQ ID NO: 43351 - DNA, 697 bp, Heterodera glycines
  unsure (1)..(697): unsure at all n locations
tcgtcgtagtcgagaatccgtcgacccaattgtcctcttgatacacgatttgacgaggcctattaattgctcgtacaaagaccccatnccatggncgtaggcgggaatgaagtcccactgaatgcctcggcgcgcggcaaaggtgacgacgtcggtttcggacggggggcaggtcagaatgtcgagggctttgctggtttggacgaaggtagggcattatcactcaggattcgccgtggtcggccacgacggctaaagaattgtcgtaagatattaatgaagcttggggccgacaagtcggtggtcgcctcgaggtacacggcgcgggtgacgaagcaagtgatgatgaccaaatacgccttggtcagtgatccgtcgcttagccgagagggggtgggcccggcaaaatcgagaccgacaaactcaaagggattggccggtttgaagcgcattgagggcagagggggcatagtgggccttgcaaagggaggtgccgtcattctccggcaggatggacagccccgaagaatgccgcgaattgttcgtcgtgcttgaggcatccaataacggctaaggaactcagtcagagtccagtcaacgccggcgtgtctgaggtcggcgtggatttcttggacaattagccgagtcagaaatgagtggcggtcgaggaggacgggcgaggcaagagtgggcagac

SEQ ID NO: 43352 - DNA, 1127 bp, Heterodera glycines
taaaaaaatttacgaattaggaaaaacgaaattcaatttaataaaagttttaacgaaatgcaattcaaaatcgtaaaaattttgagtttttttttccaatttcgtaaaattttcccatttttaccagtgcttatcgattatggcaaaaaatttacgaaattccccccccccttgaccccccctgtccacctatgatgaaaactaaagaatttaaatattttattttttatttttaaatttaatttcttttcagaatatcacttcgcagttgcccgattctgtgccgtatgatgcggtggacattaccgagctggtcaccatttgcatccctttctttctgtacgccgtaacagtgctgaaaatggtcattgaatttagcaatcagcccacgtcgagcccaagtaaaaattcacggcttttaaaaatcaaaaaacaaatgcttttgcaaaaactctccattatgttttaacatttttgaaaacaaaatcgatttttctttacacgtacacaccgtattttctctaattatatgcctgcgtaaattatttttgaacttcctcagaaagggggagttaattggagacgggtaaattacgggcatataattagaaaaatacggtagttcgtttgggtgtggttgtagtcatgtgccgtgatttcttgtgggatcagccaatttttttttgtcgattactttagtcaggactatcatcataaaagggttgcggtaaaattctaagagaaatacgcaactaagcttaaaaaccgtaaattaagaatcgtgcttaattatctccctcattcagtgcaagttgccattgtccttccggtcggctcccaaggcaacaaggaggagcgtgccaagtttgttaatttgatgcaggagcgcactcggctgttctccatgtgtctgctgagccaagtgccctactatttatcccatgccatttaccaatcgttgcgtttctttaaaatcaaccaagacacacttcaggtggtacagtatacgctgaggaataggaaaccggaaaactgtaggagcaactcagtcccggccaaatttattgcttcaaaacttttcataattaaccaaaaaatttcatagtcgaatcactaaacaagcttta

SEQ ID NO: 43353 - DNA, 818 bp, Heterodera glycines
gtgggtaagctcccctctcgattatcgtcataaagtaccgccaattaattcaattttccctatttcctgaatcaaatagcatcaggaaaaagcggcggaaattccgctgactttccattgaatttgtggaaaattaacggatgagtaattaattcagtgatggcgaattaatggtcggcatttgacgagaattggacactttcccacggatgaaaacgaataaaaaatggagaaatggaaaaagaacaaaatgaattggcttttttaaattctaatggaaattgggaaaggcattattacactctcacattttggacgaattgattttacaatggacggacaaaaatgggaggagaagttggggaaaagggagaagagacaaaagggggggaggggggggcggaggtcggaattccccggaggacacacaaaaaaagagaggatttggcggaaagggggaactgggaaaaacgagatactaatggaaaatgcatgaacgaactttgaaacaatagaagaaggagatagaaacgaacggcggatcaatcaaaaaacaaatggggaggggtcgaaaattccattgggagaaagggaagacaaaaagtgccattgggagaaagggaagacaaaaagtgccattgggagaaagggaagacaaaaagtgccattgggagaaagggaagacaaaaagtgccattgggagaaagggaagacaaaaagtgccattgggagaaagggaagacaaaaagtgccattgggagaaagggaagacaaaaagtgccattgcgagaaagggaagacaaaaagtgccattggga

SEQ ID NO: 43354 - DNA, 631 bp, Heterodera glycines
ttgcactttatgagtccttttttttttgtacgtccgttcagagtgtataagtccaagctatttccaatgaattaaatcaaattttgaatccaattacatttttgaattcccatggaatcgacggaatcagctaagtgggtgcagagttagttccgtgcaaatgtcgtaaatcatttttaagtgccctctattccagggctcggatctgtcctgatttatcagatttgtcctgatttgaagggtccaaatctgataaaattaaaatgtcctgatttgtcagatttgtcctgatttggagggagtgacccaactttgtcctgatttcttaaataaacttacaattttgaaattttatggcataatgtcactattttatcaataaaatataagatttatgacaaaatttggttattttttaaataaaaatctgttaacaaatcgattaaaaatcgcaaaaatattttccggcggcgcctatcggcaccgccggaccccctgtccatcctccagacgcaaaaaaagcgattttaaagcaaaaaagtcgtcgcttgacttttaatttaattgcaaaattggtgttttttggtgaaaatctgttaacaaatcataacgaaattacaaaaaattttcc

SEQ ID NO: 43355 - DNA, 982 bp, Heterodera glycines
  unsure (1)..(982): unsure at all n locations
ccgtgcgcgtacaacaaatgccagaacggattttcactgctccacacgcgcaaacataaatggcatatccatttatccactggcattgttacccatctttggttccaacaaaagattaatttcaatgttctccgtgcgcgtacaacaaatgccagaacggattttcagtgctccacacgcgcaaacataaatggcatatccatttttccactggcattgttacccatctttggttccaacaaaagattaatttcaatattctccgtgagcgtacaacaaatgccagaacggattttcagtgctccacacgcgcaaacataaatggcatatccatttatccactggcattgttacccatctttggttccaacaaaagattaatttcaatattctccgtgcgcgtacaacaaatgccagaacggattttcagtgctccacacgcgcaaacataaatggcatatccatttatccactggcattgttacccatctttggttccaacaaaagattaatttcaatattctccgtgcgcgtacaacaaatgccagaacggattttcagtgctccacacgcgcaaacataaatggcatatccatttatccactggcattgtacccatctttggttccaacaaaagattaatttcaatgttctccgtgcgcgtacaacaaatgccagaacggattttcagtgctcgtggcttggacatttcgttggtcagcgaaagaatttccttacgggttttttaaaattatgaaaaattttagtatttaaatttaaaaaaaacctcgaaaaaactaaaaacctaaaacaggctttaatttaattgaatttattgtaaatttatttcgaatgcaagttgtcactctttcttctgcctngtcattttttaacataatagtgtgtattcatttaggaattattttttgtttgttttttttcatttccatttccaattgttcaaagtaaacactgcaaatat

SEQ ID NO: 43356 - DNA, 711 bp, Heterodera glycines
  unsure (1)..(711): unsure at all n locations
gatgatgaaagaaagaggtgtcgatgcnnaacgcaaacattttacgaagggaatcgcttttagcaattattgggtcataaacattgaaattcacacaaaaaaaaagagtaaattcatttaaaaatatacatatataattaaaaatatataaaacatctttatatataaaggcaaaggtgtaatagaatcgcgacatcgatggagaaaaataataaaatttcaaaacctttttttctggggtaaaaaagtgcgctaatcattgattttgaaaaatcattgattttgtccataacttttcataaagtaattgatttttacatactgcgatttatttttataatttgatgaaaaatcctagacaaaataaggctcttgcaagaattgggaaaaaaattaacggaaaaataaaaattttgaaaaaaaatcaagtacttgatggtcatagacaaatcaatgatttttcaaaaatagaattctgattcgtaatcaacactttttttacatcagaaaaattgttttgaaattttactattttttccatcgaacaattttaaaaatgtatttttgtgtttattggtcctggtggtggcaaggcaatttgacaatgttttgcactctcacacaaaaaaaacgacgctgtgacgaacacaaaaagcgtagcggaaaagaaagagagaattcaatggggaagtgagtgagcgagtgagtgag

SEQ ID NO: 43357 - DNA, 1023 bp, Heterodera glycines
  unsure (1)..(1023): unsure at all n locations
tctttttaatttttataaatgatctgccgtcctttattgctaatgaagcatcatcagttggcataaaaatgtatgccgatgatgttaaattatattatgcccatgaaaatgatgataaaacaaatcatttagataaagcaaatgaagctttggaaaaatggtcaaaaataaatgggttagaaatttcaaatgggaaatgtgtttttctttatttagggaaaaataatatgaaaaaagattatttaattaactcaaaaaagatttcagaatcggataatgttcgtgacctaggcattataattgactcgaaactgcatttttcagaacatattaacaaaattgtacgaaacgcttatcttagagttttccagattttaagagtcttaaaaaccagggaaataaagactctaacaacagcttataaaacttttgtccgacctcaattagaatacgctaccgaagtgtggaacccaaatttaaaaaaagacattgacaaaattgaacgggttcaaaaatttttcacaagaaaagcatttagaaaatgtggttttttgtacaaaaaatataaggaaagactaaaaatcactgatttacacaaattagaagaaagaagaaaaatcaatgatttaacaacagcttttaaaattataaaagggttcaccagcctcgatgctgaaaaaagtttctttttctcggaaaggcccaggaggcctttacttttgcgagtaaagcgccacacggccaaaactcaaaataattttttcaatagaatagtaaaaagctggaataaccttccagtggtagcggtgcaaattaataaggcaaaggaattcaggggtttactaaaagcaatgagttctgagtaggattttccatgttgccatatttacactatatttttatcacctgtgaatttttaacatttgattgatttatttttattcatttttttttattacgatattcattttgtattttttatttgaccaacttttatttggntgttttcttttttggcaccat

SEQ ID NO: 43358 - DNA, 754 bp, Heterodera glycines
acggtggggtcgattgggcgccgaccagttgggcgccagcctgctttttgaggaacaactcctttcatagttgactgaactgaatgaatttaatatcattcaatagacctagctattctctattagcctgctaaattttcaaaaaatttggttatttttcaaaaaacttatgtacaaaaatattcggaaaaccgaatttgaagttttttgtccataatatttttgaaacttaaccaaatttttcgaaattttctaggctaatacagaactcttaggtctattgaatgatattaaagtcattcagtatcagccgatgatgaaaagatgggcggatcgagggagggtgaatctcattaggacaatgaccaatcgaataccttcgccttctattggacaattccaacttaataaacatatataaagatatactaccgtaccccgtcctgccacaccgcctccgctagaccttattcacaagtgacaggagtcggatggatgggaagccgcggatgccgaaccgattggcaatcgaagtgtgaacagtggcatcgagggcaccaagctgaaaaattataagacaactttttaaattttaccccttttttttttgcttttaaacccaaattttttgctcgaataaaacaatatatttgaatgtcggaaaagaaaaaatgccagctttgttgagcagatttgtcgtccagaagtgaacaattttttgcattttttcattactgaagggattttgctcagc

SEQ ID NO: 43359 - DNA, 1340 bp, Heterodera glycines
  unsure (1)..(1340): unsure at all n locations
aagaaaccgtgaaggaccaantgtcattcaatgcaaaacgaagggcgcgcacaagcggagagtgggcaatgagggcggagagacaaatgcaaatgnagcagcagcaggtggttgggcgtaattagttttnaaaacaaagccccctagactcaattagcgggtaatgattccaattagactaagtcggaacgggggtgttaatgatgtcggttttttgaagtgagattcaacacaaaccccttttcagtatcagcgattaaactgattattttaattgttttagctttgaaacaatattattatttttcttttttaccgtttagaaaaggtcccatttttccaaaattacggtcccgattaattctaattattaataatagcatttttaagggaggaaaagcggttgaaaatgaatcgtcacaatcagcaggaaaagaaaagatcactctgggaaagtaagtaatcctttcaaatttagcgttcaattcgattaacctttggtcggatttgaggctatttgaatgtgcggataaagcggatgaagcagatgaagcggatgaagttaatcgggcacttgaggaggtggaactcgactggcgggagaaggtggacgaaaagagacgccggaaaatggaaaaggacttccgcaggatggagaaggagcgtgcggagcagcagcggaaagcgggcgatgtgcagcctgaacagctgagcggggcggagaagcgcaagctgtacgggccacagtttgacgcggccaaattcagggctgacgtggaggcggaaaagccgtgcgacggggagccgctccaagttgcggagtattaccttttcagggtaagaaaggatactgtagggatcaaatgaatcatttcaagtctttttttatgcttcggttttggcaccggatgcttgtgtttgaccacttgaataaatgatcataatgactagagaacgtaaaaaaaggcaccaaaaatcgcgaaaaggcactgtaataggtacaaaaaaattgaaaaaggcatgaaaatcccgagaaaggcatgaaaaaaggcattaaattttttttttaattaaagatctttagggagcaaaatatgtaaaacttaacaaaaaaatgaattttggtcatttaatactaaatattttaaataattttttcgaataagtttttaaacctaaaatttttaccaacaaaaaattgaaattttggcgatctatttttgagaactttcagttcaaaaaaaaaggcataatacatgaaagtcaacgtagaagcctcaaagcgtttttatgcttaatatatcggaacttatgcgcagaaaaaaggcatatgcctcaaa

SEQ ID NO: 43360 - DNA, 964 bp, Heterodera glycines
tttttttccccaaaaaaattttttaaaccccattttttcccgcgggaaatgttttttttattaattttcgacccggttgaagaagattagactagaaaaaatgaaaattttgaaatcatttttccactcccttctctcaggggtattattttgtaaagtctttttttccccaataaacttgtcaaaccccatttttcgcaccgtgaatgttatttttattgaattctgaaccgttttgagtagattagactagaaaaaattgaaaattttgaaatcatgtttcccactcccttctcccaggggtattattttgtaaagtctttttttccccaataaacttttcataccccatttttcgcaccgtgaatgttatttttattgaattctgaaccgttttgagtagattagactagaaaaaattgaaaattttgaaatcatgtttcccactcccttctcccaggggtattattttgtaaagtctttttttccccaataaacttttcaaaccccatttttcgcaccgtgaatgttatttttattgaattctgaaccgttttgagtagattagactagaaaaaattgaaaattttgaaatcatgtttcccactccctttcccaggggtattattttgtaaagtctttttttccccaataaacttgtcaaaccccatttttcgcaccgtgaatgttatttttattgaattctgaaccgttttgagtagattagactagaaaaaattgaaaattttgaaatcatgtttcccactcccttctcccaggggtattattttgtaaagtctttttttcaaaataaacttttcaaaccccatttttcgcaccgtgaatgttatttttattgaattctgaaccgttttgagtagattagactagaaaacattgaaaattttgaaatcatgtttcccactcccttctcccaggggtattattttgtaaagtctttttt

SEQ ID NO: 43361 - DNA, 1028 bp, Heterodera glycines
gttcctagttttttggaaaattgcgccgcaaaaaaagcggttttgaaaagcaaaaaaatagtcaatttatggaccgttaataatttgattcccgatcaaatttttacagtccgatccatttgaaaagtcttagtcaactcatcagccccttttaatgcatcccgccagcccctaaaaatttatttttcaaaatttcgtgtttttttttgatttttagaaatttttttgaaatttaattaaatttttttcgaatttttcaaaatcccgcaatcccgcgcgggatctcgcaaattttaaatgcgggatttgcgggattaatcccgcgggatcccgtcccgcaaagaattttgagttccagtcccgcagcgggatccgcaaatttgaaatttccggtctctagtaaataatacaaaaaaaagaactaaattaatataaattatgaaatattaatgaatacaaatttcagttggttatgctgatgaatggatttgagacgggtaaattttattttttttattaattgggcataattcccttaattgaggcttattgtccattaacggcgcagttttctgcacttatcctgacttgatttacacatccggatcagttggtttatgtaagaattttttgtgaaattttggtttttttaattaaattcttttttagccctttggtacgcaggtatttaaaaatttaaataataatttctatcccggtggagcttcttgctccaaaattaaaaattttattttaatttttataaaatatataaacttttggcgaaaatccgtatttttctttcattttaggttttttaattcaacaaatcacacaaaaaatgcaaattgaaaactaaaaatattttgttcaaatgtgtgtcccagagaattcccaatttttatgcatttttgacgacttttgattaaaaaaaaattattagaataatttagtggtccttataatgaattatttataattatttttaatatttttcaaagcttaactttccgtttcaaaacaaaaat

SEQ ID NO: 43362 - DNA, 603 bp, Heterodera glycines
acaactcgactgcccgccgtccttgtcgaacaaaatgccgcaatcattgtgaaaagtgccaaataaattcaaatggctaaaaaacggcgaaacaattattaatttcatattcaaatccaaaaaatgattaataccggatttttcagggttttgtccgcgatccgtttttttggaaattgcgggattaatcaagcgcggtagggcggggggggggacaactgcgtctgagacaaatttaacaagccagaacttatttctttgttggtcaaatcaaggaaacttggtatcattcgaaagctcattatgttcaaagatatttgtaagcattttaaagcgaatttggttagctgatagagcttattaaaagcttttgaacgatatgaagtttgtttgatttaccaacaaagataaaaagttgtggctgttatagctagccggcttcgatccggcgggatcccagcagcgaacccacaaccagacatttgaaatgtacaaatttcaagaaaaacaattcgccaaataagtattttttcaaatttagggaaatttcacggtttaccctcagttgggcgcgcacggttgggcgctcacgtttgggcgcgc

SEQ ID NO: 43363 - DNA, 1285 bp, Heterodera glycines
tgctttttatgcctggacgcccttaagaaaaattatggcggtctttcaagccttttaggtcggaccccatttgggtacttttgggggttgcgcgagcgatgccgtcgatgcgtttgatttcaaaattcattgtcgtcgtcgcgctttttcttcagctcttgtggtgtgtcgaaatccaattccttcttccgctttcgctcatatctatctgatggcattgttttgctgaaaatttcccagtcaaatttcctaaattgaaattaattaattgatactttgtgaccaagtaataagcctcaaaatttaattatattcatttgtcagtggtaaatagagaccggcgcgggacgggatcccgcgcgggattttgcgggatcccagtccgcaatcccgcattttttggaaaatgcgggatttgcgggattagtcccgcgggatcccgtcccgcaaaagaaattttgagttccaatcccgcagcgggatccgcaaatttgattttttgtgcgggattatgcgggattttattgatttttttgaaaatttttctaagacagaatgccaaatatttttaaataaattaaataataaatttaattaaagttaactcatttttcatcgcaaatttcattcaaaatttgtgaaattttcccggcggcgcctatcggcaccgccggataggcttttacttaataatcctgtagaaattgagtcaaaaactgcgtcatttggtcaattttagacaaaatctgttaacaatagcattaaatttcataaaatttctcgcagatgtcgataggcaccaggtatggcacggaaagacttccggtttccgacatttttggggtcggaattccgacttccgaaatttttgatgaaaagtcggaaattttttaaatttttttttcaaaaaactagtaagtttgtacaatttctattaataaattgaactgaaatttttaaaaatttcccggcggcgcctatcggcaccatcgaacccctccccaaagttcactaaattttctttggataaagcgcaccgcaaaaaaagggtgtaactgtcccaaaaaaaaaaatccaaaataatataaaattacattaaattattttgaaaagcattaaaaaaattttcaaataaatatagaaatatactaaaaacagtttgaaatcaccttttacatggtttagaattttaaatttgcctattaaatatttaaaatttttttattatattgtatattttttgaaaattttccgatttccgatgtttttggggttggaaatccga

SEQ ID NO: 43364 - DNA, 567 bp, Heterodera glycines
cagtgatcacccatttggacggtgtccctctaaatcccttcgggcccaaagatcagttcttccatcgcttggattctgttctcgttggccactcattcaacgtcactctccactcggccgacttctgttcgcgattggcacgtcaaatgaaaaaccaattaggcaacaaatggcgtcactttgtccacggagaatgaccgaagaaaaactagaagagatggagaataatttttaatttactgttcaaagtctcttcattcatgtacaaaaccaaaatttccattctttttcaaattgccttaatctcctttgaaatatgtctttttctttgctttttacgtcgttaaggtcctataacaaaattgattctcactcagattgtatttgccaaaaacttaaacaaataaaaggtaaatgctttttccattttgaattcttcatcgttttgttttgtccgattttttctcgaccaaatattccatgactctaaatttcgtatcactctccgagtaaaccttgaccggtaaatatggaatcataggccccatactcacaaaaggtcaaaaa

SEQ ID NO: 43365 - DNA, 904 bp, Heterodera glycines
aaacagtttaaagggtcagtaccatccctactgcaccattttaaatgccgcggtcccgtcccacaaatttcacattctttaatttctccctcacaattcgaacaagtaaatcgtgcgctaataaaattcggcttatgaatggtttcttttttcaatgaattttcatccaacattgtatttgtctaaattaaaatatatttattgcccaaatttttaaaattaccgtgcattccaagtcgtatgccactattctataggcggtcatttttttaattttcaatttttgcataaaacataattttttagggtcatgaaacaagcggcattttctacaatgtttttggtctaaaaaaaattatttaagacattttaatgtttataaaacctaccgcaaatatgttctgtatctgtcctaaattctccttgacattttgtacatttttggtatagtatgcatattttctttttatggtactcaaaacaattctcattaaaaaaggttctattacatttatcacagttaaatgttcttctctccgggggacaaggaaacccaaatccttaattaagtattataataaaatttacgctaataaattacctattctacaacattttttacacctttcctcgcattccaagctatgtttttcttctctttgatatgttttttcacagctaatacaatatttatttttaatagggaaaaactgtccaatacttttaattcctaaaaaatttgtttttaccagaaaaataacaaactgaccatcccaatgatttttttcgtgataaatgcaaacattatattttcgaggaccatttcctttaaaaatcggacacaacccgacactttttgaaaatgcaacaattcggaatttccccggattttttgaatcctaaa

SEQ ID NO: 43366 - DNA, 783 bp, Heterodera glycines
cccacgttttggcgccgacgatttggcgcccacgttttggcgccagagtcgttttggcgcccacgttttggcgcgaagccaaaaattaaaaaaggtaaaaatttgatcaaaaattttacaaaaaaagtgaaaaacttttaccttccaatgggtttttcaaattttcaaaaaattcacaaccccctagaattttttttcaaacttcccgattttgactgtgttttatgggtgtagattagagatcaacatgtacctggatccagccctgtatttttcctggatccaagtacaggcacaggccatttttcggcaacctggatttttcctgtacatttattttcctgtacttatgtacagaaaaaaataggtacaggccattttttgaaacaggtacaactacggttttttcaaaatgttgatctctagtgtagatcaacatgaaggagtgctatgatcaacttgctatgaacattttgttggtcaacatgaaaaattgacttagcaagaattttttcaaatttttctcttcgctatgcttcaaaaaatgtcaaaacattttgaatatttttaaactcttaaattttttcggttgaaatttcaagagttagtgattataaacataaccttaacggtatattcaaacatagaaaaaatttaaaaacctgaccctggcgccaaaacgtgggcgccaaaacgaccccgactcagccaatattagtcaaaaaattgcttgaaaaatcgagagcatttgttaaaaaggcagtgccgcgaagagacgatgtg

SEQ ID NO: 43367 - DNA, 1052 bp, Heterodera glycines
  unsure (1)..(1052): unsure at all n locations
gctttttcactattttatgnaaaaatccggggaccatttttatnttaatgccctacaaaatgccaatttnagtgaaaatgtntcatctggatacttgcattgtgtgcagtttttgctttaccatcatatgcaaaagctggtgtggcgtcttgagaacaaatggggcattatttctgatcaaaataatgacaaaaatttggaagcaaaaaataatttattgcaaatttacacggagaaaaaaatgatcgcatgggaacaaatggtgaaaatctatgggaaagagttgaaggatctgacagaggtgaacgaactgattcggaggaaattcgaattttgtctgatcattgagggcgaaacgcgtgagttttttttttttgatgagatttgtcacaaggaatagttttgtcttatgtgccatttatttttcggggtccggacaatccgtcagtggtcaatccgtcagtggacaatccgtcagtgaaggacaatccgtcagtaatggacaatccgtcagtaatggacaatcagtcagtaatggacaatccgtcagtggataattcatcagcaatttttttgagcaataacaaaaatctcgcgaaaatgattgttaaaattaataaaataattttttttatagattcttaacatttctagttctttatacttcaattaatctttattttttaaaaaatgattatttcataattttataaaagaatacaaattattaatcaacatttttagcgacttaaattaattttcagatgtttttaaataaatctggggtgtttaaaaaaattgcttatgaattagttactggactggattgtccactgacggattgtccacttactgatccaatccctgtcgcaattacactgctgcaacgggtaaaaaaaaattaatttaattgcaatttaaatgggttaaatgttacttaattattataaattaattttttccctaatttagcaatgtgttcatccttttctgagatatggagattgctctacggacgaattcaaatgctccaatgggcaatgcatcaatgc

SEQ ID NO: 43368 - DNA, 1349 bp, Heterodera glycines
  unsure (1)..(1349): unsure at all n locations
ccagggccccattttcctatgttcgtgcgacctttttattgccaagtgtcgctcatttctttttgtcttttaaaatatagttttactgaatctctttttttcccttttcctctttttttccccttttcctctccttttccccccccccccncctcagatttcttaagtttgacgtcatgatcccccccncctttgcgcaggtatgcgtggtgctgccacattttctcgtggtgatgttgttggaattggcattgacttcaaatttgatcgtttcgctctttctgctgaggaataataatgatcaattgctaccatttcgataaactcatgactttttttttaccattttgttgccgttatttttatttttttcatttaacaattaaatctgatctcatttcttgttaatatccgctaatttagattgacaaaaaaaaaataaaattaaaaggaaatgattgaaaaaatgctaaagcaagaaaaaattctaaattaattcaaacatatcattttcgaatatttgctttttttgctacttttccattgcattttttattacaaaatcaaaacaaaaaattataaagcccccataaaaatacgcatttcaaaaatatatcagcaggtgatattgagggacttagctgatctgaactgatcattccgtgcctgtgctgctgcttcttctgctgttttgtgctccactccctcctccgatggcattattcgttgattatcgtccgttcctccccctattttcgtcactttctttttccgatggcattggcattattctttgattgtcgtcatcgtcgtcaatcattcccccattttggtcactttcttcgtcctccgttttgctgtgcccaccgtctctctccaggatggctatacggtatcgtttcagcacattcatatggtacttcttcaaatgacttcctcagcgcgttggtcggtttccccggcgaattggtccatcgccggtaggcacaatgccgacattcgatcacatccgggccgaacagataaaactgtgcgtagtcaattctctgaacatcccaaactttattacggtattggaaataagtgccaattttgctaaaaatagccacaattattttaaatcagtattttgactttataatttaattttttttttctttcgattttggccctctctgcataaattttgccaaaaaataaaataaaatatatacccgtgttttgtgcgcatatgatctcaccagagtggccatccgtcgttcgttttttgtccctgttttgcattcttggcagcccgacagaaaagtgataatgctttcgaccgtaatgttggcatactgtaaggaaaa

SEQ ID NO: 43369 - DNA, 1029 bp, Heterodera glycines
aaaaatctctaaaatttggtaattctttagacaaaatctgtgtaatttatgctaaaaggaattgaattgaggcgatacatcgactaaaggaatgtggagccaacacatcattcataaaaattaatttttttgtgagatttttttgagttaattcaaatcaaacccccgcccccgtccccgcgggggcgaaaaaggattaattgtttgaaattactgaagtaaatccgtttgaaaattttcattaatttaatttagctttaacttttagaatcaagcggtgcagagatacgccgccgcaatttttttgtttgttggctaatattttaagatttttgtcgaaaaaataaacctattttgcgtcaaactttaaaattttttagtaaaataatgatatttcgccataaaattttgaatttatttgaacctgggtaaaagtgtcaaattttaaaatttttagtaaaatatttatatttcgagcataaaatttcaaattctatttgaacgtgagtcaatttgtttatgctaaaattacgaaaaaaactaatataaggtaaataaaacggaaaatcaaaaaaataaaagtcaacaaattctttctccaaagtttcatcattaataagagcctgtggctgctgataattgggcaaacacgaaaatgaatcccaaaaacgcaatgatagcgatggcagccacggctgaacgcttttgacgtcggctccccattttcagtcctgaagaaagttgacaaatgggaaaaaattgtacgaaaattcttagacattcatcgcttttatggacggggaaaaagttacggtacaaagttacggtattccttcccattggattaccatttgcatttattacaaacagtgttttacctgctgcacctccttccaatgcatttccatccatggcaaacgttttgaacactcgcaaaatcgtctccgttctcttcatcctggccttttcacctccggcattgcgcttgaacagttctaccagcgattgtgctgcacttttcaccaggga

SEQ ID NO: 43370 - DNA, 494 bp, Heterodera glycines
cgaaatttttgaattttatctttataacttttagatgcttgaaaccctttttcctttttgtaagaataatagagcatgaaaagggctttcgaacgaaccaatatgtttgatttctttgaaactaaaaaaagttatagcttaaaaactggggctggctccgaaacgaccctttccttacaaattattagagtagagcggaccgggacgggaattcccgaccctcggagggtccgggttttgaaaatcgatttcccgatcccgctgggcaaacgggaaccgggaaaaacaagcacaggtaagaatatgggtctgacaaaggagggggggggggccaagtgaatgtggagtttcgggatgaaactttgtgggtgggtagtttgatcccggtttgtaatgtgaattttttaccgtttttgctgaatggacctgtgcgccgatttacgcttccttttataatttgcaaagaaaggagaagcagtgtgagcagcgacggc

SEQ ID NO: 43371 - DNA, 1156 bp, Heterodera glycines
  unsure (1)..(1156): unsure at all n locations
ctttaaaattcacttgaaaatagagtccgcaaatttgaattatgagcttaaacntaattgagttattatattttattaccaaggttaattataattttttttctcaaaattaatgataacaattaaaaccaacaaaattcgaatntaatcgtagaatttttattcagcttttccccttaatttcatataatttttttactcattttttgtgtaatttcttttggcagaacattgaggaattggctatcgaggtgaaaaaaagcaaagacaaaattcgcaaatttttggacgaaaaattgcccaaaggagctacgctgatcgacgaaaagcaatatggggaaattaagaaaatgcgcaaggaattggcagacgcaattgacaaagtggcggaggaggagggaaaggacggaaacaccaaatcatcaaccgtaaatttaccatttccaaaaaacagtggcatttattggacaataaatgctcataatttttactaaaaggcaattccaaatttaaattttattcatcatttcatgtaatatttagtcggggaatttcaaagaatttcattgggtttcaataaatttatagaaagaaaaacttaaatttttatgggttaattttttttaatttttgaaaatagttatatattattaataataaacaggtgacatagcagataataaaacaaaaagcacaaacttagtgaattatttaactctttttttgaacacgcttttttatttttgacataaaaatgtttttcatttttttctgttaatatttcttgaaacaatattttatttaattttaataaataaattattaacttttcagatggacatgattattgagtttaaatatgtggtcaaaatgcaagggaacaaagtgagcccgaacaaagtcagagttcggatcagcagttttggcaaaaaggcaaattgaaaattggaaaactaattatttaaatttatttaaatttgaagtgggacatggacaatgatccttcgcggaatggaactgattcgaatgtggaaccttcggtcatgcccaaatcaaatgacggcactttttaattggaaatggaagaaaatggagaatccgtgaagtgatctgataacacaatanaagatgaatttaatttttataatttacaatt

SEQ ID NO: 43372 - DNA, 1326 bp, Heterodera glycines
tttttaggttttcaaagaatccaataaaatttttttttctgaaaaaaattaaaattgatacgaggatcggatccttagaacaatggatcgttagcctgggatcaccaaaacgatctttatgcatacggatttcgatcacagatttttcgatccacgtatcagtgatccgtggatcatgaaccaatggcttagataataagggcaattgaagaggctatccttgctgcctccagaaatagtgtaattaattaattttttttaaataaagtttcggccacagtttagatagattatgatgatagggttttttccatgatactgatccggtcatgagaccgcaaaaatagggttaaatttaaaaatctgatccagattcaattcccgtatcttgaccccaatttttcaaaatttctgactatttactaagcatgtggccctgtctcgaatggcatttggatgccaatttgagacatttccaaatttgttcaccttttgcgcagttcaataaatgacgcccgacggaccagcacatggttaccgtcctgcttggccagcttttccacttggaacatcacaaattggagctgctcaaagtggcacaccgggaacaggtcgggttgattgacatacaaaatgattgcgtttgggtcgccgaacattttcctgtcgaaataaaattctaaataaattttttgtaaaatattcttttcatcgtccatttttggtcccctcgaatgggaaggacgtgtttgaaaatgaacaaatttttataaaaatatgagaaaaacccaaaaaaaaaattaaaacaattattgctcctttcagttgctctcagatggcaaggacgtccttgaaaacagatgaatcttgagcatttttgttatctgtttagctgtcatcgaaaaatttgaaaataatgttttaagattgtttcacccttttttggcccccttaaatttcaaggacgcccttgaaaatggacaaaaatgtttattaaattgtcttgtttgcccttttatctgtccttgaaattcatctgaaccctgttaacataagtgtgtccagactaatgaatgtgctaattgagtttaatcggttttaaaaattcttttttgcgatttgtttaccaggcttggtaaagggtccgcgcaattcctggccccgggcgattttctggcacaactgccttcgccataattggcaattttttgccgtgcataatctccaccttgtccagcattttacggtggcactttgaaacggcagtagccgccccggggccgccaatttggcccgggttcacttcgacctgacaggtaaaattga

SEQ ID NO: 43373 - DNA, 741 bp, Heterodera glycines
tgacgaatagtgacataattttcagccaaaaaatacgcctaaataatttttattcactgattgcagttgcaaatgagcacgactgggatttttaagaccaaaaaacccaaattagttacctaaaaaaatttttaaaattaaaaatttttgccaagaaagtaaatttttgagaaaattttttttcatttcataggagtatattttgaaaatttttagctcgatttttaggggtgtattttttgaaatttttttaggtcgattcttaggggtgtattttttggttttattgcgtttttgttaaggaattttccaaaaaatgtcgaaatagtgaaaaaatagtgacaaaacgccaaaatagtgatttttaactattttagtgacaaaacccataatagtgatttctagtgacgaaaagtgacgtccaaatgaaaaaattttaatgcagaaatgcgttttttgagctcctttcttcaaaacaatagagcaaaaaaaaagttttttcactaaaagttgcggccctacttattattatccaaattcttaattgaattgtttcctatcttaaacagttctattttttaaattaaatgtattttacgcacaaaaaatcgcgaaataagcacaaaaatatacaaataaaaattttattaacactttttatgtagcaaaacacataaaaatttaaagctttcaattttaaaagaaattattaaatactttttaaaggttttttttccattg

SEQ ID NO: 43374 - DNA, 985 bp, Heterodera glycines
ttactatatacgttatattgacaaggagtttcgttgctaaaaccattttctcccggccgaaggccgggagcgccctgaaagtagtggaagggtcttacaactttttgaggagcatccgggaaaaatataggttttccggtccgagagccaactgagtaccagggactaaattctcacttttgtttgcatttgaaggcccctaactttttttgtaaaactcgaattaaaaagtgcccgctgtgagggcactccgccaaagtgtcctctaaatgctggtattttttaaaattttttttgagcaaacccctggcctgcaaaaaatggcaactgaagcgtgctcaaaaagtacacttcagtaccaggtgaataccgcgccagggtttgatctgagcggggggtggtcagcgaacttattgtagagatttgaaagctcgattttttgaaattttaaaatttcgaaaattttcaaaatttttcgagttaggcctaaaaaacggttttcgggtttttgaattttaggattttttaacgatttttcccagagaaacggagaccacttccaaaacatagtttttcgagctctatcgactggtatttttttcggaaaaatttcgattttttcccggaaatagaaaaaatttttggcctgagcgggacatttgagtcccgggcccataactcgtcaggggtcggttttagacaaaaaatgcattagggcaaaattgtagagtttttaagctctatcgaatggtgtgccatatggccggaaattttcaaaaattttcgagctaggccccctagaaattttcgaaaattttttttgggttgaaaatgggggtcaaaaatatttttctggggtattttgatgtgctgagcacgaatctgatgttaattttcagtttagtaaattttagaattttttaaaaattcaaaaatatttggcaattttttgaccctccaggattttgggttaaaatttgaaaat

SEQ ID NO: 43375 - DNA, 827 bp, Heterodera glycines
  unsure (1)..(827): unsure at all n locations
ccccgaaaacaaaaaaatcgatttttcaagttttcggttggggtactcaacaattatggggacaaaaattccaacgcagaattaaagtacaggctatagggaggctactccggaaggattcggtctccccataaatctgggcgcatcggtcggggggactgccccgaaaacaaaaaaatcgattttttcaagtgtccgtttggggtactcaaacaattatggggagcaaaaatccaacgcagaattaaagtacagactatagggaagctattcccgaaggattcggtctccccataaatctgggcgcatcggttcggggggactgccccgaaaacaaaaaaaatcgattttttcaagtgtccgtttggggtactcaaacaattatggggagcaaaaatccaacgcagaattaaagtacaggctatagggaagctattccggaaggattcggtctccccataaatctgggcgcatcggttcggggggactgccccgaaaacaaaaaaatcgattttttcaagtgtccgtttggggtactcaaacaattatggggagcaaaaatccaacgcagaattaaagtacaggctatagggaagctattccggaaggattcggtctccccataaatctgggcgcatcggttcggggggactgccccgaaaacaaaaaaatcgattttttcaagtgtccgtttggggtactcaaacaattatggggagcaaaaatccaacgcagaattaaagtacaggctatagggaagctattcccgaaggattcggtctccccataaatctgggcgcatcggttcggggggactgccccgnaaa

SEQ ID NO: 43376 - DNA, 1147 bp, Heterodera glycines
  unsure (1)..(1147): unsure at all n locations
tttgagaaaaattgcaataaaaatacaagaaaattgtaaaatacacccctaaaaatcgacttttttcctaattattaacataattttcaaattaaaaaattttttcttcgattgtagaaactaatgaaatctcgaattcattaattcgtcattggatttcgaagttctctgctggaactttcaatttatagaaatgatttatcaaaaaaagacaattttaccccaaacacttcgaaatgtatttgatttgcgttgtatgggctaaaaatgataaagaatgagatttttgggaatttttatgcaaaaacacacttattttttcaatttttaacacatattttagcacatattttggcatttttgggggtttttagcacatatttcagcattttttagcacatattttattacatatttcaggatttttagcacataaaaatccggtctctactcataactgctcagaactgaacaaataattacatctacataaataactgttccacaacatctgccctattatcgagagcacagttctttttttcattggcgaaaacattggcatttaaaatgatatgattatgagaaatgctgaaaaattaattaaatggcgctgtgatggtgttggaaaggttataggcgaagaaatttttattttatttaagaacgaattcagagaaattcccactttaactgtgcgttattactagagaacgaatttatatggataaaaaaaatcagaaaatatgaattataaatatgttccaaaaattcccgaatatggacgaaatatagaaaaaatgctaaaaattggttcaacgtcgaaaaattataagcattatatttttgagattaaaagtgaaaaaacagattaattcactaaaataaaattatataataaaattcaatttagtatctcaaatggttatttaagaaaataatgtttctcatgaaatgttcactttaaatatattttaaatgggaatttttgaaaataaaataaaagtttttgacattttcgaatttgtctgcctttaggagtgagtgtatttcttgaanattttgcgtctttaggaatgatttttttcaattcccttttcaaatttggcatccgccttctccgtccgtcacacagttgaagcatccg

SEQ ID NO: 43377 - DNA, 1157 bp, Heterodera glycines
cgatttatggtgtacaggatgtttgtcgaaacataactcgtcaggcctgtaagatagacctgccattgctattcctgcaaatatggagtctagtcagcccaatcgattgctattcgaatggtttggggtcgttggcccaaacaaaagttgtgctgcttcttgcaaagaagactaagccaactgtaaacagcaagccatccaaatgcttcaatgtaaaaaaaattacatttggatgcaacctttatttttcctcgcctctcttttcgaaaagaaaagctattagcaagcgtatttggaccaattctaaaacaaatcggggtaattaatttaatctgactttataagataaatgggaatttaagcgaaggattcatgcaaaataataatctatagaaattctctaaaaagtagttcctcgcagattcggggaccgtttctataaagctagagacatatgcgctaaccataaaaaagatgaatcattttttgaaaaatttatatagttcgactaaatttgcaaatcgatttatggtgtacaggatgtttgtcgaaacataactcgtcaggcctttaagatagacctgccattgctattcctgcaaatatgcagtctagtcagcccaatcgattgctattcgaatggtttggggtcgttggcccaaacaaaagttgtgctgcttcttgcaaagaagacttagccaactgtaaacagcaagccatccaaatgcttcaatgtaaaaaaaaattacatttggatgcaacctttatttttcctcgcctctcttttcgaaaagaaaagctattagcaagcgtgtttggaccaattctaaaacaaatcggggtaattaatttaatctgactttataagataaatgggaatttaagcgaaggattcatgcaaaataataatctatagaaattctctaaaaagtagttcctcgcagattcggggaccgtttctataaagctagagacatatgcgctaaccataaaaaagatgaatcattttttgaaaaatttatatagttcggctaaatttgctaatcgatttatggtgtacaggatgtttgtcgaaacaaaactcgtcaggcctttaagatagacctgccattgctattcctgcaaatatggagtctagtcagcccaatcgattgcta

SEQ ID NO: 43378 - DNA, 655 bp, Heterodera glycines
  unsure (1)..(655): unsure at all n locations
gtataaaatttctcaaaaaaagagatagccatttttctgggatagagtataaatttaaaaattccctcaaaaataaaaggtctattgcgcaccgccctccctatcatgctcgagagcatttgtaggggtataaaatttctcaaaaaaagagatagccatttttcggggataacctctaaatataaaaatcctctgtgaaataaaatggcgattgtccacacccctccgtctcatccgcaagcccttttgtgaggtataaaatttctcaaaaaaagagatagccatttttctgggataacctctaaatataaaaatcctctgtgaaataaaatggcgattgtgcacagccctccgtctcatacgcaagcgcttttgtgaggtataaaatttctcaaaaaaagagatagccatttttctgggatagagtataaatttaaaaattccctcaaaaataaaaggtcgattgcgcaccgccctccctatcatgctcgagagcatttgtatgtttataaaatttatcaaaaaaagagatagccatttttctgggatagagtataaatttaaaaattccaaggaaaaatacacggtcttttgcgcnccgccctccctatcaaacgcgagagcatttgtatgtgtataaaatttatcaaaanaa

SEQ ID NO: 43379 - DNA, 920 bp, Heterodera glycines
caagaacatttttatttattttttatttctcaaaaaatattacaataataaaaaaaatttttgttagaaaaaatttcttacgttaaaaatttagaacttttaaaattcaatagaatttttaaagaaatataattattttttttgacaatatttttgaaacaaatgaagtctgttagcaaattttcaaattgtttaaaaaaacgtagagagccccgctcctgctactatggacagacatttcttaccatgtatgggtttttcatacagtcaagcagatggtccatctgaaaatggaacaaaaaacgtaaatccactcataaaaaaataagattgttttgtacataatcataggtgttcaatgtgctgtcatcctccaagtccagttttgaaatgtcgtcctgaaaaatggaaattttaaaaaaatctaaaaaatttttttcccatttttggcaaacttgaaaatagttgaacacactcattacggcacagtgcacattttgcggatacaacggcttcaaacaaatgtcgttcagcgtgacgttgtgttgggtggtgccatccgaatccaaaacggtggcgttcaactccaccacttgcttgtacagctcgaaggcggagcggaggaattctctgtgttttttataaataaaaaaaataaagccttgaatttaaataaatttattttccaaaatttgaaattttgacaaatttctttaaaaaacaaaattttttttaaagattactttttgaaaaccggcccaattttcattgttttctgccaatttgctgggtcttcacggtcccaaaaactgtcgttgttcggaacaatgatgagctgctcaatgcgatagaatggacttaaaattaaaaaaaattaatacctaaaaaaatcactttatcttttttttttacccaaaatg

SEQ ID NO: 43380 - DNA, 964 bp, Heterodera glycines
gccgccaaccatgccccgcccgacccatggttacaagcttaacaatcaacttaaatctcaaataaaaataaaaattccgctactagcctacataaaagtttcataattttaactctaatatttttaaaacttaaaaaaatacatttattcaatactagtatgtaatttttaattatgagtgattttgtgtttaaatgatgtaattataataaaaaaatatatattataattaaagtcttaaaataagtataaattctaaattccaaaatagcggaattttaaaaatgaatacataaatatataattaccattaaaattaaattttccatcaaaatttcaatacctttaaaacttttcttttgcctatttattgaatatattatagtgcaaattgtgataggtcagggctgctattcgtccttggatgatgccaaggacgtccttggattagggcctcgtctattggaaatttgaaacagtccttttttccaaggatgtccttgcaaatgagcattcaaaaaaacattcaaaatttacaattatttttttaaaaaactatttttaaacattttctaattttcataaataactttttcattttaacgtcattatctatgcatcattaggaataattatttggacatcactattttttgataatataaaaaggaaaaaataatcacctaagaatgtaacttgcaaaaaatgttcaaatatttggccaaaaagccaaaaatttgttttacaggtttctaaagttaaattcaataagttccgttgaaaaaaatgaaacaaaggaaaaaatcgctttttctttgcaaaaaaaaagttgaaaaacgttttataattaattttaccaaaaaaaaattaatcacaattttcactctttttttgccaattttcgtcacaatctaattaacaaatccctaccccaaagaatacatttgaaaattaatgccaaatc

SEQ ID NO: 43381 - DNA, 155 bp, Heterodera glycines
cgccacctcggcgcacacctgcaccggcgacggtggcggcctggccatgcgtgccggcatcgccatgcaggacatggagttcgtgcagttccacccgaccggcatctacggcgccggctgcctgatcaccgagggtgtccgcggtgaaggcggca

SEQ ID NO: 43382 - DNA, 1022 bp, Heterodera glycines
ttttccgattaaaattaaaaatgaaaaagtgcaagcccaacagatgaccagaaaaattataaaacaaactcaaaaataagacgtcgcctgaagcacaaaatcattgataagtgatacgattgatgaaatgaagtagtaatgggaaaaaagacacatttgagtagcaaaagagaaagaaaaaacgaaattagttgccaattaattaattaggtaattaaaaattaattacgaatgaatatttgccccgtcatatttagtaatacaaaatgccaaattagcaatttttctaaaggacccaaactttttggcattttgcaaatgtaaatagaaaatttgtgaatggctttttgttgctcgcttccgattggaattgactgtcactgcttgcgcttgagctgctgatccgcttgtctgctgctgatcacttccctccgtctctttctctgtccccgcccaattcattcacacattttacatgatcgaacatcgcgatcgcccccctccaccggtgtcctctcgttctctgccattcctctcgtcctctggcagtgttccgccccgctgtgctctcctctccctctccttctctcgtttccgcttgtccttggaggcggaaccgcctgctgcaaaaaatgataaatttgttttaaaattactgtatatgcatgggtttgattttgataatcaaagcaaatagactttttggtcttcaacggaatgttccagatttttttggatcgacaaaatcttgtcttgccccttatgattggtatcatgagaaagcccaagcagaaaaaatgttattaatgcatatttttgtagacaataaaaaatattcttttgaggaaggatgggacacatgcttgctaattgtaagcatctgctcataaatctaaacttagcttgaacataaaatatttgacagcaagtgttaatgagtcataaactctacgcctctcgcgaaatttgtcagcccaaaaatgtcaccgcttttccttccggacggcgtcgatgagctcatt

SEQ ID NO: 43383 - DNA, 1189 bp, Heterodera glycines
  unsure (1)..(1189): unsure at all n locations
tgccatttccgtcatttgtgctattttgtgccaatacctacccccttttttcagcattataaaattattactgctatacataacctatttattaaaaaaataatatttttattttcgcaatattattgcttaatataataaatcgatgaataaaaataaaataataaatttatttttattttcttttattgttgcttttttatttttccatgtaataataaaataattttatacatttatatttttatgaaaattaaaatttttgattttttttatacaaaaatacattagaaaacgttgcttaatcataaaagtttttcctccatccacttttaaatttttgaaaaattccaaaataattagacttattaaaataattattatttacatttggaattggtgagaaaaataaataaattttttaaattaagaggatttaaatcatgaaaaaggtcgtgaccaaaattttgggtatttttaaaattgcattatgccttggcataatgaccatcatcaacactacggttttgtgccaatccaacaccaatccggcgtcccgtgaattgaaaatttttgtggacccacccggggtccattacactgtcagtgcggttgtgataacggtgaaccgtgatggcacaatgccaaatatgcccagacacattttccatggcacaaagacgtggacccaactggacggacgagaaatgttcattttggaaaagacaaaattggatggacgtcgaggagtcgtattcgaatatgggccagaaaatgcgactgaagaagaaatggtatgggttcttcggtatagaataattaaaataaaatttgaaagaaaaattgtaaaagcatcaaaatttatttactacagacaaagagatatagagagacatgcagagagacagagagagggaaatagagttatagcaaagagaaagaaatagtgagagacagaaaacatagagaagagagtgagagagacaaaagaaagagcgagagaaagagagcagagatgagaaagaatagaaagaggggctgatggagtacaacgtgagaaaggggagaaagagaggatgagcgagacagagaaagagagagaaaaactaaggganaccccaaacacanaaaccaaagagagcacccctgaagggagcgagagagacagaggtgagagagacagaagaaa

SEQ ID NO: 43384 - DNA, 752 bp, Heterodera glycines
aaaaaaatcttcgggtttggtcgggatagggattaggacgggatcccgactcgtgatccgtcccgatcgtttttcaaaaatgttcgggattgatcgggattccgtcgggatccctccgaacccagttgtccggtctctaatgtttaatgcagtaaataaaagggaaaataataaaataatttaaatgcattattttttaaatatgattttaatgaaaagcttatgtatattgaaataaaacggctcccgaaaaatgattcagtgagaaagtaattttaaaaaaagcttgcaaattttatttaattttcaatatagatcaaaaaatacataagaatttttaaaatgaaaaaatgaaattctttaactcctcagcagaaagatttatgttttgtttttgaaaacttatgtttttggtaaaactttttaaaatttatcaggctgaagccactgccggaccttttcttcacaatttgtttaagaaataagcatcttagattaaatttttaactgctgtttgttcatattagagtgaagcgggaccgggaattttgggcaaaaccgggaccgggacttgccgggacctgagaagccgggaccgggacctcgatttttgtttgggaccgggaccgggaacggggaccaaccgtgaaattttaaaaattcaaaaaaatttattttaatttatttcaattgaaagtaatacaaaattaaatttttactttgttttttattgaataaattccaaaagtttt

SEQ ID NO: 43385 - DNA, 605 bp, Heterodera glycines
ctccccttctgccgaagtttggattgtttcggcgccccttgacgcgacgccccaagagacatgggaacggctgcagacgaacacacacaatctgagcacaaacagcaaatttaacatccccgacctaaaggtgggggcggacgaaatggaaaaagtgccaaaaagaaatgctaaaataaaactcgaaaactgtgatttttgcttttaggtatattaattaggtttttaaattccattgtttttcttggctttgtccatccctttaggttggcacgcttgaccaactggtgggtctgtcggacgacctggccaagttggacgcagccactgaacagttgggttttccattaaattagacggcggcgtggagactttcgctaggccccaacggggaataagagctgaatagggcatagtttttgtgaaaatttgcacatttgcatttttaaaaaaacttgcccaataacattttgaagaaatttgaatattatattagcaatattaattggcgattttcaggacaacacgaaagttggtccaatacttttcggaggtgctcgaggaggaacgcaacaaattgttggagaatttggtcgtctcgggca

SEQ ID NO: 43386 - DNA, 1112 bp, Heterodera glycines
aaaagagctcctgtcccagaaaagatttgcatgggtggctcagtggtttttgtaaggatagtaagggccaaaggggggggggttcgagttccgttgtgcaaccatgaatatttttcatttatttttgttccaaaatattaaaaaattacgaattttgggaattatttttgaaggtttttgccaaccaaattggataatcttggtatctttcgaaagctcttgatgagtagaagctttttctcagcaaacattaagcaatttgatgggttagaaaaaagatatgattctttgaaattttgttttttgaataagttctcgaatcgacccattttcaaattaacctgacctatcattagatgcagaatttttttctctatcgttatgcaaaatttggtgtaaattgtatgagtagaaaaaaagttatatgtggcgaagtaaattccgtttttctctaataacagagataaataaatagtacgccaaaatgagagatgtttttttctctgcactctctatttattggcacacatctcgttttttgaaacggtgtgttaagcccacgttttttaatagccaaatcaaatttaaacggctatattttttctaattgtcaattgcttagcatttgcttaggaaaagcttaccctcttcaagaggtttgaagataccaagattgtgtggagaggattcgaagcaacgccctttgcacccattatgggtcaagcccagtgttagacaaaattaatcatttcgctaattcaaatttacattgaaacgcagtgttattctacctaaccgttttatttaacagccccactcatttttgaccaccgccccactgagatgaactatcaaaattttgctgaatacaaaggcgtggcaataagaggagcagcggcatgggaaagacttgggcagcacgcctttgtcaatccgtaccaagacttcgcttcaatgtcacacagtaaaggcgatgaaccgcttatggagcgtccctacagcaaaaacaaaacaaatggacgcggaaatggtgtccgtagtttcggtagacagtcaatgatgaggggtaaaaacattgagggaaaaagcgatttgcacgcgattataggtcg

SEQ ID NO: 43387 - DNA, 1058 bp, Heterodera glycines
ctgtcgtcccgtgcctatttttccgttgtgccatcgaatgcttttcatcgacggataaacgacgcgcagcagcacaatttcattcagtgtccaaagcagcagcagcaggcaaaagcagcacgaaggaagcagcagcaaatggccacatcaacggcacttcgcctgagacaggtcggaaagagaagcggaaaagcgaaatgagaattgaagggggacagacggaaaattgaacaagtgcagaaatggttagcacctggtaggataatcaagtcactgatcagagcagagactgatcaacacgataaggtgatcgtagggtaaccagtcatgaattagagcaaaggctgatcagcacttggtaggatgattagtcactgatcagagcaaagactaacctacattgatagattgttgggttgctgattagaatttgactgatcgttgtcaatttcttggtcttcagcctggcccttccgttggtccgtccccgcgtctgtcccctccctcctcctcgtcgaactcctccgtctcctccacccaccgtttcgtgctcaatcggtcggattggcgtggaaaagcgtgtccggacggcgaccttttgcccgcttcttggttcatgcttagttcggaagtgagcattgaccattttgtcctggaatatccgagataagcccccactttaccatcctccattttcccaggatctcttccaattgcatcaaaagcttcagcggcgcatcgaccggcgacgatcgctgaccaaagcgaattttccgtttggcgaagcaaatcggcgacaggcgaacattttacaaaaatgtgccttttttgaggccaaaatgtgttggccttctgctgatcagtgagttcagatcgtcgttttccggccgatgtgctccgccggtcgctgtccgatcaccacatttgttttatggacccgaaaagggacgtggaggcgccgatcactcgcggccccaagaccaactcgtggtccgcctcctcaaaagcgtcgtcaccgtcaacgaatgggccgaagaagcgcgtgtccttctccaccg

SEQ ID NO: 43388 - DNA, 757 bp, Heterodera glycines
attagcttagcgataaatcgaagaccagcatttttgttctcccgagacaagtccagctgaacattgtaacgtctcatgtattcttcagcaaacgtttgcttttgttgctcattttgaattcggtctggaaaaccgctggcctcgacctgaaatgtgctctttccaattagaatttcgcctttttacattcacttttaatttaaccataagccgaacatattccttgaaaacttggtcactccttaatcgggaaataattaattgaaacaacaaaatacactgaccattgttcataatgccatgccctccagaatctatccacccggtagccacactccagagcccgtgctagctcaatatgtgtgtaggtgccacagtaggcacgctgtaggtccgtatgctcacaattgtgaggcattcttgtgccaagatgacgaaatttgctagcacatcggtgacaacaactgaacaacagccgctcgtccaatttcattggtagaactggtatgcgaagcctgcgtggcggaatcacacggacacgatacagtccacgatagatcaaatcgttggacgaattcctattaccatttcacacttagaccatataagacgcctccttactacacttaccagtccaccattatttgttcaacggacgatgtataatttttggtatcccaatgggataatcagtgtcataattcacctgtcagagagttaagagcataaaaatcaattttcccctcttacccagggg

SEQ ID NO: 43389 - DNA, 785 bp, Heterodera glycines
ttcaatcataattaagaaacataaaatttaaaattgtctcttctaactgaaggaatgaagatcctagtaggtggaaaagctaatgtggctctaggacaggggtgtgaccaaacaatttttaaaataaagaacatcaatgacaaaataaggtttagggtaaaaaaagacaatcttgcaaaattggttcgaatcagttaatatataattttttcgataaaaaatgtattaaaatgttatgtttttcacatcctatttggattttaacaatttttggggaagaaattagcaactgctgaaaaaaaaagattttcaacgttttttttgcagtgtatttttttacaagttgatgaatgggaagtgggtccggcggcgccgataggcgacgccgggaaaatttttgaaaatttgagtgctattttatagcagattttcaattaaaatcggtaaaaacatgattaaaaaaacggtaaaataaagtgcggtcatgcgggatcgaacattaatgcacagcacaaagcaaacctgctgttttcaccactaaactaaaatacttaaataataaaacttattatttctttccaaaaaagtgaaaagttattgcaaaaaacattcgaatgatattaaattcataaattcattcaatttgggcaactatgaaatgagttataccccaaaaaccgggctggcgcccagtcgaccttaccagcaaggaaaatctaaaattttcagcaaaaatactaatttttccttaaaaatttcgggtgcgtaggggcccttgggggggg

SEQ ID NO: 43390 - DNA, 1190 bp, Heterodera glycines
attgtgggaagcaaaaatagtacggcttttaggcatttattattttggtcaactgagagaaaaaattttcggtaaaattttatttttatcaaattctttatgcaaagttagcatttaaataaatagagaactatttaatttcttgtgccgagaaaagtctgaaaaagacaatgaaaatgagtaataaaatagaacataaattgaaatttcagaaatttagttaatccgctataaatttccctttaaagagcatatattcacattatgtctttgaatttaaaacttttttaaatggtctagaaaatggaatactagcatgttgaatactgcagaaatgttaggccctcgacgaaaaacaatgaaacttttagccaagcattaaatgtctatttgactaagggtggaaattataaattacccaggaactacagtgaggtaaagtccgtatctttcagttggatgtgcataacgaaaataaatgcggaagtcaaaataaagacactgtgttttgtttctaattctgaaaatagggcatcaatggcccatgatattcattaataaactttagcgatattttaaaatttctcaattatattgcccaattttataaatttgtttcattttggtcgggttattgtgggaagcaaaaatagtacgtcttttagacatttattatcttggtcgcatgagagtaaaaatttcagataaaattttatttatatcaaattcttcaaacaaagttagcactattctctgtataaatcttcataagtgcggtggaggtgaaacatttggtaacgtcaaagttcagtacttataaaatagaacatgagttgaaaattcattctttacgcctggttcaatccctattcagacattagattattttcaattttctttttgtattctggagggtttcctataaagaaaatatgattcctcatagttttataggaaagtgatacatattttatcattttttaaatgaaaatcctgccaattgagcttaataatcgcaaaaaccaaccttttttttgtcgaaaatctgttaacaaattgcacccaaatttttaaaatttccctcggcggcgcctatcggcaccgccggaccccttctttcccaaaagttttttgaaaaagcgctccgaaaaaaagtgatgtgaaaatcaaatctgaatttctattaatat

SEQ ID NO: 43391 - DNA, 1485 bp, Heterodera glycines
  unsure (1)..(1485): unsure at all n locations
ttagaagcagagtatttttttacctcggcaacaagtaatgttttatttattttttatactttttataattagatctgctctaatgcaatttttaccaccatgaccaaaaaaatagaatattctataaaaagttgttctcttttcaaatcctttattatctttttttttatcttctttttttttgttttgaattaggttttaaattaggattaatattaattttttttgatctacctgcttctaacactcttcgataaccatgaccataaccataacctgaatatcttggaactgaagaaaaaaaatacctaggaaacctgccattacacaaataataaactattaaaaatataatcgatgtaacaattgtaacaagaataaaaactataatttctttttttatctctccccaaaaatcacttcaaaaagatctagatgtttaacataacctgtcatatgctctattttccattattagataaattattatttaatatattttttaaattttttctataaaaaattatttatttatcacagatattactcaaaaatttaatttttttttaacaaaaaagttttatatgttcaatatatttttgtttttctaactctataataaaagaagtcttcttaaataaaaagttaatctctttttttatattaatttgataatttaaaataaaatctaataatttttcaatttctgtcataacatccttttcgttagattctataacaaatacatttttttcttttttatatataagatcagcaaaaataacactttcattttatctcataaactggttcataatcaatactttttatatttttttctctttctatctgttttaattttattatatctatttctatcttttcgctttcatatttcataacatcttattgtttacaaatagcttatttttaataatttatacatcagtagttatgagtacatttttttgccctaaaattgccccaaccccgcacaccccaccatgaacccgcgaatcatcgagagaaaatccccacagagctggtgaaaaaagttgttaaaaaaggtgaaaaaacacggtgaaaagaggtgaaaaaacgcagggataaaggtgaaatttaatggttaaaaactatgggggggggttattgacagccatacgtgcaagggtataagggtgccccgcttcataccaccacctaaacccatatcctggttcacccctttttcatgtaattgattataaataaatttgctaatcttttcgttatttgtgaaaataattaaacaacttttaatcaattctttggtccccctttttccaattttccatttttttgctagctgcccccccctcctccgctgccgcccgcccattatctctgattttgatctcgaaaanatactttcaaatccgcatttatttttcgtcatcaaagtgttccgtgggcgtagtggttatgcgctcggttcgctctctcagt

SEQ ID NO: 43392 - DNA, 1044 bp, Heterodera glycines
  unsure (1)..(1044): unsure at all n locations
tttttctatccttgtggactgagtcggcccttgaaattatatagcagtgaacccaatacttccttggaattttccagtacgggtttgtccgtgaaaatttgaaaaatatttccaaaaatcccattttcttttttctatccttgtggactgagtcggcccttgaaattatatatcagggaacncaatactttcttggaattttccagaacgggtttgtccgtgaaaatttgaaaaatatttccaaaatccctatttcttttttctatccttgtggactgagtcggcccttgaaattatatatcagggaacccaatacttccttggaattttccagtacgggtttgtccgtgaaaatttgaaaaatatttccaaaatccctatttcttttttctatccttgtggactgagtcggcccttgaaattatatagcagtgaacccaatacttccttggaattttccagtacgggtttgtccgtgaaaatttgaaaaatatttccaaaaatctcaatttcttttttctatccttgtgggctgagtcggcccttgaaattatatatcagggaacccaatacttccttggaattttccagtacgggtttgtccgtgaaaatttgaaaaatatttccaaaaatccctatttcttttttctatccttgtggactgagtcggcccttgaaattatatagcagtgaacccaatacttcattggaattttccagtacggggttgtccgtgaaaatttgaaaaatatttccaaaatccctatttcttttttctatccttgtggactgagtcggcccttgaaattatatatcagtgaactcaatactttcttggaattttccagtacggggttgtccgtgaanatttgaaaaatatttccaaaatccctatttcttttttctatccttgtggactgagtcggcccctgaaattatatatcagggaacccaacacttttcttggaatttccagtacgggtttgtccgtgaaaaatttgaaaaatattttcaaatccctatttcttttttctatccttgtgg

SEQ ID NO: 43393 - DNA, 778 bp, Heterodera glycines
agggagggaagagcaaatggggggagaagccatggagaagggggcagggaagagcgtccctgctgctggaggggaaaaagttgaaatgggatttcatttgcagaaaatcgaagcaatcgaacgcaagttagccgaaacaaaaagtgaattggaacaaagcaacgtggcgatgcaacggcacatttggctggccgaaaacggcacgagcgttgagcaagccgaatacgcactgcagcagttggaagtgcggaacattaaatgctcaatagccaatattatggcctttccaacagagacagcgaagtgagtgcactcagcaaattgcgcatttgaaaaaggaattggccaatttggccgaacgcacggatttggcggaacagacgcgaatgtggcagaaccttttggagatattcgaactcaaattgcagctgaaaaggaacgcaaataagtaaaaatagcatgggaaacaaacgacaaataaagaaagacatgggaagaaaaaaggaaaagcgttttaggggggacgagccgaagccatggggcgaccgacgagccttttgatggacagcggagaatggtgttgtcaatccagaatttgaattttattacccataaacaatcacgaaacaaacaccaaaaatgcatcaattactgtaggtacaaaaaagtagcgacaattacggtacatacaatggtattaaaaatgttaaacgtagcctacggcactttctctcatcggcacgttacttcgtcatcactttgaatggcgatccattca

SEQ ID NO: 43394 - DNA, 1108 bp, Heterodera glycines
atatttctttgcattttgggcgtcgtttattccccgctgctacttttttcttcggtttaattacccaagtttgaggtgctgggggtgtcctgcccctaatatcgggggcaggaaataaattttgggaactgcgctgcctaacggcgggtgcttaaagggcgctaaaaatgatcaaatgattatcaatttttatttttcttaattccaaaatgattcgaaacgcaaaaatttaatcataattcatgtggtaaaaatgcatttaaaaataaaaaaattattgaatttgcttctgaattttttaattttaaatagaaaattactttttcgaaaattttgcacaaataagaggcggagaaattcaacgaaatttttattaggattttgatttaaaatgttgagaggtttaacaaatttgtacactgaatgttggatcgtcaacaccaatgagaaatgactaacagaaaagagggagaaaagggcgttggcttaggaaaatagcttataataaaggagagacgagcagacgatgagtgagagaaaaatagtggtaaaaatggtaaactgctgcattggcagagtcagagaggggtcacaaagagttcgcacagcatcgaatatttccttcattttaggcgtcattcttccccactgcacttctttcttcggtttaattacccaagtttgaggtacttggcgtgtcctgcccataatatctgtggcatggaataaattttggaactgcgctgcctaacggcggtgcttaaagtgccctaaaaatgatcaaatgattatcaatttttatttttcttaattccaaaatgaattcgaaacgcaaaaatttaatcataattcatctggtaaaaatgcatttaaaaataaaaaaattattgaatttgcttctgaattttttaattttaaatagaaaattactttttcgaaaattttgcacaaataagaggcgaagaaattcaacgaaatttttattaggattttgatttaaaatgttgagaggtttaacaaatttgtacagtgaatgttggatcgtcaacaccaatgagaaatgactaaaaggaaagagggagaaaagggcgttggcttaggaaaatag

SEQ ID NO: 43395 - DNA, 1461 bp, Heterodera glycines
gccattaaaatgatttgcggattagttgctcatccccgtccaatttatcaccattttgcctttatgtgatctgtctgatcagtgctggcgcgtgcgcacattcatttgctcgtttcgaccgattgtcattttgatcagtctgatcactgctctgctgtccactgttcatataatcaataccgtactccaaaccgtaccccacactcaccccttcccaccatcacacatttgctgatcaccgccaccactttttgctcaccgacatcccccgccgccctctgatcacacatttatcagaatgtttttgttgtaccatttcttactgtcaccatgataataataataatgtgttgattaaatgctgtctgattggttggttagtcggtgtaataaaatttggaaattgagacatggtggtgataatttggcccacacagggggtagataatcagatcagccatagttttgactaagcctaaacctaagcctaggcccaagcaagcgtaagcttaatcctaagcttaggccttgcctaactaatcccgtgtctgagttgcctttggcatctttcgtcattcgaaataaattttaaaatattacaaaaaaaaattattttgaagggtgtatttttcaatttccttgtattattcttatagattttctcaaaaatgccaaaatatgtgctaaaacacaaaatatgtgtttttgtgtttttataagtcgctctaattcgaaaattgttcggagcaaatgctatttttgggcttctctcgtcataactaagccgcagaaaaaatatgtaaaaacataaaaatccggtctctatttattaaacttactacacttataatcccgccccctcccccataaatttgaacaaccaaatttatttcctaaaaattcgtgtgatccctgaacaataatgataatgagtgcatgtgcgacaccaattagttctgttactgcttcaacaatttatttctctaaatttgccaacatttttttctcaacggaattggccaactgtgtcaaatcagtccccgttttttcaactgattttccattttttttatcagcttctgacgcttttttgttctgtgatgacggcgagggccctggagaatttaaattttcaaatattggcaaaatgtaaaaacggtgccacccggagattgcgccggatgaaatcgtccaccatttggtggaccccgtcacaattgtacagcatgttgatcatcagaaagtccatctcggacacgtgtcgatgggtgccaaaagtgtacttaatttgtaaaaaataaattttagcatttctgacttaattattttgggagataatttttaggatataaaaagcgtttacatacctatttaattttatttcatataaattattttcctctactagtggggacctaaatatctcaaaataggacccccaaatacgatattgcgtttgaa

SEQ ID NO: 43396 - DNA, 1305 bp, Heterodera glycines
  unsure (1)..(1305): unsure at all n locations
tgtcccccgcaaaattaagaaacggacgcaaggcgccgtctgaggccgcgacgcggccgaatgcacttgctcatcacttaacaaacgcgcatgcactagcaacgaagtcctttgcgcgaagcgctcatgtcagcgcccgcccatatataccaaaagtatactgtctacaccgagcaattactgcgccacacgctagtttatattaccatagagaaaaagggggtttcgtcttaaaaactaatttgagtcgaacggctgtcgggaggggtctgaaagtggtggaagggtcttacaactttttgaggcgcatctgggaaaactataggttttccgctccggtggccaactgagtcccggcggctaatttctcacttttgcttgcgtttgaaggcccgtaactttttttctaaaactctgatcaaaaaatgcttgctggtaggaaactaagttgaagtgttttctaattttcaaaaaaaattccaggcctctacctatacttggaagggctgcagaaattggcaacttttcagtaccaactttgcccagttcagtccccgttgaataactcattaggctttgacctgagcgcagggtggccagcagacttattgtagagctcggtgagctcgatttttccaaattttaaaatttcgaaaattttcaaaatttttcgagctaggcctaaaaaacgattttttcgtttttgaatttnaagatttttnaacgatttttcccagaaaaacgaagaccacttccaacacatagttttttgagctctatcgactggtaattttttcggaaaaatttcgatttttttccggaaatagaaaaattttttggcctcagcgggacatttgagtcccgggcccataactcgtcaggggtcggttttagacaaaaattgccttagagccaaattgtagagctttttaaactctatcgaatgttgtacaatctgttcggaaattttcaaaaattttcgagctaggccccctagaaattttcagaaattttttttgggtttaaaaagagggtgaaaaatatttttctggggtaaattagggtcctgagcacaaatatgatgtttattttaagtttcagattttttggaattttttaaaaattcaaaaatatttttcaatttttcggccctcgggattttgggcgaatatttgaaaattcatagctcacttcactgtgggactattttaatgaaataaagctttaaaaatggagaaaaatatggagaattttatgggatttatttgaaatttatatctcaaaaaagaaaaaagttattccaga

SEQ ID NO: 43397 - DNA, 1134 bp, Heterodera glycines
  unsure (1)..(1134): unsure at all n locations
aaagacccggatttcattttgatcattttttgatattttttaatgatttttgctttctcttcattggtataattttgccattcttaaatntaaaagtgtttaaaaaatttaaaatagaattacttgatttgccaaaagcctttctccatcggataattgttgatcgttcaacgcccaattctttagcaatttcacgttctttttcataagttgatgattccgatttacggttacattcactcttctttttttcaaattcttttaaaatccttagtttttcttcttttgtataaaatttgttcttctcttaatttaaattttgtaatgttttttaattttaaaatatttttaattgaataattaattaatttactacttccttttatcccaaatttctttctccattcataaattgcgcgaactttcactcccaactcttccgcaatttcactctcaattactgtactcggctttaagttcttttttcttgtccgttcttctttcattttatcaaattttattaggatttttttacgctgttcatcagtcaaattttttggttttttgcctaaattttaaaatattccaaaaaacattaattaggtatttgtgatttacttagtccatatttaaatttccaatgttttatttgatgcattgtgactcctaatttgtttacaatttgttctgctgttatttttttcgagaaatttccattgtcaatgcgttctctaattagcataaactttttcacaatttttattttttcttcgtctgataattctctgcctaaaaggttataatatttaaaattaaaaacctaattatattgcttaattttcaacattagcattaaaaatcaaataaaatattcgtagacacatgttgactcttttgtctccataccaaaattcgcacgtttctttccatatttttgacggtttcgtagcgcatcatttggcataatgtcatcattatgttcatcttcttcagatccgttgctcatttcataatccgaattttctgaattcccttcataactttgtttgttgtcatcatactcataatcatcattatcatcatcagcattatcatcatctgtactatcattttctgctttttttttggaaatgt

SEQ ID NO: 43398 - DNA, 1707 bp, Heterodera glycines
aaaaaagcaacatcagcatatgctaacggcgacattgccattcgagcaaagaagaccaatggttcgacgcactgcggcagctcattttccatttgcaggtgaagaaaagcaaaacgaacgcgaggcaaaatgaggcgaagcggaaaagcgtcgcttaattaaggaacggcgcgtttggatgcccgaatttccgccggaatgccctctcgacgatctgttgctattcccaattcagcagcccggggagaccccgacaagcgattcgagtgaatttttaacgatctcatttaactaatacaaatgctaattaagcgggcgattatggcgcattcgaagcggggccatcgaatgatggccaaacgatgccggcggaaacagccgctgcaaacaatcattttgtgctaatggggcagcccaagggcgaagggagcccctttctggtgccaaacccaatgtacacgctcaacttgaagcaacaacacttcggcggagtgcctttgcccgtccatcaccagcaccaaatgagcttatctgttggatctgcggaggtgtgcccattctgactaattagtgcactaacccccactctcattgtcagtccgccgctgatcaccaccagtgccgtccaagacaacagtcgttgtactgctccaactcctcgcgacagtccgagcctccaccccagcaaagtgcagcagaacaacagcaacaacaacaacacctttacgctgcccaacaacagcaaatgcgcacttctccgatggaagtgaaaagccaattgttggcacaattggccaacgaattgggaagcccaacggagcaacgcaattaggggaaatacagcagaaacagtcgaaaacaatcactgcttttgttgtttcacttcaattattggcttcgcccatcaaattaccttcaaattaatgactcatcaaaattaaaagaataaaaaggaattcaatcagtaaaaaatattttttatatcataaaattttcaaatacggataaaaactaacagagaaagaggatcataaaacgtaaatttattttatttttcaaatttaaaaaatattcattaaaaatgaagagttttaatataaggctaatatgttggtcctcattgtcagcagttctcttcctgtcgctgtgctttgtactatcatttccttatcaaatgcctcccccaatttcctctcacagcccaaaatatgagaaaaacgagttgcacacacagaacaaaccgccgaatgctgttgaggtggggggggggggagggaatggcgcatcgattggtgcgattaatggggaaaatgaagcgaagcaaatttggcgcgttgggagtcggcgggggctgctgattgaagaagtgccaaaacttgagactgaggggctaaaaggatcaaatggaagaaaatcttatttaaattttaaaaaatccattaaatgcctaaaaaggcgaccgacccgttgccacggtcgaatgcggccaatggcatcggcggtgaacaccgacgaagtcacgaaattgccttccgccgggaactgagcacggaaaacatttctcactgccgaacatccgacgccgcatcagtcgccgctctcttctccgaatgggccaaaacagcacgaacatgggccaaagaagaaataaacacaaaaaggacgaacaaaaccagcaaaatgatcccccaatgataagggggggac

SEQ ID NO: 43399 - DNA, 989 bp, Heterodera glycines
ccatacattttccgttgttggactcctttcgcaaccaattcgacatcttaaccgatttagaagccagcaaagaatcatcgaacactttggccttgcagaaaattttgaactcaatgaccgaattctcagtgacattcagagtgaatgactcgtcccaatgcggggaattcgttttcttcttaacactcgttttcttcgcttggtcctccttcgagtcaacaatgatttcaacgtaagcatcaggtgccttactcaaaaaaccaccactgttgagtttagcagaagttacttaattttgagatttatttttaaaaccttacaaatgaaaaatgcctgttgtttgaagagcaaaggatcgaaccgatgcattaccatttgttgatccgttgagaactgctgatgaatcgtcaatagatgccatcaaaattaaatgttttatgaatgtctcttatacaccaatcctaggggtaaaaaagcaataaccaatcaattgattagttaaagatttgcagtaatgccgagtctaatgatattaaacggggtgtgataagaaaatacacaccaacaaccatcaaagaacattgaaatcttttacaaatgaagaccttttcaaaggtggaaaatacaaattggataaataatcatttctttgtgttgtgcaggtgagtggaaaccagttgcatcgcataccgctcactcgccttccattcgacactagtgattgtcgacagaatttttttattgctcaaaggcatctttcaactaattaatcaattaattgatgcgttatgagtacaatttattggttctaggtatattaaaactacctaatctagagaacaaagaattcaaacacgaataccggcggcccggtacttaggtaaacataccatacacgaagattttttattctgatccaaactttaactcgccaaactgtgaatgaattaggcactggaaaattgagagaaaatggaaaacgaaagaga

SEQ ID NO: 43400 - DNA, 937 bp, Heterodera glycines
ccccccgcccctttgacagcggaatcgaatctcattttggtttatttttgttggtctttccttcttaacgggcagggacgccgctcgtaattgggtgggatgtgatatttgacctcgtttttaatttaaataattaatttgtggcattttgtctatttaattttgttccccttctaaatttttttgttttctcagtgcttttctcatattatattttggcttcaaaatgatggtaattttattctcatcgctctccccgacttttgatttttattgaattaaatttgttctgttttgtgctgtggactttaatttgtgttggagatacacttttggttttaattgtttgagtttttactcagaattataagaatctattttttttttttgcaatttgtgttttcattataagtttgtgttttcattatatgatttaatttaattagtaaaatattgaataatttacgcttcatctattcataaattagaaaagttctctttctaaattaaatagcataaatgaatataatttaataaaatttttgattatgagcaaaatttagaacaaattcattaaattaataatgaattgcatttaatttttaccatttaattgagaagtaaatattttgtaatttttataattaatgataatgaacctattaacctgagcaagtttatttaattaattaaaaaaatctgataattatattgtaagaaacgtcaactctaataacatatcaatcaaataatgaatagcataattcactccgtgtaattttgctttacaagtattcaacagttatcattagggatcggattcttagtttttaaactattttttctgcggttttatttcgacgagaaatgcacgaaaaacacattctttttcgaaaaaatgcgtttttagtgccactattcatcactaggaatcact

SEQ ID NO: 43401 - DNA, 82 bp, Heterodera glycines
caggcccacgtccgccagcagcttgaccagcgtttcccgcgtcggtggcgtcttcaggtactcaatgaccgtgggttcctcg

SEQ ID NO: 43402 - DNA, 897 bp, Heterodera glycines
tatcattcgcttccggcgccccgcccgaccgttcgtccgactcgcggcgaccgtccgccgtctcttccttctgctctcaatcgggcacttctgctggtcgcttctgttcgtcctccgcttcttctctctgttctgctgcttcacaatccgctgactcttttgactccaacgaaagtgacaaaaaaagcaatgaaatcgttaacagcggaacaataaataaccaaaacgaccggcacaatcactgccagcggaagccatgggacagtaatgaaaggacaaatgacagtatccccggcaatgggagaggaaacggtagcaaaacaacaaaaataatagaccgaataatgacattttttaattaattagtttaactatgaaaagaatagaaaaatttaatgtgtgattgcctgaaaaacagaaaatttccaattctcacaaattcaacgatttccagacatgggaggccaagcagtaacagaacgagcgggagatgaacaacacaagcggacggactggcggagaaatggcggacgaataaaagcggggggagacggagaaggggcggaggagggggaggaggacgaagtgatattcctttgaagttggcatttgtttggcgttttgtctctcttatttcaattaacaccgatttgtttttgttctcttctctgtgatttttccattttcgccgccctttttttctctcgccagtgccgtctctctctctctctctctctatttctctctctctctctatttttctttctctctctctatttttctgtctctctctctatttttctgattgctctctctctctccatttatctttttctctctctcttcctattgcccttcccttacctttttcctctatcgttgacctcctctttttct

SEQ ID NO: 43403 - DNA, 671 bp, Heterodera glycines
tctaacagaaattcgaaacaaatttaattacttatataaaatacaggcaaaaataggtgtgaactggaaattgggtctataaatgatggaaagccctaaattaaggtggctaaagccgagacaaattccccaaaaaaattcattttgcaacattttcggcggattgttgatggattggatggatgaatgaatggcttggatgacagaaggaaaatttgttgggatggcccatcgcttaatcctccttaaaaatgcggggacggggggggcgacaaaaagtccccgcccattatgtaatacaatcccaattgaaaatgatagtagccctaatgggctgagctgatctgatcagaccagcggagcgatgggtgagtgagtggagtgatctttgtgctttttcttgccgctgcttctcctaatattggcccatcacaacacagagaacagagtggcgaaaagtggggctgctctctgccaaaactgatcaatcaatcattctcacctctctgatcagttgtgacacaaattgtttggcgccgagatgggagcgatgagggaaattaagcgccaccacctttcagtctcaggtctcggtcacagcagtggttttacgttcacccaaaaaaattttttggccagaaatttgaaatgcattttggaggggggggggg

SEQ ID NO: 43404 - DNA, 1139 bp, Heterodera glycines
agctgagagagacttccaacgaaggccaatcgtactacgaggagcaaaaaaagaggaccgacgggatccgagtcggttcatcagtttagggcagaaaaagcatggacgaacctcacatctggcataaaaaaatagttgcagggttttgttttagggaaaaaaaagttttcctgaagagatgatgaaaaaattaaaaattcaaacaatttctttttgaatatcacaccgttttaaacaactttggcatttttcccccggctttaccacattttttgtaggcaaattagtgacgaaatatcaataccatacaattttttcagaaattgttggagttttaccgcaaagagcgcgacatgttcacagagggactggagaaggcttccgtcaacgtggaggagttcaaatttccgaccgaaaatgttgaacaaatttttgacggacttttcgcattggaaatcaccggcaaacaaatgaaggccaattacgaaactacgaaggaggcgcagcgagagcatcagaagcaatccaatgccgaagcaatgcgcgcacaaaatttggtcaaggcaaagccaacaaaatgccaaagtggtgggttgacgagagtctcgaagcccgggtttttagtgtgcccgatgccgttccacccggaataaaagccgagaatttttgaattttaattgctttcatcatttagcgtccaaccaaaaagcgattcagtgctatttggacgaaatgactgagaaaggccaacaacagctgggccagggttggaaagcggacggaagtgccgagtgggtggataaaataaaatttgcgaaatatttttattgttttttccaggacatcgtccaatgttgacatgactgatggaggaaaagcgaaggtgagaaaaagggggcattggtaaattaaaatgcaaatggcacagagaatgtgtgccgtaagaaatcggaaaacggactcaaagaattccttaacttaaaactagggtaggtcgggactgggaattttgggcaaaaaccgggaccgagacttttcgagttggaaaaccgggactttttggctgggaaaaatcggaaaaaacccgggaattccccggtcaaaagcggggaattcggtactcagttgtccgtgttttg

SEQ ID NO: 43405 - DNA, 977 bp, Heterodera glycines
cccacccgtctgttccctgtccactgtttgttgttcaactccaataccaagtccccagttgcgtccttctcagcatgaaaatattcgctgatgtcttcgctcgaaggcacttctggcaatggcattagttcacaacccccaattgtgccattgtttcctgcgtctgaatcgcgcgcttttcccaaagtgaagcgactgccgggcgaagcggactcggaaatggacaaattctaaatcaaaaatttaaaaattatgtaatgttattgttgcaatgaccagttgatcggtgccaaagatcggcgcgttgtcattcacatccaaaatttcaacagtcagctgaaagagtcggaaggattgtgccaaaggcaacgacggcgccgaaggcgatgccattcgtttggtgacagccaatcgcgacacaaaaacaaactccaaaaaactttgctcatttttagcatcaattgggagagattctcgatcaattctctcggaagtgaacaaatcgccagacgaagcattaagcgaaacgagcgaagaataagccgaaggggagagatgccacggggaaaaggagggcggcagagaaggcagacggaggacggaggaaccgaaagggcactctgaggggaagaagggagggaggggtggccaaattggaccaaactgcgggaagaaaatgtacacggactgaccaaccttcgaccaattggacgtgcagagactgctcggaatagggggaggaagaagcggaggaagagaaggaagaagagagacaaaggaagaggaagaaggagaagaagaagagaaacatccgacgaaaaagggagggtcacataggcaggcgaagttggtggaagatgaagaataatgtgatgaatgaattaagtgctttgagtccgatgaactgttttgtcgaccgacggcgaagagtcagccgacgattcgctgatttctgtcagagattagcgctgttttgg

SEQ ID NO: 43406 - DNA, 1446 bp, Heterodera glycines
  unsure (1)..(1446): unsure at all n locations
tgaggcacaaaaatanaggggaaaaccctaaagttcaaatcatatttcaggggctattgatgtgattgttgtggaacaacctgacggctcattggcctccactccatttcatgttcggttcggaaagtacggcgtgttcaactacgagaacaaagtcaatatttatagactaaaaaaaacatatacttacgcatttttcagtacgtcgacattgaaatcaacggggaagagattgacctgaaaatgaaattgggagagaacggagtcgcctttttcttggcaaatgacgaagagggaattggcgagacaaaaaacgcggagggaaaggtaaattgaaaaacttattttaaattggctaatgctttcgagaattaaattgctttttttggggagggggagggggtgaaaatggaaattcgaattttggcatgtttagaaaaagcaaactgttagtattttaagccataaaatcatcttttaggagtttttgagagaatcgcaaaacaaaaagtggagcgaagacacacaacagaacaatcggccgtcagcaattgacctggaaaaccaacggaaatgctcttttgcgagcagtagcagcagcaccagcagttgcacttcccaaccgcagcacaatgaatgcccaccaacggcgacgacaacagccgaaagaaagtgcgctttaaaacaatggaaaatggattaagttcacaaaagtaaaaacagcttataagaagcgtccggcggtgccggcgatttctgccggaatttctatggcttcagaatttgcaggcaatccgacgccgccaaagcggtcaaaaatgttcaatccgtcctttctcaaccacaaggcgtccgtccaacagaaccgtcagcgactgcctttttcgtcgtccatttattcgtgccgaaggaatcgctctttgcccgatttggccaatttgttgtcgccttcgtcgaacatctacgactctgaaactgttgctgaagaggaggggatgggccgacggaagggcacaatgagcagccgaatggacgagttgagaaagtcggacgggacgccggaggtcaacaacgccctgaagcattccaattccgcatcggtgccgttgaagagttattatgtgagtgagagggggacggactgaattcgaaacgcggcatttttgttttagaaacacgagtcagcaaaaactacccaattctcctcccctgacagtgacaagggacgggcagagggagaaaagggacagcgggcagaggacgacgagtcgaagagttgtgccccgtcgaccagcgaattggcggacggcgctttgtccgactcggaggtggacagacacggaagcattgtgagtagcattcggtttagtgggtagcatcggcagaacaaatttaacaggcaaatctgagagtgagagtttcaagaaataacgcaaaatgaagaat

SEQ ID NO: 43407 - DNA, 1498 bp, Heterodera glycines
ccccccccccccccccaactggctaattaaaacgcaacaatccttcgaaactgtgttttagagagacatgagaccaagtttgacttcttcttattgtgaataacggcatatcaagtcgagcatatggcagcccaaatgtcccaagcaccagacatcacggccaatacccggtatgaacgactgcgttaacacagactcatctcgcgcgaggcagtagaaagagcgcattggaacaaatcggtaaaaaaaaacaaacaaagatatggaataccactcggtggggagggtctcctttttcaaaaaaaaaaaaaattatttttttggtaattgcacgaaaatttacattctttcggcgtctaaccggaaattttgtgttcgcccatattcaatcatatggcactgatgcattccatttgattggctagatacccgacttactaggtaaattgggaatctaccaataaattgttgaatctgaaagtaggagacagcaatgtggggagtggttttgacgacgtggaaggacgatgtcgccaataatcaatcacaacacgtcgtgtcacggaggacggacaggaccaatgaacctactccacacggcataagccgagagaaaaaatcagctacttggacttcaccagcctctacccgtttaccaactttacgaccgactatccccctcggccaccctaaaatcatcagtgtcccacccaaatgagcagacggtcaactggcgctctccatccgacaacccctacaaaggtctgctcaaagtcttgcttctaccttcaaacaacaacatcaaagtcactgttatgcccgtaaaatttgatcaacgcctcctattcccactctgtgaaaagtgcgccaaacacatcactgcaaaatatcccaatggcctcaaggacaacatctactcctgcccacactacaacccaaatgaccgcgccttcgtgtccacttgcacccatcttgagttaaacgcagcattggaggccggctacacagtccgcaaagtcttccacgtcctccaatacgaccaatggagtaacaatgtcttcaagtcttacgtgagcgaaatgatggccataaaaatccacgcaaccgggttcccgtcgtggtgtgagagcgaagaggagaagagtgaatacattgaggagtgctggatgaaatttgcaattaaactcgacaaagaaaagatgaagtcggagcctgggaagcggtacatcgccaaactttgcctcaactcactctggggccgcttctccatgaggaatcttctctccaaggcggtaattaacaatgacccttgcgtcctccgccaatacactgacgacaagaaaattgacattatggacattgagctgatggatgaggacaacgcgtattcatactcacctacaagccgaaagaggagtttgtcgacgaaaataagtactcaaatgtcgtcatctcccaaagcactacatcaatggcgcgtctatacctttacgaagtg

SEQ ID NO: 43408 - DNA, 764 bp, Heterodera glycines
acacaagcaacaaacaattatctcattttccatataattatatgaatacactcgcgcaggcttatcaccccctccctttaccacacgttttgtcccccaaaaatagaaaagaaatatttcaattgtttttttcgttaatgttgaagttgtttgccgtttttgttcctcttgttcatgttggacctgttgcatttccggtacatcaacctttttgagatgtgtcgagacagaaccaattttcaaaatcctctcaactttgttaccttccctccatagtatgaaaaaattggacatttcattggaccataagtaaatgaaatgtttaaaaaaataataattaatgtaaagcgtttgtttggcccaaatattgaatcagggatgaacaaacaaattttctaatacagtcatttgagaataaacggcctaaatttgattccctggttaaatgatggttcagcatttctgttttccatcgaaaaaccatactttacccattaagcaccctccgccgactttttcctcaagagggtcgaattgttcattcggcacagatcacatttgttatatgtgtacttttgtttttgttttcctcaattttatttttttaacgtagacttcttcaaaaaacaccaatgaatcgttaaaacaatttttcgttgttttcccatgaattcacctaaaaagaagaggaataaatgttcatatatttgcaatttcttacatttgttaagtaaatgcatggatatttgcggcggttaaatctt

SEQ ID NO: 43409 - DNA, 698 bp, Heterodera glycines
cgtccctctacactctctcgaccccttttgtacggcttgaacttctgctcgctctgctcaccctggcactgctgctcttcctcaactcgcgccgtaacgaacttcttctccgcatggattttctggccatgctccgtgccatggaggtatgtctgcttgtcagtcctagggttgctgtcgccattcccgactgtcccacccactctcgacaccccattgtctcataatctcggcactgacataacattactctcttggccacacggagttttgattaacgtactctccaccccccccccccccctcgagactgatcactgatcagaaattgcccccgctgtttaggatgatcagcgcttgcagcggactgagtttctcaacgaccaaattcttcacaacggttggcatatcctttttcgcgtgtcctttgacagtttgccgcctccaaatttagctttgcccgcccacattgcgcttaattatgcgtcccgtactgaaccgttcgtgcatttgtgtccgtccgttggcgttttgtgcgctcgacttggccaagcgggcgattgggtgggcgaatttggtttcgatcggctgaaccgaattgtgtgcgacatggaccaaaggttggcacagttcagcgagcatcggctggagaaagtgcgaagtgcgcactccgtctacgtggtaagaaatgcctaacg

SEQ ID NO: 43410 - DNA, 907 bp, Heterodera glycines
tttttgtttttttattttgtcgactttttcaagaacatctcctccccgacatttttttgcaaatttttccggccatccccgacaaattttttgtcggggatttcctcctcggtcccagaatgatcatcggcttttcttggccacaccgaacagcaccagcagctgttgccacacctcaaccaccacaactgcggccaattcggcgcggatggcttttcccattgatttaatgtctcttccgctgttttcgtcagctgttggtggcttgacaatttgctgaaatgtgcttgatcatgatcacagccaaaaggaaaagcatttgccattgattgactcattccgttatgtgcttttccttccctccataaagcaaatcgataaaacatttttaaattaaataataatattttttaaaattaatcatttatattttttaaaacgatgactcgtaagcacagccttcgcagtcgcagcctcgatgtggtgaggatgagcttaatatttcaaaaaaagatacccagagatgggagggagttccgattttttatttaaaaaatggagaatttctcgagttaaggcccagaaaataaaggcgagacccctgggggccaggaccaaaaaaaaattctgagaaagttttctaagcttctattcatacattagaatgggaagaagttccaattatttttttggtgtcaaagttccaattacaacagtcaggatcaaaaaaaatgggaatttctcgagttaggtggcccaggaaattatagaggggcctaggggccgggcagcgggactaaaatgggaatttccgaacaaggttctaagaactattgcgtcttaggggtcagaatctgaaaacaaaaagggatttcacgaatttcggccaaggacaattgtgtccggg

SEQ ID NO: 43411 - DNA, 1347 bp, Heterodera glycines
atgctcgcgacggaagctaccactgaccatggtgtaatcctgaaatgaatgaaggcaattaaaaacgaagtgtgcgcataatttcagacaaaaacgcttaaaaatgcataggtaaacgaccgcctatttacataaattggctcaaaattccaaaaaatttgtcagcaccgcaaaaaaacaaacaatttttaatgattttttatttggaataattcaaaattctaattaccgcaaattataattttttatcggccaaatgctgattttataagcgggatagatacgtactacgtaccccgctcccaagaaagttttatgacaattttgattaaaaacatgcagcgcattttggtcattttctggacaagttagcaaataattggggctaaattatcaaaaatttatccggcgccgcctaaccatactcgtgatttttttgaacaaaacacagcacgaacatagatttgcgaaaagtaataaaaaaaaggtcgtatttcgagggttaatcccattaataaatgtgatggctgaccacccctcgctgactttgggttcgaatatggaacacctgcgcctaatactgtttttcaaaactgaaaataaaaaattatttttttcaatataacacactttgctgccatcgaaaatcgcatgcagaagcagtgcaccataaatgtcagccatcgtggctgctgcggcattcaatttctcacagagcagagaattctacaaaatgaaacaaaatttgaatactttaattaaaatggctttcccagtttaacggtcatattaacaaagaattgccgtccaaattctaaagtgccaaaaataataaaattaaaccattttccaagaggctaaaaataaaaaaaaattatcaatttaagaagaaaaaatatatacctaatgaccatattttaagaaatgtaaaataaaataaatgtaacatttttcaggaggatcaaaacaaaattaaataaatcattttcaaaaagtgattaatcatagaaaatttaaaatttttaaatttttcaaaacgtcccgctaccggcaggaaccagtcaaaaattaggacccagcgttccggacccgggatcctctactggtcccgatcaagttgctaaaaacaaaaaattttctcgatggcgcctaacggcaccgccgtgccaccattcaccgcaattttttttttttaatttgacccaccctaaaatcaaagatggtttttagcaaaaaacggaaagaaatttcaacgtttttccaggcgctgaaaatattaaaatagaactggtgaaaaaatttctaaaatatcgccagaacaaatcgtcgccgcacaatataaaaatt

SEQ ID NO: 43412 - DNA, 1333 bp, Heterodera glycines
  unsure (1)..(1333): unsure at all n locations
catcaaactctcccaccggcgtaaaaatgatctgaccaatttaaaggctgcctcatgtatggcgaaagagtcgtcattccgaaaatttttcagcccaaaattctccgactttttcacaaggaccatccaggaatgaaacggatgaaacaactcgccgcccgacaatacatattctggccaaaattggaccaagaaattgaggaatttgttcaaaattgtgaaccatgtcaattggctgcaaaggcaccgatcaaaaccgatctccattcatggccaaaaccaactggcccgtggcaacgaattcacatcgactttgctgggccattcttcgcaaaacatttttaattgtcgttgattcattttccaaatacccggaggtatttgagatggccaattcaacagcatcggccacaatcgaaaaattgcgttatttatttacgcgccatggcatcccagaaacaattgtttctgacaatggcacgcaattttccagttcggaattcgccaaatttgttgcagccaacggcatcacacacttattttcggccccatataatccaatgtcaaatggacaagtggagagatttgtcgacacatttaagagagcattcagaaaattaaaaggggaggggaagccgaacaaggagatcattgacatttttctgatcacctatcggacgacaccaaatgattcacttccggatttgaagtgccctgctgaactgctactcggtcgaaggccaaggacaacgattgatctccttcggccaccgccacaccaaccatttgaaattgatttggagatggaaaggcaattcaacaagaaatttggcaccaaaaatcgaagatttattttgaatgagaaagtcttcgctcgccatcgctcctcgcaacattggaagacaggagtgatcagcggcacatctggagtgatttttgaagtcaaatttcacgacggatcattcggccgttttcacgccaatcaactgcgctacaggaaaacagccgacaattttgatcagtccttggccatattaaatgaggcatttgagttgccatttcctccggccctgcccaatcaaccacccgacgcagaaaatgccaatttagggcccaatcaattgtaaaacgaggtggcagaacccattcagggacaatttggctgctccnnattgaggacgtcccaaattcaacgacgctatcctcaacgccaacgtcgtaaaccgaaccgcttttcaccggggcatgaactgatcagcctaaaggggaggggtcgggcaggcacattttccccccgattattatttccctttctcatttgcatcactggttt

SEQ ID NO: 43413 - DNA, 942 bp, Heterodera glycines
aaaaccccaaaaatgggatgcccggaaaatagggaagacaacgaatacaaaaaaaaacctcaaagggaccaaaatttttatcaaagaaaatggggattgaaatgatccaaaaacggagagaggttaaatgtagagtagagcgggaccgggaccaaaacacggacaactgagtacaactgagtaccgaggtcccggttttgaccgggaccagtcccgggttttcccagccaaaaattcccgggttttcaacccgaaaaggtcccggtcccggttaagcccaaaattcccggtcccgctctactctagttaaatgcttcggcagtatatgagtaaaagttaaaaatgtggagaaaatgagcaaaatgaataagcaaaaaaaaaaaaatctttggaaatttaattgagtgcataactcttctgagatacgaaagcaaaaattaaggaacagtgaacggtaaaactaagtgtttgatttgatttcgaccgaagtctatcgatgggaggtgaatcaaataagggaaaatgagaagggctcaaaaaaaagtagaggaatttggcttcgaccgtatatgaattcaaataaaatttgggattatcaaaacaaaagttataattttgtgactcaattatctggaaaaattatttagaaaatttggaatatgcttcggcagttttaaagtcaaaaaaaatcaagcaaattcgaaatctttgacaatcttaagaaaaacggctgaatacagtattccattgactacggtaggaaaatgtcttagcaaactgtttttggtcaaagtccgtcataggtgtaaaattgacggatgctaaacggaacggagagaacgctgccatttccactgcccttgccactctccctttgctttcgtccctcttctgtgtccctgcctttctcaccgctatttgttctcccccccccccggcgat

SEQ ID NO: 43414 - DNA, 823 bp, Heterodera glycines
tgatgctgtaatgtaaaatcgtattacaatagccgtcgtccggcgtataatttctcgagtaaatgtcaattcctgtggagttgcactactgtagcgatggacagcgacggccaccaaatattcgtcgtccaaaataagtgagaaatccttcggatggagcttcagccttaattttgaatttttgtattaagcctagaattactaaatgccaataaaaaattaacaatttcgaaattcgccgaccggttaatggctttgcgcagaatgaggaaaacgcactttgtttgtccgttcgaaattcacgccatttcattttggacttggcgcgattcaattaagcgtaggtcgaaaggagaagagtgaagaaagaggatcaccgcctcgctgttaccgaactcattccttaatataagacatttagattaattaattatttcagaaagtccaataaaaaaaatatttttagaaaaatttttataaataaaagaaagtttggctaatgcatagtcaatcatccaaaaaaccaagtaatgataatgccaatggattcgctcctcgaggagatgagcgattgttaaattatcacattggcaaattctatcaaaataaactgacaaatggattcgatatccggcaataaatcaaggaacttttcgttttatttcgaccctaccaaaaaatatctatggtagttttatgtgctatatggtcaataaataaattataatctttgcttttaccatgccatgtgcagtgtcttgggcaccattgtgtccgtgtgattaggcggaagcgcccgaggcgtaatgtcggcattggccat

SEQ ID NO: 43415 - DNA, 744 bp, Heterodera glycines
atttaattaaaaagagccccgagcttttcttaatttgtcattttgtttatagataataagtattattatgcgttcctctttttttatatacacaaattgtgcgttccttttcaatgtaaaaaaaactaatttttctgcccatgggcaaaaaaatatcgatttaaaattttcaaatatttaaatagttattttataattatatgatacatttcaaaaatcgttaaggaattaaaaaaaaacaacaaaaattgttgagccatggaaaatgcggacgaaaagccgccgccggtgaccagcagcggcggcaccaatgccgccgccgccaccgctgcgttagcaatgcaaaaaattgtccaacaacacgcagcaaccatcgcgaaccaagtgcagcaacagcagcagcaacaaacaggcacagaatacaaacaaacaaatgcatattttgggagacaaattatggaaaaatatcatgtgtacttgccggaaaaatgggtacttccgtgttttttgctggtacttgtgggttttgtgtcaacaaaaaattttttgttgttaaattttatttgaaatttataaaaagttgtttctattggttatcggtgtcgtagaatccgaaatctgatatccattacgacccataacccggatttggaggcatataagcgacgatgatgtaaaatgctttcccacttcattgcagactatttccttatcagcaaatagcctcctgtctccgcccacacc

SEQ ID NO: 43416 - DNA, 1250 bp, Heterodera glycines
attagccataagaaatttcaaaaacgaaaaatattttcggtgagtaggacggattggctatttcaaattaaaaaattcacaattttccaatttttgacgttttaactcacccttttgtccatcattttaatttggcacgatggcattggcacctccgccggctccacttgaatttgtgccattgctttgtgacgaatttgggcaacggacgtgcgacaattcttcggatttggcgtcatagacggcgaaaatgccttgccactatccaacacttcgaaactgttaaacgaatggtaaaaattcgatatatttgtttgcccactccccctttttttaaagtcatgaaaatgtcgctgatcacgaatcgaacatcgttgccgaattcaaacagaagtcgaagagtcaactttttcaaatccaattttaaaagtcaaaccgttttacataaatgaaatgctttttctcgagttcctttccgaggtttgaaattgaccgaaatgagtgttatattcatgatcagcgacccagaaaactcccgggagtgttttcgtggctttttaaaacaacattttgtgaaaatagggcaggggacgacaaaccacctgttaccaaaatgtcggtatttcctgttttccgaccctccactgattaatccgaccctaaaacattgttggcacttcttttttgccaaaagttaatcggattgaatggaatcattctgctgcgttttgcattattcccttgctttttttgtttctcacctcccctgcatattcggctgttgtctctccgctgtgtgcttttgctgttccttttccatttgttggtgcccattttggatgtcaatctgtcaattttgaaatgccacccctttctccgctggtgccaactccgttcgttttcatccgtgacgatttcgccgtcgtcggctcttccgtcggcagaattcgcgcagagctttcacatgaattgcccaatttgttggtggcacggacggtcagcagagcgagagagactctgccacagttcttttgcaacgccgcgggcaacacgagacgactcagccattcgccggacgaagacaaagagtcgatgatttggacaccgtcgccaccgccctggggttattttgtaggaaccatttattatgggagaaaggaatggtctaaacagtttcgtacatcgaatgtgtgagcggaggcaatggaaaacggagaaaattatttcaaaaaaccaaaatcgaaaattca

SEQ ID NO: 43417 - DNA, 1182 bp, Heterodera glycines
  unsure (1)..(1182): unsure at all n locations
ctatnntatttggtacaatttgctcaatattatactgtacattagacagtaattatctgaatttttgactaacaatctcccgttttcttttactccaaacaattgatttattaattgccctaaaattaaaaatgatttatactgaatttttcttaataccagatccatttggggcagcatacgtagttataatcaaagagatttcctcattcaataaatcaatttcactaaaactctgttgtatgtggtaaaaagattccaaaactacatctgcgttattttgtaccaaatccctaggcggaattattagcggatcactcagagcttcacaatataaatcatacgaaattttttctattacccaacccttttcatttttttccattgctttatctgttaaatattcaataatttttttgaaattttcttttgaattttcttcggaatttttaaatataaatcttataacattttctttgatgccaaatttcttgttttctttttgggtgtttgctaattccgtataataactatcatttggaatattttttttattactgaaataattttttttatttctcaattgtcgtttttcttttggggttttcaaaaaggattttccctccatttttaaacaaaaataaatgatctaaatgaaaacaaaataattattgattttgatatattaagatatttaaagattttccaattaaaacactcactaaactcagaataaaaaatgaaaatattacaaaatattaaatttcaacaaaacataattcagatcacaagaccataaatccgctaattctcaaaattatgctccaactcccggaggtggcggctgtggaggatcttggttgttgcggcgcattggcggctcattttcctccggaatgagatgaagcatttgccgatttcgctttcggcgagggtccctcagcgccactaaatgtaaatcaaaagaataaaattgatttttttttcacacccccaggcgtgggaggacgaattggagcccaacgctgcggccgaatttgtccatgttgtggctgttgggccaaacatttggagccacaaaagcatccgccaaatcggggtgacgaggtgggtggttttgaatttgatgtagtggaattggtcgaaatggaattccctaaaataaattttcaacttgaataa

SEQ ID NO: 43418 - DNA, 958 bp, Heterodera glycines
agttgagagagtatgcgcattacctgtgttaactgatggtatgatccataagaaattgttcgacattccgtcacttgacggttttgaacgtctgaaaaatcgtccgaggaatttgcttaagcttatgtcacacaaagtgccgatcaaaaacctgccaacttcgcctaaactcatcgacgaaattgtttgtcggaattcctctcaattaattttaaaatttaattttaagatcgcctttttcaaccagccaaaaagtttctatttttcgcataatttcgacataactaaaacattgcaacagaggtacgctattgggctgttttgttactcactttcaccttccatttttagtggctgtcttggttcttccacttctgacaatcgctttttttggaacaaaaatttgctgaatgaaatgttcgtcaacgacggttcgccaattcctgcattcaaagaatggataactccgctcatttacggattcatcgagcacaaatcaattgtattcgatgtggacattcgtgctcacatgacgctgatttcgagacgttcagtcaaacgggcgggtgttcgatatctgaggagaggcattgacgaggacggcgatgttgccaattttgtagagacggaattcatcgtttgcgtgtttggccattgcctttcgtttgtccaggttcaatttccctcccccttcccgctaattcttaaccattcacttttcagtgtcgtggctctgtgccggtgttttggagtcaaaagggttttcagcttaagcctcctttggtaatcgaccggccgttggacatttccctccccatttttgcttctcatataaaccgtctgatctccaattacggaactccgcttgtgctggtgaatttggttgatcaatcgggaaaagaagcttctcttggagaagtgtattgcagggaatcgcaagaccgcaggcagcaagctg

SEQ ID NO: 43419 - DNA, 1210 bp, Heterodera glycines
cccctttcggggaaggacaagcacgctgattttcccagtgtagcgcgcgtgcagccccggacatctaagggcatcacagacctgttattgctcaatttcgtgcggctgaacaccgaaaatccctctaagaagttgtgcccacagaagcaatgagccaactatttagtaggctagagtctcgctcgttatcggaataaaccagacaaatcgctccacgaactaagaacggccatgcaccaccatccaccgaatcatgaaaaagctatcaatctgtcaatccttacggtgtccgggccgggtgagtttccccgtgttgagtcaaattaagccgcaggctccactcctggtggtgcccttccgtcaattcctttaagtttcagctttgcaaccatacttcccccggaaccggaagactttcgtttccgggaagctccccaccagggcgaataaatccgccggcggatcgctagttggcatcgtttacggtcagaactagggcggtatctgatcgccttcgaacctctgactttcgttcttgattaatgaagacattcttgccaaatgctttcgctgtagtccgtcttgctacggtccaagaatttcacctctcacgtagcaatacgaatggccccgtttgtctctgttaaccattatctcggtcagcaaaaccaataaaatcggaccgaaatcctcttctattattccatgcacgaacattcaagcgaaacgcctgtttgaagcactctgatttgttcaaagtaaactcgccagcccaccgacgccgaccggtaaaggccaacgccggggaaagaccggcagaaaagccaaccaaaccagtaacacacaaagtgtgcaccggacggctagcacagatccaactacgagctttttaaccgcagcaataattctatgcattttgagagctggaattaccgcggctgctggcaccagacttgccctctcatagatactcgttaaagggtttaaattgtacccattccgatgaccggcctcataagagatcggtctcgttatttctcgtcactacctcctcgcgttgagagtgggtaatttgcgcgcctgctgccatccttagacgtagtggccatttctcaggccccttctccggagtcgaacccttatcctccgttacccgtcatcaccatggtagtcagatacagtaccatcgaaagttgataaggcagacact

SEQ ID NO: 43420 - DNA, 307 bp, Heterodera glycines
tttaatcatttcacgtgaggtaaaaaaagaatacaaacctatacaaaagaagggtattattgatgccaatttaaacgtactaccctttgggtatatttgagtagaataaatatattttcttgtcgttacttaaatcaatgagttgttttactttttacctcaatgtttcgaaatcaatataaaaatatcaggttttatgtacctttgcaacaattatactcttgatggagaatatgaggcaactcaaaataacgaaaaatatatgataacaacattcggggtctttatttatttaacttttataatt

SEQ ID NO: 43421 - DNA, 1386 bp, Heterodera glycines
tcgcttcagctcgtcaaaatatttctgactgctttcatcggcgaacacgtggttgatgatcacggaacactttcagaccaaacggaggcaacttccgcactgtccgctgtgtcgggctcgaaattcaccaaaatcttcttggcaagcccgtacatgttttctatatcctcgtcggtctccaaatgctcatcgcgctcatttgaagaattgtttaacgtcttccaatgcccgcaaattgttccgagttctttgatcgtatccttcaaaaattactattggaaatatcctttatttttatgtagacattggggggggggggcgtcacaaatacatcgctttacttctggtgcatatttttatacgcatattttgcaattttatgtgcatattttttcgaaccctaatcattacttattttatatacaaaacgaatttagaaatcaaacggttgtattagtgtttaaatttttcgaatgaattttatattgaatgtttacgacagccaactcataaggtaaataattgccaaaaccacgtgggtaccacttaatgtattacccaacaattcgtgggtttgttttcgagcccggattggaccggggccccgccgggatttggcatatgctctaataactcgaaaatagcttaacaatcccccaaaaaacttggttttcgtgcattttaagccactggagctcagaaaaaataagctaaaacctaaaaatatttaaatttagggtcatttttaggcggtgtgttttacggttttgatgcatttttgttaataagttttgggcaaaacgccatgcttttccaaaaatacttgtacttactttaattgccgctctattcttcaagttttgaagccgatcacccaaaatttctcggacagcttttgcctcctcagtgtcattttttccttttgagtttttcccttgggccttctccccaattttttgaatatcctccgacaaatttccaccatattgttcagaataaacctccaaaacttctgtcatttcttcgtcagaactgcccaaaattacttccaacaaaatctccatttctgacacctgagcatgaaaagggcaacaaataaaaattttattcgcctctcaaatggacaattttccgatttaggctaaattttcgaaaatttattcaaaatcataaataatatggtaatccataaattttttcctggaatgtgggaggaaaaaacatgtttttaccttcgtttgatgcttcaaacatgggtttctatatccatatttcgtgttttatgtccatgttttggcattttgtccatatttatatcggtgctgtgacgaagtgtcagaggtatcgatgtggaagtatccatgtgggccaagtgtcaaaagtatg

SEQ ID NO: 43422 - DNA, 1201 bp, Heterodera glycines
  unsure (1)..(1201): unsure at all n locations
ccaataccataatccttttaccgactgtctgctgctactgtgtcatctcgtccttttcttttttcttcgctttggtcaatccgttcaaaaatttgagtgtctctttttcattttgtttcttttttgtaatattttnaagaattcatttgctttatccccgcagtgaaaggcttaacgcaaacaaaaacggatcgccggtctgatgcgctgccaaaagtgtccctttgacattcacttacgcattttcacacttttaattatgcttttcgtttcattggctaattaattattccattaatggcaattggataaattgagcttggccttctccgccatttcattggttttttttgcgtttttttcatttctaagagacgaaggagtgattttgctaatcagcacaatgtgccaaccattgctcacttctccattttgaagaaatgttaaaaattaaagagaaatgcccaaaaatcagtttttctccactcatcaataaatctgtcgagaattactactacaattaagcaatcttcatgctgtcttttatcagtcgttctgttcgtgtccccatttggggcattccctccccctccttttcttccctttccccccttatcaccgcttcgttctccgttcgtctcgtctccccccccctttccattcatatttctgcaaattcatttcattggaccatttttttgcctggatccaacattaaaaacaatggcaaatcgaagtttgtccgcgtccattgagccattggtgctaaaatcagcggacactgacaatgaaagcgtattggaatcaattgaaaacggcactcgatgtcaaaggtcagttgtgattttggcattttaatttggcactttctaaagcattcggaatgccaatgccaaggcactcttcgcttttctgctttctcttgtgctactttccctcggcggtgttctgctcattttgttagcccacgccccaaatcagaactaattggtaatttctatcaattttagtctcctcccttctctcatcaatttgctaattcaattctgccaatttaaacagcaaattaattatccaattagcgaattaattaatgagacgaaaattcgccaacaattcgaagaatttgaacaaaagtaataattagcagaaaaccaaagtgaaaatgaaaatgaaaagttaagctttgcaagataaatgg

SEQ ID NO: 43423 - DNA, 992 bp, Heterodera glycines
acacaccgtttcaattttggcctcccagttcaaaaaagatttgcatgtgtggctcagtggtttttgtaagatagtaaagggacaaagggtggtggttcgagtccgttgtgcaacatgaatatttttatttatttttgtccaaaatattataaaatgacgatttttgggaattatttttgaagctttttgctaaccaaattggatgcttttggtatcattcgaaagctcttgttaaggagaagctttttctaagcaaaagctaaacatttggatgcattagaaaaaagttataagcactcgaaattttgttttttgaataattttagatcggagcgtaaaaaattaaaactcgagcgttaaaaatattcataatatttttctctttcaatatgcaaaatttgaagtggatttaacaagcagaaaaaaagttaaacaggatgaagtaaattccgtttttctctattaacacagataaagaaatagtatgccaaaaagagagatgtttttttctctgcgctctctctttattggttcatctctcgttttttgaaacggtgtgtagaactataacaaacttctcaattctttttttttcaaagaaaattcggcgctatatggaaagtggccctttttgaaaattttgtaaaaaagtcatgaaaatacatttcattatattttcagaaatgcatatctgtgatatgacattatttactctaatatattttttctcacacgattacctacttaaagagaatttctctcattttgttcatttttaatgagaatttcagaacgactttaaagcgttagacagtgccatcgatcaagaaagaaaatcgccacgagcacctttctgcacatcgctaatcgattaaaaatttggacattgcctttgcctctgcctcttccgttctcttttctatcaaggttttcgctttttcctttcgctgggccgggcatggtcccattctgtcgattcttttccctctttt

SEQ ID NO: 43424 - DNA, 1581 bp, Heterodera glycines
ccattctcaacgaatctcatccttactccttcttcccgcctaataagtttccaaaatttggtctcaaaacttcacgcaaaccttcaacaaagtcctcgtgaccaacatttgcattgcgaatttgctgctgttcggcaccattgttaccaccaccgtttgctcgcggcggcaaattcgattggatggacacatgcagaaggcgccgccgaatttcatcgtcatttgctgctgctgcttccatttcactaaaatggtgttcgttttcctccgccgacaaactcaaatttcggttaagtcctggcgagatcggagcgttaaccaatggttcattttcaccatgaactccttcaacctgttgttgttgctgctgctcttcaaccgctgcgttttggttttgcgcaaaggttcgcaaattcaacgctctttgtcgtgtcaatggcggagagcgaattatcatttttgcatctggctcaggtatagcaaaaacaaaacaaaagtttccgctgtcgacacttttccactttttcgtttgatggcgtggcgattaggacggcgaatgcgatagttcggctcgaatttgttgcaatttgaaaacgttcgactcgaatcgttttgttgccctttatcctgtctcaggatttttaactccacttcttttcaacttcaactccaactcttttcttcaacttcactccaacttcttttcttcaaattttgaaatttgccctggctcagggtcaattcaattccgttgattttgttgtccggttcggacttcaaacaaaactacctaattccgatctcacctttccccgtttacctgctgttcctcaggagcgccaaataggaagaaaaccgttttccttcaattgaattggggggtggagaccaaacacacgaagacaaagccacacacaatatttatttttgaagtccgaggagatcaccaatgtgaagcaaattgagaacgaaatttagagaggaaattttggaaaacaaattaatgagaataatgagaagtgaaaaaaaatgtaccaaacataaattaaagaggtcaacaaacataaaataaatagagataaaatgccataataattttaaattaaaacaaatatcttaattaaattaaaatctccaacaacagggcaaagatgttctgcactacttttgctagtactgaaaattttacttactcaaaaattagcccaaaagacaaatacaaaaaagaaacataaatagttaaaaatcgaaaaaagaacgaatcattaacagggctgccaaaaaatgcacgaaaaatgaccaaaatatgcacataaatatgcaaataaaattgccaaatatgcatcaaatatgcacaaaaatcgtcaaatatgcacgaaatatgcattaaaaaattgaaaattaggggtgcaaattcaacaaaaaaaaatttttcacttgtgcacttgccaatgagctgctacatttcttttataaaattctcgttagcaaatttgacattttttaatcaaaaatcttcccatgggaaaaaaatttggggggaagaattttgagaaaattccaattcttagtgttgtgttt

SEQ ID NO: 43425 - DNA, 525 bp, Heterodera glycines
  unsure (1)..(525): unsure at all n locations
tttaaaaattccctcaaaaataaaaggtctattgcctctctcccgccctatcatgctcgagagcatttgtatgtgtacctttttatcaaaaaaagagatagccatttttctgggatagagtataaatttaaaaattccctcaaaaataaaaggtctattgcgcaccgccctccctatcatgctcgagagcatttgtatgtgtataaaatttatcaaaaaaagagatagccatttttctgggataacctctaaatataaaaatcctctgtgaaataaaatggcgattgtgcacagccctccgtctcatacgcaagcgcttttgtgaggtataaaatttctcaaaaaaagagatagacatttttctgggatagagtataaatttaaaaattccctcaaaaataaaaggtctattgcgcaccgccctccctatcatgctcgagagcatttgtatgtgtataaaatttatcaaaaanagagatagccattttttctggatagagtataaatttaaaaatttcctccaaa

SEQ ID NO: 43426 - DNA, 1186 bp, Heterodera glycines
catttaaagcgtttccatgactcaacgacaaaagcatctattcggttatttctatcttatacagtaaccattagcgtgttcctccacaccgtacctttttccggtgtctctaccgtatattatttattcactgctcacctttcgtttctccatcgtttcgctttgccattgattttgcccattttccgatggttcgcaaatgccaaattcaacaattgtgttcatcgaatccgtcgttgacgtgttgtccgcttcgtcgtcttcttcgtcttcttcatctttaattatttaaaattacaaaatgtcaattcaaatttaaatatttaaatttttcccacctttccctccctcataatccgtccgtccccactctctgctgaactgctcgccaatttccaatccctcggccaatttggccataaatttctctaccgtattaccggtgttgtttctattttttacggtagtaaacggaggaatgccaaaacgaagggaggccaacacttcggcacattcaaaaggaaattgaacgcacgaagcagtggaagcggaaaagacagaaagttcgagcagtgccaactgtttccttctaaaacgaagagacaaatgaagcaaaatgaggtgattagtgttaagcaaatgctaaattaatgaccggcaacggacacccattgaacgcgcaaagtgcgcgtgcgccgcgtggtgctgcgcgtacgcgcgggggacgcaacgaaacgaaagaacggcgaacgacgcgtggggacgaaaaagtggcatcatctaattaattcattattgcctttttatgactggactaatgaccatcactcatccccctcctccccccgccccgtaccccgcgcaattattcacgccgacccctcccgaggccgggcgactacctcccaccgacggacgcaccccgaggaaaccacacgacaaagggaacggggccggggtggaaggttaactgacgaaaaataaaaaaaaaaaaaaaaaattttaaaacgggaaaaaatttttttaaaagaaaaaaaaaagggaaaacctcttccttaaaaaattttagaaaaaaaaaacttcaaaatgttttttttttttttcttgttgacaaaaacaaccgaaaaaaaaaaaaaaaacccagaaaaaaaaaaaaaaaaaaaaaaaaaaaaaaaaaaaaaaaaaa

SEQ ID NO: 43427 - DNA, 733 bp, Heterodera glycines
  unsure (1)..(733): unsure at all n locations
ataaatattaaggattgaacttcttctaaattntggttaaatatggaatgaacaaaacaaatatttaaataattgtatgtataaaaatctgagaaatgattgtatttatgcagtaataaatttgcaaaattttaatatatacttcggtaaattctaaaacgaaaaaacaatattttaattaatttttttctgaaatattcaaattacctgattaaataatctatgaaataatttaaaaaataagaatatttagcaaaatcaaaaaatggcaagatagaggtaaatataataagatatcacagccaataattaatccttatacagaaataattagattttaaaatggaatattttggatattttacaaattaatttaatcaaataaaaatacgcaaacattttttttattattttaagcagtcggtatcttgaattcaagggctttcactgattgttgcaattgtaatttggtaatatttcaatttaactagaatttatgcatcgaattattcaatgaattaacgaccaatttgtataggaatatctacaatagactataataataaataaaaataagaatttatcggttacatgataattttaattaaaaaaattaaaaaaccatcatacagcattatttacaataagcccctaatggccacacaagtggaacccgaggctggacaagttctctgatcaagaaagaaaataaataaatattggttgttacaaa

SEQ ID NO: 43428 - DNA, 1230 bp, Heterodera glycines
gaagaggaggggaaaggtgaaaaaattaatttaaaaacatttaaaaaaataaatattttaggcgccagtgaaatgaacaaaggcaaaagcatcgttatggctgactccaaaaaggaaggtgaaaatattgttaattaattattaaaattatatttttaactgaaggcacaacgacagtgaaaattccgcaccgttatggagcagtgtcggggatgagtggccaaaatgccagtccaaaagcctctcaaattggcagtccaaaaaacagtccaaagggcactcaaattggcagtccaagatccattagcagtcctaaatcaacacaaattggaagcccaaaaggcattcaaattggcagtccacgaaaagaaaagaccaaattatcttcagctgttggctcttctgatttcaatgttatcgacgaatgtaagaagtcataattgaagacaattccaacattttaattaataatttagcaaaagaagcgaaaaaaccaagccaattcaaaccgagtccgtccagaagccaaaataaacgcgaacagcagcgactcaatgttactattggagaagcgggaagaggtaattaatgaaataattattaattgttctttgttatggcctaacgacatatttgggaacgtttatttaaaaaataaaaaaaactcaaagttcaccgctaatgccaatctcagacgctatgtttattatgattgattagggctggtaattaaatggaaatccattttctttttctggactattggaggcctgaaaggaacaaaacaacattttttgtcttggtttgaagcttctaggatagatttctatatccatattttttcatatttcgcgatttataatccatattgggtatttttccaccaaaaaacctccattagaacggccctcatcagcaaaaatggccttttgacccataaagatgagaaaaatttccgttattttttagtaaactttctcgagaatattgtttaaatttaaatttttcgcaaaaatggaaatttgtgtcaaaaataagtaaaaaagtggaaaatttcatttttttttcgtttagttttcactaaatttatatttatttgtctttttttcttcttcaattatttttaataccgtagtcatctatttttaatgacttaaatttaatgatttttgaagaaatttgaaaaatattcaatgaaaaattatgtccatattttgcaattttatatca

SEQ ID NO: 43429 - DNA, 725 bp, Heterodera glycines
  unsure (1)..(725): unsure at all n locations
ggcaagccatttgaacggcgaaaagcagcgcaaggccctagcccacggaatgtgccggatgggagttgagttgggcacgggacagaaccatttgagcatccaccgcaagaccaacatactgtggaagaggggattacgatataagaagggtgatcgttatcactgattgtgagacatttgcctgagaatcgatgatcaagaggcctttttctcctccatttgatttcaaaattacccacaattaaaaaggtcgtggccataaactcgcacaacaacttgcgcatgagctcgttctgtattcgcgacctctctttccatttctgcatattcattcctttttaattgtcgattaatccttctgtgaattttatttatctgattcgattatttatttaaaaaaaacataaactgaaaatttgaataagacagatgttgttgtttattggttttaaattttttgaaaatgtaaaaaatttatgtctgattttgtgttgaaagagtgcgaatgctctctttaaaaaataatgctgattaacgtctgttttaaaatcagttaagagagactaattggaatttgatatcactgtccaaatctgctgatggccctttttcattgggtcgaaggacggaaagggggagaatggggaggggggtggggacccttttctccactgcgacganaggtccttttcttttctctcgcttctgacattcgatttatcact

SEQ ID NO: 43430 - DNA, 1395 bp, Heterodera glycines
aggaaatagtgccaagggaaaggaaagaatgccaagtgcatttgaaagaatgccaaggaaaaggaaagagtgccaaggaaaaggaaagagtgccaagggcgaggaaagagtggagtgcctgagagagagatatcaaatgggaaagaaagtaaaaaagagtgattgcaagggatggacattaacttttaatggacccgcctgcctcatttgccgcttttctctaaaaatgattcccttttgtacagtgtgccaacacagaagataaaatctattctgaatgggactgtccccaggcgttggctgtgcataattatgccattcaacaggaggacgaattgagcctaagcaaaggcgacgtggtgaacattttgcggaaaatgaccgacggatggttttacggtgaacgaacgcgcgacgcacaaatgggatggtttccctcttcgtatgttcagcaggtcgcactttttaattcaaatccattaaaattcatcgtttttttaatttaaattttaaaaggtccaaggccagcaaagagttttgcttttaaggtgctgaacgaccacaacaaggccaacagtttcagacagaagctgagcctcgtccagcagcgttcctccgccggcgatgcgaatgtgttcagacgcggctcctccctgcaggcgatagcccacgacggaggcgagctgtccttctcccatcctccgcaccaacgcgaccacccgccgtcgatgagtcggttgagacgcatgagcagtcccttcggcgtgctttcccgtgacgcataaatggcgcattggcaacggagttatcccattctttgacggcgtcgttaatcatttcccccttccccttcccttcatcagatgccccttttaaatatgcttttctcagtttctcataatgttcccgttcccattgtttctttgtaaatattattctaaaatacaaatgctcacttcattttatttacaattcgtttttgtatcgactcatttttttatattttctgtaggagtgccgaagaagttagatagtttatttattcaaaaataaaaataaccaaaagaagggcatccgatggaatggaaattataaaaaatatacctaaccttacttttgaagtttgaagttcttttataatgtataaggcttaaatttttaggtgtaaaaactgtcaaaaaaaagttaattttaggttctaaaaaagcccaggtgcttgggaaaataggtgccaaaaagtcaaattttaggcgtgtaaagtcataaaattttatccaaaaaccaacctgggtgcgagtttgattttgtcgtttattgcagcgtttcaagctggaggagttcgtgggacaattgtgagtttgattatccatcctactaattttcggccaaacgtgt

SEQ ID NO: 43431 - DNA, 1307 bp, Heterodera glycines
cctcacgcgcacccgcggggcctgcagaacgttcagctttcctacagcttccgataggcctcccgatgttcgagcttggcttttgtactcgcccgaatcgtcgatggaagtgtcaaaaatgcgcaaagtgccgttgttaccgaaagtgtactgaaacgggcgaatgccaaaaggaagttaatgagatggccattcaaaaccaattaaaaagggaaatgtttaaggaagaatgtgattaaggattcttggattgactgggctcaaaaatattttcttaaaaagcgagcaatcgtattaattgctgcgttttaaattatgctcatcgaattacagaagtccaatcgaaagatacagtatccccgcgccttttacaaaagcaatgaaaaacaaaagcaaaaaaagcacagctttggccgaattgcccacggctttgctttggttgtgcagccaagtgattttcgcttgctcaatgctttgggtgcggcagtggagaaaagcggtgccgtggatggccacggattcgttgcgaattgcgacaatgtgcggcggaggctctgaacggagtttaatgaccggtgttaagcaatcggcaaaatcaatcacctcgagaatccaaaaaggtaagagccgagtgattgccctggggactgaccacctgaaaataaaattaaactatcaaacggacataatctgctgtcattcgttcctcacttggcacgtgtacaatccgcggtgctttggcgtaaccgcgtcaattgtccaaagggaagtgtcggtggaactgttcgcaaaatggcaacatttcgccggtattatgccgactgtggcggctttttgccactttcttactcataaaagaggggccctccgatggtttttccctcgaaaagccaaaaaacagtgaatgggacgcgtgactcgactgagcagctcaaattggctgctttgtacgcgtgtgccgtgtgcctttcggccataaaagcgcgcggtccgaccgcctcaacggcggaaattgccgtcggagcaatgcgtacgaattcgtaattctgaatgggacgcacttctttcgctgattggaacatttcttggccaccttttcgtcctctccgttgacgcggacaaagaaaaaaccctccgggggaataaaagggcccacgaaaaagacggaaagactgtgcgggtccgcctgactttcgttcctgtacagctccttcccgtggtaatcgaccgaatgaaatttgcacgaccgttccgggcggactaagcccaatgagaggaaaattggaataagcatcaaattagcagaa

SEQ ID NO: 43432 - DNA, 902 bp, Heterodera glycines
ttttgagaatttataattgaaaaatttgcatttgtatccctaaaaaaattcttcaaataaaagaggtaacacataccaattttgatacgggtcggggtcacttcggcgcggaccatttcggcgccgcaaattttgaaatgctataacttttttatttgtcagttagctttagccaatctggcatcatttgaaagctctatgtgtgctctatatttacatgtaaaaatagaaatgaatgattcaaaaataaaaaagttatgccacgcggcgccgaaaaagccaagaaaaagtcaatttttgaggttttttggccataacttttttgtaaactgacgaaattttttgaaattttacaggctaatagagaatctgaagagctatcgaatgataacaaaaatttttaatttggttgatcaggaaaaaagttgttagcaacggcgccgaaaaggccggcgccgaagtgggcggttcccttttgatactacctaaaacattcaattcattgcatcccaattaacaaaggcattctttcaacgaattcgttctatggactttttagacacctatcctaacaattttcatcgttaattaccagtttctcgcttcattttataaatgcctcttcttgatgtgcccaatttgttggcaacttcactttcaatagttgttacacttttatttctgttttttcttatacactcttttctcatctgatcaaattctttgattttctttatttttgtctcgtcattttcttccaattttcgatgatttgcttagccatttattttttaaattattattattattattattttaaatatttacccatttcctttttccatttgtatatttttttgcgtgatattccccaactttttcgccaatttgttcctcaatgt

SEQ ID NO: 43433 - DNA, 842 bp, Heterodera glycines
ccatttttctgataattaattcacaatttccgcagctcttatggtaatggaaaaaattttgaagaggctctccggaacggattatcatcggggttacgagatagaaaattgtcctaaaaagagagccatttttctgagaattaattcacaatttccgcagctcttacggtaatggaaaaaattttgaagaggctctccggaacggattagcatcggggttacgagatagaaaattgtcctaaaaagagatagccatttttctgagaattaattcacaatttccgcagctcttacggcaatggaaaaaattttgaagaggctctccgaacggattagcatcggggttacgagatagaaaattgtcctaaaaagagatagccatttttctgagaattaattcacaatttccgcagctcttagggtaatggaaaaaattttgaagaggctctccggaacggattagcatcggggttacgagatagaaaattgtcctaaaaagagagccatttttctgagaattaattcacaatttccgcagctcttagggtaaggaaaaaattttgaagaggctctcccggacggattagcatcggggttacgagatagaaaattgtcctaaaaagagatagccatttttctgagaattaattcacaatttccgcagctctttagggaatggaaaaattttgaagaaggtctcccgaacggattaacatccgggttacgagatagaaaaatcttaaaagaaaaccaattttcttgaaaataattcacaatttccgcacctcttccgtaatggaaaaaattttgaaaaggttctccggaacggattaacatctggg

SEQ ID NO: 43434 - DNA, 1075 bp, Heterodera glycines
  unsure (1)..(1075): unsure at all n locations
aaagtttaggcttaacttttttttcagaaactgatccgtagaaggccaaactttgcagggatactgaaaggaagagaactaacctattttaaatattatctagtcagttcatttaaataatttttatccaaaaaaaatttttttttggatttcggggcagtaccctgaaccgatgcgccagatttatggggagaccgaatccttcgggaatagcttcgatatacctctactttatttttaccttggatttttgctccccataattgtttgagtaccccaaacggacacttgaaaaaatcgatttttttgttttcggggcagtccccccgaaccgatgcgcccagatttatggggagaccgaatccttccggaatagcttccctatagcctgtactttaattctgcgttggatttttgctccccataattgtttgagtaccccaaacggacacttgaaaaaatcgatttatttttgttttcggggcagtccccccgaaccgatgcgcccagatttatggggagaccgaatccttcgggaatagcttccctatagcctgtactttaattctgcgttggatttttgctccccataattgtttgagtaccccaaacggacacttgaaaaaatcgatttttttgttttcggggcagtccccccgaaccgatgcgcccagatttatggggagaccgaatccttcgggaatagcttccctatagtctgtactttaattctgcgttggatttttgctccccataattgtttgagtaccccaaacggacacttgaaaaaatcgatttttttatttcataaatattttttcagaaattgctctgaaacgcaccaaattttatttacatgttagtttaggcactctgatgctttttctatcgaaaagggagatgaataaaatttttaaaaatttttaattcctttttaaacaggccaaaaagtttaggcttaactnnttttttcagaaactgatcagaagcgccccanactttgcagggatactngaaggaaaagaattaacctgtnttatcacattagcttgtcatcagtttttataaaaaattt

SEQ ID NO: 43435 - DNA, 831 bp, Heterodera glycines
caccagctccatgttctgtgccacccgaatgccaaaacatgccgggttgagtgcatagccgtaatagtagaggaagtaatggactgaaaaaggcttaatttggtcttttaatagggatgcaaaaatcacatagaatgccaagcggcctccggccaagcaaagtggcacaatcagtcaacttgggcaaacccttgtcaaagcgaatgttctgaaagaaaataaataatatcagtcaattaacaaatgataaatgcttgttggtaattctatgggaaataatgattttgtcaaaggcaaattcggagcggaggagtagcaataagtctcgcggaaagaattttttttttttgaatttagtgccatttttttgtgccatattttaagcacaaaatgttttgcatgtaaagtatgcccatcagtacctaatgctgtcaaattcatatcagtccggaggatgcacttctcattggtcatcaatttagtattctcaactgactctcaaaattcatttaaagtggtttagtaatatttattagtatccattttgtccatccaatgtccacctccacaccaccaccacatgcctctaggaagtaaacgagcatcaccaccaacgcgtacgatggcagtcccccgttgaacgggttgttcaagttgttctgggtgagcaactgcttcaacagcaacagcaatggttccagcagtggcaactcgttcagtttccgtctgatccatttaacggtgtccgccacatggttcaagttgaagctgacatcgatgctcagttgggtctgccggtccgtgaatttgacaattggaacggctgcaaaa

SEQ ID NO: 43436 - DNA, 729 bp, Heterodera glycines
tggtataaatttcaaataaatctcataaaattctcccgattttttgctatttttaaagctttaattcacttaaattgaccagtccttcattgagttatgaattttcaaaatttaacccaaatttccaaagaccaaaaaaattaaaaatattttcgaatttctaaaaaattccaaaaattatgaaacttaaaatagacatcatattcgtactcagcacctcaaaataccccagaaaaatatttttcacacactttttcgaccccaaaaaaatttttgaaaatttctagggggcctagctcgaaaatttttgaaaattttacatcatgtagtacaccattcgatagcatttaaaatgctctacaaaaatgttctaagacaatttttcgctaaaatcaacccctgacgagttatgggcccaggactcaaatgtcccgctacaatggtgattagaagaggtacaacggtgatttgaagaggtacaatggtgattagaagaggtacaatggtgattagaagaggtacaatggtgattagaagaggtacaatggtgattagaagaggtacaatggtgattagaagaggtacaactgtgattagaagaggtacaacagtgattagaagaggtacaatggtgattagaagaggtacaatggtgattagaagaggtacaatggtgattagaagaggtacaatggtgattagaagaggtacaatggtgattagaagagg

SEQ ID NO: 43437 - DNA, 843 bp, Heterodera glycines
attggcaataagtgggttgtaaaaaactttttgggtaatgatttattttttgaagtgagtcaaacaccgtattagtgctttgctgtgccgagaaccggcaggcaaaggatggctttcaatctgcaagaaattagattggcaatatgtggttgtaaaaaacttttgggtaatgaattattttttgaagtgagtcaaacaccgtattagtgctttgctgtgccgagaaccggcaggcaaaggatggctttcaatctgcaagaaattagattggcaatatgtggttgtaaaaaacttgtgtaaggaattattttttgaagtagtcgtaaaaaaacagatatgattgttgtcagggggcttttaataatgttgttgcactgcccacggcaaaagacaacagcccaaagcaaacacaaaacaatacagcccaatgccgaagatgattatcgtttaattccaaataaaattagggcgaggacaatcaataggaaaactgcgacagcataaactaacaaccaacactccacaaaaatcacaaacaaaaatgaaacaaaataaataacaaaacgccaaatatattttaaaatcacaatattagcacatcctcgccctctaagaagcgatgtcctcagcgctttgggctcatcggtagtgcattcgggcgttgaaaggggcggcaagggtgtcagcagtggaccggttcggcataaagtcgcgttgcagggtcagaccttgtaaaacaacggacaaaacggaattccgacttttcatctgggcctataaaatcatcagcgggtagcttctttgcgcacacctgcgatggccatttgaaaaatccagctttta

SEQ ID NO: 43438 - DNA, 771 bp, Heterodera glycines
aatttcaaaaaaatgtcgaaatagtgaaaaaatagtgacaaaacgccaaaatagtgatttttaactatcttagtgacgaagtcgccaaaatagtgatttcttgtgacgaaaaatgacgtccaaatgaaaaaattttaacacagaaatgcgttttttgagctcctttcttcaaaacaattaagcaaaaaaaaagttttttcactagaaatcccggccctagacatgattccagggcgactctttcaattattaattttcaaaaatgttggtacactggtggaaaaaagtctgaacaaaatggtttataaatcgaaattaaatgaaacattatgggcaattgtttatgtatttattagtcccatatatcgactttatatcaacaccaaaaaatcccggatcaaaaaaagaatgaatgtgatatggtcaacgaagtgagagatggtcaaaatcatggcggaaaaaagtctttgaacacactttaaaaactatttcaaaaggctcttaaaaatctgaatgattcctgctaatgtatcatttgatgctgaacaaaaaagtcttttacaccaacttggtcagatcactccttcatagtgatcggggacatcctaatacgctgaaaatcagggaaattttcgaaaaaattcctagggggttaggaaaattttttttagtgaaaatgagtaagcccattagaaagagcataaaattctctaccgaattgcctttagaatgatgtggctatgacttgtacataaaaagttatacttggtt

SEQ ID NO: 43439 - DNA, 898 bp, Heterodera glycines
tggatgagttggaaaagagaaggaacaaaaataatgggcataagaaatgggagaaaaaggaacagatgaaagcaaaagaagaaaaataaatttaaaacggaagaaaaggattaaagaaaaaaaaagaagaaaaaagatgggagaaaagaggacagattaataatggaagaatcgcaaaaagagaagaaggaagagatgaaaggaagaaacaaaaagaagcataaatgaattaaaggaatgagagacagagaaagaagaggaagaatggaaggagaaaaggaaaaagaaagtttatagtattaaacgaagtcaacaaaaaaagagaagaaggaggaaagagaaaaagaaaaacgaaaaggaaaaggaagatgaaaagaattgaataaattaattgaaggaatgaagaaggaaggacgaaagaaagaagaggaataatggtagaatgaaaggagagaagtaaaatgctacttgcttaaatggaagataacacccaaagaagaaaaaaaaagaaaaattttaaatggaatggataagaaaatagaaaaagaaaacacagaggaaaaggaagaaaaggtagaaaaagaaggaagaaaataatggggaagagaaaaggaatcatcagcagagaggaacaggtgtaaaaagggagagacaacactgaaatggagaggatgtgaagcgtaagcgacacaaattgggacaaaactcccgaaaaacttgtcgccggatgggacatggggcggggaggttgacgaaaagtgcctctcccattcggataaaggctaactattgccgctgatcagaagccggagggagcagggaaatttgatgaaaaatcccctaaaatcggataaaggttaactattgccccactgatcagaagccggaggggaggagg

SEQ ID NO: 43440 - DNA, 1014 bp, Heterodera glycines
ttccgatcattgcttctgcttcgcccctttcccttttccctccaattcgtccgatctgtcccgacagtccggctccccgtcacaaacgtagtccaacttcacacattcgttgctgccacacgcgcgctcgtccgccatgcaaccggctgcgactgcgttggtgtccccttgcaactcttggggcccatcttaagccgaatgtgtccccattttcttagtttcaaatgtcctcctccctcgtgtctcccacatgattggacgtgaagcgtcgcgtgtgcctccactgtccgtccgttgtgcatggccacgcatgcgtactgtcccgcgtgctgcagctgcgcttgcggaatggtcagtctcccgcccccctcgcgcactccgtcgggcaatcgtccgcccacccgtgtccacctcacctgcacaaaattaattaattaaatctcgaatttggtattttatgggttttcgagagtctaaattcacttccgggtaaaaactgttgtccgttgtccgtgcgcggcattcaaacgatgcttcgcgcccctcgcggacgctcaattcgggcgggtggacgttgatttggagatctgaacttggagtatttatgagataatcaattttaaatataattccgctaataattttcaaatttttcgtggttttcttgtcgaaccttcgttgaaagatctttgcctgcccattcggtgactccgttggtgatcaacagaattggcattttgggaggacaatatgagaaaaagagccattggcaaaagtgccattgcggactctctccgccgcctcatttcttttttaaattattttatttgttatgcaaaaaacaaaaataattggcggctccttctttaaagcattgcatttttgggaagggctaatcaaatcaaagcaaacaaaacgaaacgaaagttgcgttgacttggccgtaggaaaacggctgctgcggtgaaacgaattaaaaggggcaaattgggaccgatatgaacggaggggggg

SEQ ID NO: 43441 - DNA, 720 bp, Heterodera glycines
aatttattaacaaaaatgcaataaaaccgaaaaatacacctttaagaatcgacccaaaaaatttcagaaaaataaacccttaagaatcaaccctaaaattgaaaaagttcttaaaaattggaaacagatcgtttcactcgcaaaatctcagagaagcaaaataaattttggagattggtttataaatcaattttggccgataaccatatgtcttttaaccgcgaaaattttgaaatgttttttatgtatttgtaagtgcgatcagtgaataaaattgtttgccttaatctgaaagtattttcatataaaaaaagcaattaaaattataaatccgagccctattaataagtagggatgccatttctaagaaaaaaattgctaaataggcacccaaaaggcagaaaaaaatcgtaattaaattaaacaagtgcttaattcaaaaatttggtaaatcaaacataattaattagaatttttatcagaatttcgattttaatttagtattttataaacaaggaaataaaaccattcaaacattggtaggaaataagaactaaaaaagagttgctcggtttctataatttttttgacaagaaaatcaaataaaaatggcaaaaagtgtaactgttttttttggtaagaaaattcaattcgaagaaagaccctgaaattcgatgtttaagcatcatattttggatttgtccaattatgtatttaacg

SEQ ID NO: 43442 - DNA, 1346 bp, Heterodera glycines
  unsure (1)..(1346): unsure at all n locations
tatagtttcaaaaaaattttagggctttctactatttgcatgaatttgatttttaattttctttgacaatattaaaaattaagaaaaaagttctaattatttttttttaatttaacatttttttactagaaaaataaaaaaaaattgaaaaaattttgttctcggcgggttggatggggaaataatataatagcagccatcacctctcaatgccagatgttaattttcatgtcccaaaatatttttaaaaatcttaaattttttaggcacccctcagccgcgcattgaatggtccaaaaacggtgaaccgttggcgcagagtgacaatgtgtacttttggtccgaggccggccgagactatttggtggtcgaaaaagcggggccggacgatgtgggaaaatattgttgcacagctgaaaacgcgttgggcatggccagctcaagtgcccaactgttgctgagacgtgggcaattaaatcaattaaaaaaaagaaaaattttacaaaaaaataaaagtaaaaatttacttttttgaaaaatgaatttaattttaaactttaacaaaatccaaaaaattgtattccatccgtagtattattaattttttttaactcattataattaaatatatttttaaaatataattagaatgggtgcaccccaaaatatcgccaccgaaaatatcgccgagacaaaatatcgccgcagaaatttaaaaagaaaatttttcaaacttagaaattttcaagaaaaaaaccttaagaaattttttataagaaaattttaacaaaaaatcgttgaaaaattttttttttggaaaatttttgaaaaaaacttagcaattttcataaaatttcgaaaaatcgttcaaaagtttttcaaaaaatatttttcttgaaattttcttactaaaaatttcctaagaattttatgaaaaatttctaggtttgaaaaaaagtttttttttatttcggcggcgatattttgtcccgtccccaattagaataggcataaaatagatataaaatcgaggaatatggccataaaatatggacaaaaaatcaagaaatatgcttaaaaaacatgcaaatacattttcttaattgagggtatggtttccaaaatttttacaaaattagtaaataattaaaataatagtatcgagaaaatttttcctaacaaataatttttttggaatatttacgcgctaatatggaaaacatggatatggaacttcgaccaagctaaagtcctgtttttaattttcagacctcccacacatttttaaagtctcaaaattaaatattcgttttcaaaaaatttcgaattttttcgattganattta

SEQ ID NO: 43443 - DNA, 1123 bp, Heterodera glycines
  unsure (1)..(1123): unsure at all n locations
tattggggagtaaataaaagtttttttgtgactatttacccttcccatggatgnagnatttctaaaaaggatttaaaaataattttttgggtaatattttttaattatgttgttgaagaatttgagggtgnttntgatgngattgaaaatttttnagtttttnttgaaaagttttttnnnagaaaanggatgggtnaaataaaaaantaaanatntnanatgannaatttaaattnnnttanattttgggtttantttattatgntggnnnataaaaaaatggagtttttnnggtgnnaaatttttgtgaattttntttnggnnngtnataagnggattgtttgggggnaaatgaaaanaaattttgtgttattcgaatgcgctagccgagctctacattttcaaatgtatcaacaaagggtctatctccactctctggcgagttatgtccagccaaagcagagtgggccataaacacgaattttttaatctttggtatttcctctattttgagcctgctctacatttatgtattgtgccaatatgcctattgcaactgaaatttattcaactttcccgacaaattgttgagataattattctagacgatttttttatatctcaaagcttaactattgcctttttgtatgataactggtagatattgggagtaaaaaaaagtttttttgtgactatttacaataaaaatttatgcagcatttctaaaaaggatctaaaaataatttcttgcgtaatattttttacattatgttgttgaagaatttgaggctgcttctgatgcgattgaaaaattttcagcttttcttgaaaagttttttctcagaatttatacagctttcccgacaaattgttgagataattattctagacgatttttttatatctcaaagcttaactattgcctttttgtatgataactggtagatattgggagtaaaaaaaagtttttttgtgactatttacaataaaaatttatgcagcatttctaaaaaggatctaaaaataatttcttgcgtaatattttttacattatgttgttgaagaatttgaggctgcttctgatgcgattgaaaatttttcagcttttcttgaaaagtttttt

SEQ ID NO: 43444 - DNA, 731 bp, Heterodera glycines
taagttaattttcacaaattgtcgttaataatcccatggaattgttgctgtttcgtcagggcgaatttgacaaattgtacggctgtgagggatttaatgcggacaaaatcccaattgaagaaagaacaaacattgtgaacggatgcattttgatgatactttttttcatttttgaggtctttttttcgctgggtgatggaattagagggctcttgatttgaatttttctactcttgaccgagacgcaaaaattcaaagaaaatcccaaaagtttaaaaataaatcgatataatttaagctactgtacattccgtgtatggtatcaatttacaaaaacatggataatgcctgctacaaattgatgttcttcattggcatattggacatggtcatcttttaacagaataaattcaagaatatttatttatttttaaattaaatttccatagttggccttgttcattagtgggttggaaactggaattcttggcatcattggtgccgtttattgtgactatccattgctgatttattcaagcggaattttgggaggaggtatgctaatatctttattataaaaatttttaattattatttgttaaattaagctttatggtttgccgaaacaagtgccgaaatgttgttggcaattaaccgatgcatggaattgttgagaccacagttggcacatgccattttcagtggtcaaattttatcactgaaaaacaatg

SEQ ID NO: 43445 - DNA, 1014 bp, Heterodera glycines
cgtttgaatattttcctgtgcgtttccattttcgtttcttcgctgagtccgtcaactttgtgtacaaatgcctaaaaactgacgattaaagactgagaagagcaaatgccacttcaaatttgatgtttttgttgatgttgtacgaatggataatggcgggcaccattttcttcagcgcttcgtcataatcggcttgagcgtcaattacgaagagaagtgcccctgtgcaaaaaagcaacccaaaatgagaaaaaaaacaaataccaaaaataaatttacaaaatatttgcggttaaaatttctagctcaaagcacaataaatgcatctgatcaagcttggacccaccgcatcgcgagaagatcgaatttgggtcgaatgatgcctcgaaagggtccacctgaccggggaattcgatggtttcaaagttaatgaacgaatcggacacggcttaaggaacgaaacagaaaaacactcatttatttttaattacgcacattcattggtcacccgagcagtgctttccacaaaaagcgtctcattcggactcattttttggaagaccacctaaaaagacaaaataagaaaaatttaaaaatttggattgacaaaccttcctgatcgacgttttaccgctccgcttcagccccataatcaccttaagtcggagattaagcaaagaaattgggttatttgagctgacaatggtaggacgatagccaatcgaacattcggagtccgactcatcgtccttcagcccgtagtcgtaatccccttcatcgtcgcgataatacgcctttccttctgtcatttctaatataatgtaaggctattaaccagcaattaataaattttgttaaaaacattgtaatggagcttgcatattgaaacttcaaaatcattgacaattaatttatttttgttaaaacaaagttggcaaaatacaaatgcgatgatcttataataattagacactgaaatgtaatcagaataatttgtatcttcctcccacttgt

SEQ ID NO: 43446 - DNA, 729 bp, Heterodera glycines
gtcagcttctttcttgcaatagccaaaaattacggttcgtttaaacattaaaaaaataaagtacaaaagccaagaagggttagttaactgtaaaaatttcgatttggaattataatttctgattgtactcataaagtgcattaaaatcctttttaattatttaaaaaaaaattttaactaattcaaattaattgttgttattttatagaaaggtgaaggccttgccaaatgtatgggaaagaaatgtgagaaaagcaagacaaattaaagaacagaagcaataatgttaaacgattcatttaaaccaatttatgtaaataaattacgttgcattccgattttttaatgacaaaagcccataatcgcttttctccaaaataaattaataaaacattgttatttgtaatttaataataattaataaaatcatttaaatttaaattgggaagcattagaaaactttaacgaaaaatattttaaaaaatctgcaaaaattaataatatggaatacctatgggtcttacaaatattgctatgttttctttgtttcaatgatctgtaaagaataaaccatatttaaaaaatattgctctattgcagtatacaccactcataaaataacatgacaacattaatgtttaatatttttctagaagcaaaatcgtaagttttttatgatctgtaaaccgcatagagccaaaaaatgaatttttttaaaaaataaatttt

SEQ ID NO: 43447 - DNA, 501 bp, Heterodera glycines
  unsure (1)..(501): unsure at all n locations
gtaaaatttattacaaaaaatttaaaattttattactacccttccaagtaatgcaatttaaataaaagtaggcggcatttcccttattttctagtattcaaatctataataggctcttatattgtttaggccccacaaaattttttttacatttcaaaataaatgaagccaacctataggttttcggggtcgctgatcacgaatccgacatcagtttctcccaatttcgaacccctgacccgaactctaacaaaaggtcgaaaattcacttttcaacgaaatgcacatttattgcccaaaatcgatttaaaatgcacaagaatgaacggtagcagcgactgcaaaacacaaaagagtttcaaaaatgcagagtaatggacaaatccctgcagcttttgaattgaagagtcgtgcgacaaggcaacgacctgccacttcgtgcatttaaatcgattttgaacaataaatgtgcattttgttgaaaagtgngattttcgacat

SEQ ID NO: 43448 - DNA, 1001 bp, Heterodera glycines
  unsure (1)..(1001): unsure at all n locations
tgaaagtcgcaattgtcatttgacttancaatnntaatgaaattnaatgaaattcctttaattatattttatttcattttaaaaatttctctaagcgatatttaaaattttttcatgataattctaaaattttctgctgtaacttacaattttccttggcaaatcttccaattatacttgtgcttctgcttcgtcctaattgcacgtctttgttgccaacggaatttgtgattttaatttttactaaaaaaaattttctgacagaaaaaaagaaattacaaaattaaaagttcaaagcgaagcttttttttaatgaaataagaaagttcataaaagtataattttttgttgatataattttgaaaaccaaaggtgcaaagttgagttatgcgttagtaattaaataataattcaaaaaatgaaaaggcaaaaatgaagatgaactgaaagcttagccactaatccatgtaaaacataagcacttagaaaaagtttaatataaattaattgcgtgtcctgctgcgacgattacgccaaaaataaataaaacagaatttcatgctttctgtactttttttacctttatcttcgttactttgtccagaaaaactttccccctttgaagcattcccttgcgctgattttattggcaattcgtcaatggcatttttgaattttcgagtttctcgaaaagagtttcccaaatctgcaatacctaaacattttaattgtttttctattctaaattctcaatttttcattattttattccttccctgattaataataattattgcctttgtcttttgtttgttggcccatctgttccaaactttttcttttctcaaattgttcattttcctcctctattctatccgatctttgaagtatttctaaattttattattatccatatgttgttttcttttatcttatcctatttcgttctttcctcatattatgtaaattatgaattttcaaaaaaaaaaaatgtaaaaact

SEQ ID NO: 43449 - DNA, 1581 bp, Heterodera glycines
  unsure (1)..(1581): unsure at all n locations
tacattttttacacaaatttgtttctttttatttacacccaccctggttattccaaacattttcaaaacactgcgcatacctttgcatatatgcgtaaccggggaccttcgtcaaatccctccattctgtgtggcctcaaatacaattgtcaatggcgttgtccttcacacaaaggacaaaaagtgtcaatttgggtgggctcttttttcgaggacgcgaattttgaactcagcaaaggaataatattggcatattcctgggcgcttggtatttaaataatgtttgagtcgatcggtaaattgggtctaggcatcgccctacacacccaaacggaaatgatcggattgagtatcaatgagctcaatgttggtacaattttttatagaggagtttgcagccgttggctaattgacaaccccattcggttgtaaattcgcgtccacgcaggcattgatgtggtccaaattgtgccggaccgtactcgttccaagctgctacaaacatccaaaagtacgtgttactcgggctcgacgattcattcagaccaatgggctgcgtacatgggcggcacaattccggcgatcccagtcatccaaccctatacccactactgtgttaatcatacgattaactttgtggaccctatcacaggcgcccatacaaattttcattcataaattggctgaattattgattaccgcgacttaattcagatgacttttatttttgaaagatgacctanagaaaatcagaattttcattaaacaattcacatcaattcaatattacaaaaacagaactggcccatttcctgtgattgaaagaattattattatttttcaaattcgcatttggttcaattacggtgccaaaaaacagataattttttgctgataggtttttaaaacaaaattttaaagcaaataattattatttttcggcaattggatagctgcaacaaaataaataccaaaaagaagcacctaaattctcaaaacttttccacgtgagtacggtgtctttatcgcaaaagcagagaaaggtgtccaaacctgaaaatggacgagccctattaacaaagcaactcgtttctgtccccgaaagtttttctcggacccttcgaaagcttggtcgacccaccactcccttttcgtgtttgcaggcaacaccaaaatgaatttgcgtgcctgcaccgtcgctccaacgctctgtcatatgcgtccgagcgcacactaatttcgtgcgcgtcgtcaatttggggtggtatattgcgcgttgctttggccacagcggatttgcttgggccaacctaaagcgttcgttcaaaaatgataattgctttttcaaacgaatcattttaacccaacgaccccctaaaaactaaacataagtgtataaattttttttgcaaatattgttaaacgcaccaatgtttccaacgtgcgcttggacggctcgggtcgtttgacaagcgtcacatttgcagttggcgcgcattctcgcttttgtttttcaatttgatggtgaatttgattcgattagagccctgctattgttcataattaattatctaaaattta

SEQ ID NO: 43450 - DNA, 920 bp, Heterodera glycines
cataaacacaagggaggttaaatgatttatttttgaaattattgtgttaataaattgttataacaccaaaaaaggttttaaggaaacattaattttcaaaaaaccaatcacattattaagaatggtaaaaatcattaattatacaattttcaaatgcgcataaatagcagtacgcacaactgctttgctcttgtcagtaaggcgttcgtccagccgcgacatcagctttttcatctgctttcgtgcatcggcagcgtttggtccataaagttctccatcgccgttgtttttttgaaacaaattcgtttaccagcattgaaatgtccagtaacgtccatccatgcgaatgttgcggtgctttggcagtgcagggagccacggcgtctcgactccagtgttcgggaaccgcgctaggacgaactcaaatttctccgaacacacggcgcatttgtggacgaggtgacgggctcgctcaagatggctgaagtagttctcgcggctgtcgtcgaacagaagtcgatacatggcgttgtttgctgctccaacagtgtctgcgatgcgtgcccgtgctcccccgggcaattgtcgtacacttgcggtgctgcctgattccaaaaaaaaatccaaaaattaatacaatcattaccattttcattttaattaaaaaatccaaaaaattcagcataaatttgagtcaattgcgcggtggactgaaaaaaccaaaatttgaaaaaaatcaaagggttaatgtccactcccaggtcaaaaaaattttcacccccctccccatcggctgtcagtttttaaatcaatcaaatttttccgctcatcaaaaaacaacatgacatttgacacacgccccctcatatgtttagggtttccttatttaattaattaattgctcaccccccctcccatat

SEQ ID NO: 43451 - DNA, 869 bp, Heterodera glycines
  unsure (1)..(869): unsure at all n locations
gatcaatcccgaacatttcgtaaaaacgatcgggacggatcccgactcgggattccgaccgaatcccgatcccgatcaatcgcgaagattttttttcgggatcccgcgggattatcgggatttgcaaaaactcaatttttttttacgttttgtgtcaagttttttataatgcttctctaatatttataattgatcaattccattcatttaacaacatagctttaaattgttttttacaatttaattaatataaatttttaatatttggatgcgatttgttaacagattttgtccaaaaaaccaaaattttttagcgattttgagcaaaattttcaggaaaataaggattttagatccggcgctgcagatatgcatcgaaaaaaaatacgtagacaacaatttctaatctaattttttgcacaaaattcttagaaattattgtgtcataatattacctaaaagttttaaaataatattttaggaattaaaaaaatttttgataattcttttttgaaaaaaataaaggtcacaaaatagccaacttttacgttaaactttaaaattttattggaattttggatacctgtggaaatttttgggatttttacggattttttaagaaaaattagcaaatgacaatattttttaatttaaaattgaagatattaattaaaaaatgtagatttttcgaaaaattatcgtgacttcaatcccgcgggattggtaaaatggtcgggagggatcccggttcgggatcccgatgaaatcccgatcccgatcaatcccgatgaatttanaaaatccttcgggacggatcccgatgtcnggatcccgaanttannntccgcggatcccgaagaaatcccgcg

SEQ ID NO: 43452 - DNA, 1661 bp, Heterodera glycines
  unsure (1)..(1661): unsure at all n locations
ttttttttttttttttttttttttggggggggggggggggggggggttgtttttttccccccccccccccccccccccctcttttttttttttttttttttttttttaaaaaaaaaaaaaaaaaaaaaaaaaaaaaaccccccccccccccccccccccccaaaaaaaattttttttttttttttggagagaagaaaaaaaaaaaaaaaaaaaaaaacccctttttttttttttttttttttttttttcccgggggggggggggggggggggccccccctctctttttttttttttatatacaccccaggggggggggggggggaaaaaaaaaaaaaaaaaaaaaggaggggccccccaccccctctccccccccctccttttttttttttttttgtgttggaaaaaaacaacccccccccccccccccgggggggggggggggggggggggggggcggggagcaaaaaaaaaaaaaaaaaaaaaaaaaaaaaaattttttttttttttttttttatttttaaaaaaaaaaaaaaaaaaacacccattttttgtggttttccccccccaaaaaaaacaacaaaaatattatttttttttttaaaaaggggggggggggggggtttttgggggggggggggggccccaaaaaaaaccccccaccccccgcgggaaaaattttccccaaaaaaaaaaaaagtgggggggaataatcgcgggtttttaatattttttttttttttttaaaaaattttcacaattttttttccaaattttgggaaaaaaaaaaaaaaatttttttttttaaaaaattttttgaaaatttttccctttatagtttttaaaaaaaagatttttttaaaatttttttgggggattttttaatttggggggggggccctttggggcgcgggccctttttgggccccccaaattttgaaaaatcataaccttttttttttgtccagtatactttaaccaatttggcatccatttgaaagttttatgggggcttttatatttccaggtaaaaattggaaaggaatgatttcaaaaaataaaaaaagttaatgcccgcggcgccgaaaaaagcccaagaaaaaggtaaattttggaggttttttgcccatactttttttgtgaactgacgacattttttgaaatnttacaggctaatagagaatctgaagagctatcgaatgataacaaaaatttttaatttggttgatcaggaaaaaagttgttagcaacggcgccgaaaaggccggcgccgaagtgggcggttcccatttaattatgctttacgttgttgtcggaatattaaaaaattgccaagccaaatgttatgacgttgtaagtgttggcataaatataagggagtcaaagtcatcataaatttaacatttacctatatgcaaagtatggcgaattttaattttaatttttttagaaaaatgaatttatttcttattttattattgctcctaataattattttaaataatgttttattctttgctaaagacacgaaagagcagcaacctgtgcccgatggtttgtcttatctttgaattgaattttctcaattggttggcctttctctgcgggattttgcttcgggaatgtaaacattggccaagggaaatttaaattttaaaatcg

SEQ ID NO: 43453 - DNA, 891 bp, Heterodera glycines
  unsure (1)..(891): unsure at all n locations
aaaaaagaattttttgnaacatggctttagcgccaaaaatgaaaatttcaattttcaccgaatttaattaacaaaaatcaaaaacaatttcaaattaatctctcaattccacgtcttttcatttaaagaaaaggtgggcacagataaagtacatctgcgttaatgtgctttggttgttaggcaacgattggcggcgaggataaataaattcccaacaaattgtctggaatctctctcatcttttttaataacttcttggcgttgtgtgcaaacaaatgttgggatgggatttagagggttcattagggtgtgattgatgagtgaataaaatatgacgccctcattccatggcactctgaaagggattatgaaagtctaaagttcatttagattcaaaataatgttcaaagacaaatattgggacacttttatttacatattttaaaagtgatattaaaaaattaaatttaaaatacataaaaaattattttaagctatttaggtcccccttttttagcattttgtgcttattcagcgcttttctaagatttttttgtccaaaaatcattttaaaaaattgggggatttttgtagataattctttcatattttggaaattttattttaaatattttatgcacatatttgcgatttttcttactataattcccaacagcccttgtgatgagtgagtgaataaaatattccgtcctcattcgtggcactctctgaaagggattataaagttaaaattcacaccacataatgttcaaatattcttttaaatcagtatttaatggaatttgagctgataaaaaatagaaaatatttttagtttaaaaattttcaaaatattttaatattaatttaatacctaaaaaatctaaaatg

SEQ ID NO: 43454 - DNA, 1203 bp, Heterodera glycines
  unsure (1)..(1203): unsure at all n locations
ggggcaggaaacagagaaaaaggggcgtggcctatcagacgcgtacgccaacaatatcgattaagcgagagagtacatgaaagagagagagttaggtcagagaagcagaggaaaaggggcgtggactatcagacgcgtacgncactagtatcggttaggtgagagagtacactgacagggaggtttagagatacagagacatgggtgagcagagaagcagaaagtcagagacgcagagtggcgtccttttttatcgattggtgagagagcaagcaaagaagagaggttagagatacagagacgcaatgagtggcggccattattatcgattggcgagatagtacgcagagatgagaggttagagatgcatagacaagggagagcagacaagcagaaggtcaaagacgcagagtggcggccattattatcaattagtagagaccacacagacaggagaggttcgagaagcatagaatataaagaacacatacaagggatacattgcaaaataaatatgcgggcatataccaaaaaaaaggtggttggctgccttataaaggcattgcgcatcaggttgttttatatttattatcctgattgggattgcgcaggaaaggaaattgctttattaatatcaaccaatcttggcctgatgagcagcacactgccacccttgaagcacaagacgacagagcacctgaaaagtctcgtaacttagcaagataatatgagagacctcaaggcctaaaacacaaattgaaaatgctgccaggataaacggagttcattaattagacctaccgccctggttaacagcaaacgtggaataattgtcaaaaggtaaccaatcttggcctgatgagcagcacaccgccacccatgaagcacaagacgacagggcacctgaaatgtctcttgagattagcaatgcatgtggaaccacctcaagacctaaaaagcaaattaatttttgttgccaggataaacagagttcattaactagaactaccgccctggttaacaacaaaaaaataacaattcaaaagaatatagaagtatgaaaaaacgaaggaaagtgggtgacgcatccttttatatgcggcccgccctcaaatctaggtcaagtgttactatttttagaatatacaagccatctttgaatttcccgccaatttttgaatttgaattttcccgccagttttt

SEQ ID NO: 43455 - DNA, 1135 bp, Heterodera glycines
atttccgtctttgtcaacagaattactaaatttggcatagcttaatgtcacatgacaaaattcacgctgcacgctgattaagataaacaaagtcattaataaccggatattcacaggaaatggtacctcattattgagaaaggcatatcaactgttttgaaaattttacataatcaaaacattatggttggtatttattaaccaacatttattagtcatcgatgtaaataccaaaaattaaaaaatttttagtcttttttgtattttaaattagtaaaatatattttttaattcgtctactacgaaataagtaaaaatgaggcgaattattttcaaatttttgctgattacgattgttaaattatttttatttatctaatttcacattttttttatgaagaaactttttactctctctaataatggtaaatgatcaattgtaattgcggttccaaattgttggcgcaaattattttgtggaaatggtctcagggaacacagaccatccaaaaagtagtatttgatttactaatagattaaacacgattaattttggggctttgatttttaattgggtatatacgcccgaccccgacgcttccaaccccgacaagccctgaccccgacccttaaccctgactcggggtcggggttaaaaatacacccctaagaatggcataatcgtttgacaaatttttatgaattaaaggaaattttgcttttgttttttcaatatgttctggtttagtggtcagtgctttaaaattaatagtactttatgagttcgttgccggttgacgttttctgttgattttttttctgattaatagaaaaattttattaaaattaaaagtccaattttccttgactaaatcatgaaaatttaatatgctttaaatattttaacaaaataccgaagaagaacaaaattttatcggaaaaatcttcattttttggtgattacctggttcaaaaatagagcataaatttaaaaattcgctcggcgacacctatcggcaccgccgaattcaatttcactgatcatttaaataattttaatgatgattatgactaacttttttttttgaattttttgcttgtataaaattttaaaaaaatacggaatataaaaaaa

SEQ ID NO: 43456 - DNA, 1068 bp, Heterodera glycines
tttagctaacaatttaacaaagattttcttttcgttttctgattaatttgtcactccaattggtgcccaaaaagccaaatacctaggtgatttttgggatctattaaacagagattatcgtgaattgtagatgaaaaatccacccaaaaagggattaatgggaacagtgaaaaatggctgggcagagctttcggattagatatgcgtaaattgggtctgaattattgggttaatccttaacccaaaagtaatttgcaattattgacagatacatatatatatatttttgattttgttaattaaatttatttttattttttattattttttatttatgaatttcttttcttaatatttaatctgatttttactatttatcgattgattagcataagattgccagcaacatttaaagatttattaatttttagtgatggaattgacgcttattatattttttattaatatttttttcgaattaatctttttacgtttacaatttatacaatttcgaaaatcgctattaataccgtaattttgattactagaccccattatgattagaagatcccgttagattataagacccctttttgcgaggggttgaacaataaaaaacctatgtctaataatcgaaaaaatacggtaagtcataaaacagctcattaaattaataatccaaaattattctaacaaattgctacctaaaagactcagttccctaattgataatcctaattacagggtgaggaaaaagtttccgcacttttttaaagttcattttttcatacccatttaacattaacaaacaaaatttcttgataaaaacaaacaaatgtcagtacaataagtcggaaaattacaacaaatgctcgaaattttcctcattggccgagctataagcataaaagcgcttctgaaaattggcaataatggtcgcacccaatttatgccatatgccatgcctattaaaccatgaatgacattttttgacagactaaaagcctggactaaacagacaactaggcgataaaaggtcataaaattttagaactgggccaaaattgg

SEQ ID NO: 43457 - DNA, 1232 bp, Heterodera glycines
aggttttgtccggtttctaatctgtaaaacagcgaacgagaagtgaccgtaaaaactccgagagagtttccaaaacttggtaggtttgtaatttattctaatagcatgaaaatttcgaatataatatttaatttataaaattttaataaaatattacaatgctcctgcacacaattgtttgaaattttccgtcgtctgtggcacagcagcaaccatgaggtcaataattatacgtcctgaaattttatacttttttccaaaaaaatttagtattttattttaagcgccgaactggccacgactcattttttcgaaattaattaaacaaaaaattaccgcaagaagccgagtcactttcaatgtccttaaacataataataaaaaataagagagaaaggaaaaaagaaaaaattaccagaaatacgactgggtctgatggatgagccaacgatgcattaaattccatccatttgtactgtggtggcatatctatatgtaaataaattaattaggtgcaaatttgctcgaagaaagggattagcgttacatttatttttccaaatatttttgacaatttaatttaaagaaagaatttttagtgaaaccaaacgtattataagtaattaaactgatttcttcgccctcctcttcagtgggggcggtgagagaagcatcgccaccacttttggcattggcatcagaatctgctgaggcggcactgcttttgttgttctccttcctcattttctggcaatggtttttgacgtttgaagttgaaagttgaaaatttacaatatttcttcacttaaaatattggtatttaggaaaataagggttaattaaaacaaatattttaactctattaaactttatgagtccaacacattgtcaaatatggaaatatggacaaaaatctgaaatatggaaaaatatggaagtaaaaaaggatcctagaagcatcaaacaaagctaaaaacactatttacgtggtttgtaggcaaaaaaaaaaatggaaatccatacaaatccagtcccaactgataagcgcaaaaaacaaattttcttcgaacacttttcgatatatagcgacttttttagcactattttcaactacagtattttcgcttatgaaactttttaataactcttttgacttgggaattttaaaaaaaaactattttttcaaatattatgaaaaaggaataaaaaaaaaattaaaaaaatatacccct

SEQ ID NO: 43458 - DNA, 546 bp, Heterodera glycines
ttctccccataaatctgggggcatcggttcggggggactgccccgaaaacaaaaaaatcgattttttcaagtgtccgtttgaggtactcaaacaattatggggagcaaaaatccaacgcagaattaaagtacaggctatagggaagctattcccgaaggattcggtctccccataaatctgggcgcatcggttcggggggactgccccgaaaacaaaaaaatcgattttttcaagtgtccgtttggggtactcaaacaataatggggagcaaaaatccaacgcagaattaaagtacaggctatagggaaggtattccggaaggattcggtctccccataaatctgggcgcatcggttcggggggactgccccgaaaacaaaaaaatcgattttttcaagtgtccgtttggggtactcaaacaattatggggagcaaaaatccaacgcagaattaaagtcagactatagggaagctatttccgaaggattcggtctccccataaatctgggcgcatcgggtcaggtgtactgcccccaaaacaaaaa

SEQ ID NO: 43459 - DNA, 770 bp, Heterodera glycines
ttttaaaatttttaattcctttttaaacaggccaaaaagtttaggcttaacttttttttcagaaactgatcagaagcgcaccaaactttgcagggatactgaaaggaagagaaataacatattttaaatattatctagtcagttcatttaaataatttttatccaaaaaatttttttttgggttttcggggcagtccccccgaaccgatgcgcccagatttatggggagaccgaatccttccggaatagcttcactatagcctgtactttaattctgcgttggatttttgctccccataattgtttgagtaccccaaacggacacttgaaaaaatcgatttatttttgttttcggggcagtccccccgaaccgatgcgcccagatttatggggagaccgaatccttcgggaatagcttccctatagcctgtactttaattctgcgttggatttttgctccccataattgtttgagtaccccaaacggacacttgaaaaaatcgatttttttgttttcggggcagtccccccgaaccgatgcgcccagatttatggggagaccgaatccttcgggaatagcttccctatagcctgtactttaattctgcgttggatttttgctccccataattgtttgagtaccccaaacggacacttgaaaaaatcgatttttttgttttcgggggcagtccccccgagccgatgcgcccagattatggggagaaccaatccttccggaatagctttcctatagcctgtactttaattct

SEQ ID NO: 43460 - DNA, 1300 bp, Heterodera glycines
agcaacaattggatgaaaaaataatgaaacaaattgaggtatgtatgattcatttgtcaatttatgaaagggttactctattttaaaggttcgataagaaaacctttgaaccattaattcaattttgtatagctaggctaaaatcttgaacccctttttagtattatttcggtgatataaatttgccgcgcgacaaattcctccaagaagagatgaagaaagacgatggctgtatgttttggttttgtacacaattgtttgaccttttaggggtttcgcttacgacgatgctaaaattcaaccgactggcggcattaagcactgatttggaccagatcacctcagccctgaaagattcacatctcatcgacgtgtcggacgataacgtaaaaatccgtcgaaaccccgaagaaccgctacccgaaaacactttggaatattggcaggagattaagcgtcgtaccgtttacttggtaagttaattttatttcaatcacaaaagttataccaaaacattgtaccgctttagaaaggattcccgcaagagagcactttggacgaaattgctaaatttgtaggaaagttcggcgaagtgaaaaacattctgatgcgaaagaccagagggagcaaagaaacgcccaaagtgttcaagggatcagtcttcgccacttttgtggaccaggaacaggcgaaaaaattggcgtcggttaaggacctcaagttcaaggtggttgagctaaaaatcaaatgaaacaaaaagagaaaacgggcatttattgttttaaggacgaatacgcaatggtcaacaaaatgcaggaggattattgggcggaaaaaaacaatgaacgacgacaacagcgggaactgaagaagcaaatgcgaaaggagaccatcgataagcaaaatcagtcgcattttgtcaagggattggtgctgaaacttagcggtctgccaatgcaaagcggggagacgaagaaggaagtgagcgtgcacaaactcaaagagttctttgaaccgtatggccaaccggcgtatgcagtgatcgaaggctcggaggtgactgactgacaaaagagaggggttttgtcattttttctttacattgttaaaaaatgggtgtttctaatttaatttctgtgctttcaatggtgctgaatcagcttgattttgtgagatgacgccgtttaatctaagattttcatcagttgactttggcttataactctaacatccatccttttaattgtgtcctattttaaaagaaagcttctctttaagcgctttcgaatgatttaatagt

SEQ ID NO: 43461 - DNA, 1227 bp, Heterodera glycines
gtattttcagcaaaaaaaaaatactgaaaaatttttacaaaatatctttttagtaaatacttctcttccatttcgcttactcaaaaggctaaaattttttaaaatttctaaaacttaaagtttcaattagaagaaaatatcttggtattatgtataacagcccttaaataaatattaaaatttattttttgtccatgttttatcgaatgattaatagggcttatactgttttacctattttgttcctgagctctcacgaaaaaaaaattgttttttttgttggttattaagctattttcgagttttagaacaaacctgaaatcctaaaaattttgaaaaaacctattttgacctatttggcgttttgccaacattaattaacaaaaatacaattgaaaagaacaatacacccctaagaatcgaccctaaaatttcagaaaacacatccctaagaaacaaaaattttcttaaaaattcatttatttattttcttaacaaaaatttctgattttaaaaattgcgtatctcaatactggtttggcttaatattgttgctaaattttatgattttacaccccctaaatttgaaagtttttggcacctattttcacatttttagcacttattttggcagtttttagcacctaaaattactaatgttttgctttggctccctgtgaatgttattataatttttttgaaaagtacgaatcggatacagtacgaatgggaaagtacgaatcaaatttgtagattggtaccgtaaaatttaaaaatttcaaccgaatttgtacagtataaattaaaaattttaaacaaaggtttgtctcaacggatgagttcccggcggatgtgtacccaaattatttgtcgggctgcgtttatttgtcaacttcgccagcaatcgccgccattttggcacacacccacgaaattgatggattttatatggacgacgtgctgttcaccggcattttggccgagcgggccaatgtgacgttgttcgaccaaagggcgcactttgtctgggccacttcggtgagcgaagggccaattaactgctaattacaccaatatataaaattgttaatttacattcattgatttgttttagtttgatttaaagagtgctttctgtgaggacggtgtgccgacggcattttccctgtggggcgcagaagtgccggaagattttgaggaacactacggaagaattaaggagaaaaa

SEQ ID NO: 43462 - DNA, 567 bp, Heterodera glycines
cccgtttctaaatttgttgggctattaagaccgcttcgcggcctcagacgggcgcttcgcgcccgttttttagcttgttaggccgcttcgcggcctcagtcgggcgcttcgcgtcggtttttcaatttttgttggccttggacgggcgcttcgcgcccgttttttaaattcgttgaactcatacgggcgcttcgcgcccgttttttagcttgttaggccgcttcgcggccttggacgggcgcttagcgcccgttatttaaattttgaggtacaaaagtgattaaaagaggtacaacaatgattagaagaggtacaacagtgattggaagaggtacaacagtaattagtaaattcattaaattaaaatgaaaatattttttaacaaatttaatttaaaaaatacatgaaattctatcaattaaaaaaataattcatttaaacttataaaatttattcattaaaaaaaattaatttaaatataattttttatttattaactcaaaaaatattttaaatgaataaaaattgacaaacactaaataaatggtatagaaataatgtacaccg

SEQ ID NO: 43463 - DNA, 1318 bp, Heterodera glycines
ttggagcgatggcaacagctaaattaaaatattgggttctgcagaatgaggcacaaatggaaccgtattgtgagcggagtgtcgcggcacaacagaagttgggctattcaacaaaagattctgaagagatggtggcgattccaatggcattccgtgccaatttgaagatggcggcgattcaaatggcattccgtgccaatttgaagatggcggcgattcaaatggcattccgtgccaatttgatgggtgtgcaccgtattggaagggatttggcactcgcggtatgtttagttggaggagtggcttttgcgcatgcattaaaaggcgagtgagcgaattgggccgattgtgaactgccgacgcatttgtttggtacatttcgttgaatggcatttgttgccgcgggggcggtgggcccataatttgccctgtgaaatatgcaacattagctgttttttgatttattcaataattcaaaattgcgtaaatgaagccaaatgacggattactgtcagtttgtacggtagggacgggttccatttgcgaattcattgaaaatgcaaagtcgtccatttggccaacagtggaagtcggtagtggcggaaacatctgagagagggaatgccaatgcctagtaatcatcgcgaatggcacttccttaaggcgttttaccccgctgatttggttggattgactggccgaaatttggtgaccagcagcagccgcggaattgtcggcatggccttggccaattccgagagccatcggaaggagtacatcatcgaaagtttggccagccatttggtcggaggaggacccaaatggtagcgacgagtggtacggaagctgatcactgtgctgctgccaatggtccgacgaaatgaacgcttcggtctgttgctgaaacagttggtcaggccacagcatttgttctgaatgaatgcgaatggcacttcatcaataggcctaagcctttttttgtcagtctgaaaagctcaaaaaccgtaccaaatgaaagtgtttcaaaaccttttggcctatattttaacatttttttccgcatatcgcatgatttccaagaataattaatgaatttggtgcttctaagtaaagttacgataaaatttgtcaaattgactttttaactaaatttcattgcgtttaccccaatttcaaaatttaaatgcattaattttaaattttattttagcctccactcacccctcgttttgccttcgttcgccgtcgttcgttgttcgtctttgcctatttgcagatcgaatagaatgtttgttttgatcggctgccaatgcatcgg

SEQ ID NO: 43464 - DNA, 1214 bp, Heterodera glycines
agattttacttccttttcatcatcgccttattattttttataatactagaagaaattgtaaatttttattagcataataatgcgtaataggaaaatattcagataatttacaaaaagaaaattgataaataataaataaagtttaattaaaaaaaggaattaaatttggtgggctttttttttggggggggggggggggggaggttaaagcaattatattttgtggctttttggaagggaggaggccggaatctagcactgatcaatgatcacgaatgtaatccatcaaaaaggatccttccatgatgtcgtccatgaacgcctgacgcaattccgatttaagctccgtcgatggtgccgactgctgccgtttgatcaatgcggcacatttttttttatgtgcgttgaaacgccggccaaatttcgccgagcccgtcatattattgctggttaaaagttttgattaaaatttttgtttaattaataataaaaaagtacgacggattgcaggtttttttcaacgcgcaaaaaagcggaggatcgttctcaattttgccaagatttggcgtcgttggcaaagtctaagaaatataaaaaagaatttttctgaaaaatttaagggttgttaccgttgtggtggtcaattcctacaaaaatataaattaacaaaatactcaaggactaattttttgaccattaataaattttttgaaactcaaccaatttaaagattttcatttaacatatttaatatatttttgataaaagctatgtccaaccggcgtcactgtcgtcactgttgacatttgaattgtttgctaaatgaaataaaaaaataatttaaaaaattcttgtaatataattttatttattttgtcattttcccattacattgccaacatggcaacagacgaattcgtagtcactcgggcaacagccgaatccacgatagcccttatttggccggcaccagtatgtgccacagccgcataagtccatgatttttttggtttcatttgcgcaatgcccaggatgcttcaaaattaaaaatatttaacaacccaattaaacttaagcattattttggtctcattcgataatttgtttaaatttgttttgagtatacccaagaatatattgaatataatttattttttactaaattaacggtaatacacattaaaaaaaatttctttacccagttttggtaaatc
